United States Patent Application Publication US 2014/0199313 A1 - sequence listing, part 12

SEQ ID NO: 58382 - protein, 65 aa, Artificial sequence; identical to SEQ ID NO: 1300
  Consensus
  Variant (1)..(1): Xaa in position 1 is Leu, Val or Trp
  Variant (2)..(2): Xaa in position 2 is Leu, Val, Ile or Ala
  Variant (3)..(3): Xaa in position 3 is Val, Ile, Ala or Leu
  Variant (4)..(4): Xaa in position 4 is Gly or Ala
  Variant (8)..(9): Xaa in position 8 to 9 is any amino acid
  Variant (11)..(17): Xaa in position 11 to 17 is any amino acid
  Variant (18)..(18): Xaa in position 18 is any or no amino acid
  Variant (19)..(19): Xaa in position 19 is Ile, Val, Leu or Met
  Variant (20)..(25): Xaa in position 20 to 25 is any amino acid
  Variant (26)..(26): Xaa in position 26 is Tyr or Phe
  Variant (27)..(30): Xaa in position 27 to 30 is any amino acid
  Variant (31)..(31): Xaa in position 31 is Ile, Val, Leu or Met
  Variant (32)..(32): Xaa in position 32 is Val, Leu, Ile or Thr
  Variant (33)..(34): Xaa in position 33 to 34 is any amino acid
  Variant (35)..(35): Xaa in position 35 is Val, Leu, Ile, Met or Phe
  Variant (36)..(45): Xaa in position 36 to 45 is any amino acid
  Variant (46)..(51): Xaa in position 46 to 51 is any or no amino acid
  Variant (52)..(52): Xaa in position 52 is Gln or Glu
  Variant (53)..(53): Xaa in position 53 is any amino acid
  Variant (54)..(54): Xaa in position 54 is Phe, His or Ile
  Variant (55)..(57): Xaa in position 55 to 57 is any amino acid
  Variant (58)..(58): Xaa in position 58 is Gly, Ser or Ala
  Variant (59)..(60): Xaa in position 59 to 60 is any amino acid
  Variant (61)..(61): Xaa in position 61 is Ala, Ser, Gly or Val
  Variant (62)..(62): Xaa in position 62 is any amino acid
  Variant (63)..(63): Xaa in position 63 is Leu or Val
  Variant (65)..(65): Xaa in position 65 is Leu, Met, Phe or Ile

SEQ ID NO: 58383 - protein, 105 aa, Artificial sequence; identical to SEQ ID NO: 1301
  Consensus
  Variant (1)..(1): Xaa in position 1 is Leu or Val
  Variant (2)..(12): Xaa in position 2 to 12 is any amino acid
  Variant (13)..(13): Xaa in position 13 is Arg, Gly or Asn
  Variant (14)..(14): Xaa in position 14 is any amino acid
  Variant (15)..(15): Xaa in position 15 is Ala, Val or Leu
  Variant (16)..(16): Xaa in position 16 is Leu, Val, Ile, Thr or Phe
  Variant (17)..(17): Xaa in position 17 is Val, Ile, Leu or Ala
  Variant (19)..(19): Xaa in position 19 is Asp, Asn or Glu
  Variant (20)..(20): Xaa in position 20 is Ala or Ser
  Variant (22)..(22): Xaa in position 22 is His, Gln or Val
  Variant (23)..(24): Xaa in position 23 to 24 is any amino acid
  Variant (25)..(25): Xaa in position 25 is His, Asn or Pro
  Variant (27)..(27): Xaa in position 27 is Leu, Ile or Val
  Variant (28)..(28): Xaa in position 28 is Ala, Gly or Thr
  Variant (29)..(29): Xaa in position 29 is Gly or Ala
  Variant (30)..(30): Xaa in position 30 is Gln, His or Leu
  Variant (32)..(32): Xaa in position 32 is any amino acid
  Variant (34)..(34): Xaa in position 34 is any amino acid
  Variant (35)..(35): Xaa in position 35 is Gly or Cys
  Variant (36)..(37): Xaa in position 36 to 37 is any amino acid
  Variant (38)..(38): Xaa in position 38 is Asp or Ser
  Variant (39)..(41): Xaa in position 39 to 41 is any amino acid
  Variant (42)..(42): Xaa in position 42 is Leu, Ile or Phe
  Variant (43)..(45): Xaa in position 43 to 45 is any amino acid
  Variant (46)..(46): Xaa in position 46 is Leu, Met, Ile or Val
  Variant (47)..(52): Xaa in position 47 to 52 is any amino acid
  Variant (53)..(59): Xaa in position 53 to 59 is any or no amino acid
  Variant (60)..(60): Xaa in position 60 is Gly, Ala or Asn
  Variant (61)..(64): Xaa in position 61 to 64 is any amino acid
  Variant (65)..(65): Xaa in position 65 is Leu or Met
  Variant (66)..(67): Xaa in position 66 to 67 is any amino acid
  Variant (68)..(68): Xaa in position 68 is Tyr, Phe or Trp
  Variant (69)..(71): Xaa in position 69 to 71 is any amino acid
  Variant (72)..(72): Xaa in position 72 is Arg, His, Ala or Cys
  Variant (73)..(89): Xaa in position 73 to 89 is any amino acid
  Variant (90)..(90): Xaa in position 90 is Phe, Tyr or Leu
  Variant (91)..(100): Xaa in position 91 to 100 is any amino acid
  Variant (102)..(103): Xaa in position 102 to 103 is any amino acid
  Variant (104)..(104): Xaa in position 104 is Gly, Ala or Val
  Variant (105)..(105): Xaa in position 105 is Leu, Met or Phe

SEQ ID NO: 58384 - DNA, 1216 bp, Saccharomyces cerevisiae
  CDS (208)..(993)
atttgtcataatgacaattacataaccccttttatatacataaatatttgggtcagcacaaatttattttgattttccattattttagcagcaacaaggttgaaaaaatcgccggcgcatcaccaacttgaaggacaaagataaccttacttgaaatcaaataagtgatgaatacgacagcggaaaaggttatacgctttgctcattatgacgcaagaattcattgataaagtatcttcctacctgactcctgatgtggacattgcacctatttctcaaggtgcagaagccattgttttcacaacgactactcacccatatctcccaagagcaaaggattctcatcaaaagtatattatcaaatataggccaccaaagcgttatagacatccacaaatagaccaggcactaacaaaacatcgtacgttgaatgagtcgcgtttattggccaaattatacttgattccagggctatgtgtccctcaactgatagcgtgtgatccatacaatggattcatttggttagagttccttggagaagatcttcccggagggcacggttttagtaacctaaagaacttcctttggatgcatgaccaagatccatatagtgatcttgtagcaactacactacggaaagtggggcgccaaattgggttgttgcactggaatgactactgtcatggtgatttgacaagttctaacattgttctcgtgcgagatggtgcgagatggacgcctcatttgattgatttcggtctgggctcagtttcaaacctggtcgaagataaaggcgtcgatttatacgtcttagagagagctattttaagtacacattcgaagcatgcggaaaaatacaatgcttggatcatggaggggttcgaagaggtctatcgtgaacaaggtgcgaaaggtgccaagaaactgaaagaagttaccaaaagattcgaagaggtcaggttgcgtggtcgtaagagaagtatgctaggataatataaatgctagcgtactgcctgtatatcgctgcacataatatgtatctataatttatattaacgtacataacttttaggtatgttaccatcaaagcgtgtccgagttattgagattttgacaaattcagacaaatcatttttgaagaaccatatatataaatatataaagaaaagaaaggtaaaccaaagacagcaaacaatcgaaaagtggacaaccagca

SEQ ID NO: 58385 - protein, 261 aa, Saccharomyces cerevisiae
MTQEFIDKVSSYLTPDVDIAPISQGAEAIVFTTTTHPYLPRAKDSHQKYIIKYRPPKRYRHPQIDQALTKHRTLNESRLLAKLYLIPGLCVPQLIACDPYNGFIWLEFLGEDLPGGHGFSNLKNFLWMHDQDPYSDLVATTLRKVGRQIGLLHWNDYCHGDLTSSNIVLVRDGARWTPHLIDFGLGSVSNLVEDKGVDLYVLERAILSTHSKHAEKYNAWIMEGFEEVYREQGAKGAKKLKEVTKRFEEVRLRGRKRSMLG

SEQ ID NO: 58386 - DNA, 735 bp, Mus musculus
  CDS (1)..(735)
atggctggcacgtcctcggaggcggaggccgaggcgctggccgctgcgcgcgagcggagccgcctcttcctgagcggcctagagctggtgcagcagggcgccgaggcgcgcgtcttccgtggccgcttccagggccgcgcggccgtggtgaagcaccgcttcccgaagagctaccggcacccggagctggaggcgcggctcggccggcggcggacagtgcaggaggcgcgcgcgctgctccgctgccgccgtgcggggatagctgccccagtcgtcttctttgtggactatgcgtctaactgcttatatatggaagaaatcgaagactcggtgactgttcgggattatatccaatccactatggagactgaaaaggacccccagtgcctcttggacctggccaggaggatggggcaggttctggccggaatgcacgaccaagacctcattcacggggacctcaccacctccaacatgctcctgaggcggcccctggcgcagctgcacatcgtgctcatcgactttgggctgagctttgtctcaggactgccggaagataaaggcgtcgacctctatgtcctggagaaggccttcctcagcacgcacccccacaccgagaccgtgtttgaagcctttctgaagagttacggggcctcgacccagaagtccagtccagtgctgaagaagttagatgaggtgcgcctgagagggcgaaagcggtccatggtcgggtag

SEQ ID NO: 58387 - protein, 244 aa, Mus musculus
MAGTSSEAEAEALAAARERSRLFLSGLELVQQGAEARVFRGRFQGRAAVVKHRFPKSYRHPELEARLGRRRTVQEARALLRCRRAGIAAPVVFFVDYASNCLYMEEIEDSVTVRDYIQSTMETEKDPQCLLDLARRMGQVLAGMHDQDLIHGDLTTSNMLLRRPLAQLHIVLIDFGLSFVSGLPEDKGVDLYVLEKAFLSTHPHTETVFEAFLKSYGASTQKSSPVLKKLDEVRLRGRKRSMVG

SEQ ID NO: 58388 - DNA, 696 bp, Danio rerio
  CDS (1)..(696)
atggctcaaacagactcagcaaaagcggctgtcccgtcctatttaaaagaggcgcagatgattaaacagggcgctgaggctcgggtctatcgaagcacgtttttggggcgctctgtgattattaaggagagatttcccaagttataccgccatccggaagtggatgagaaactgacgcgccgcagaacaacacaggaggtgcgctccatactgcgctgcaggagagccggcatcagcgcaccggttgtgtattttgtggactacgccacacactgcatcttcctgcaagacgtggtgaactctgtgtcagtgcgagaccacatcagatcgcagccggacggtctgcagactctggcggagcgcatcggtgaagttctggctcagatgcacgatgaagacgtcattcacggagatctgaccacctccaacatgctgctgaccagcggaggacaacagcaagacttcaacctggtgctcatcgacttcggcttgagctacatctccgctcttcctgaggataaaggagtggatctgtacgtcttggaggaagcttttcttagcactcatccaaaaactgaggccttgttcgagaggcttctgaagagctacagcagtgcctcaaaaaagtcctccgcggtcattaagaaactggacgaagttcggctgagaggacgcaagaggtcaatggtgggatag

SEQ ID NO: 58389 - protein, 231 aa, Danio rerio
MAQTDSAKAAVPSYLKEAQMIKQGAEARVYRSTFLGRSVIIKERFPKLYRHPEVDEKLTRRRTTQEVRSILRCRRAGISAPVVYFVDYATHCIFLQDVVNSVSVRDHIRSQPDGLQTLAERIGEVLAQMHDEDVIHGDLTTSNMLLTSGGQQQDFNLVLIDFGLSYISALPEDKGVDLYVLEEAFLSTHPKTEALFERLLKSYSSASKKSSAVIKKLDEVRLRGRKRSMVG

SEQ ID NO: 58390 - DNA, 735 bp, Mus musculus
  CDS (1)..(735)
atggctggtgtgtcctcggaggcggaggccgaggcgctggccgcggcgcgcgagcggagccgcctcttcctgagcggcctagagctggtgcagcagggcgccgaggcgcgcgttttccgtggccgcttccagggccgcgcggccgtggtgaagcaccgcttcccgaagagttaccggcacccggagctggaggcgcggctcggccgtcggcggacggtgcaggaggcgcgcgcgctgctccgctgccgccgtgcggggatagctgccccagtcgtcttctttgtggactatgcgtctaactgcttatatatggaagaaatcgaagactcggtgactgttcgggattatatccaatccactatggagactgaaaaggacccccagtgcctcttggacctggccaggaggatggggcaggttctggccggaatgcacgaccaagacctcattcacggggacctcaccacctccaacatgctcctgaggcggcccctggcgcagctgcacatcgtgctcatcgactttgggctgagctttgtctcaggactgccggaagataaaggcgtcgacctctatgtcctggagaaggccttcctcagcacgcacccccacaccgagaccgcgtttgaagcctttctgaagagttacggggcctcgtccaagaagtccagtccagtgctgaagaagttagatgaggtgcgcctgagagggcgaaagcggtccatggtcgggtag

SEQ ID NO: 58391 - protein, 244 aa, Mus musculus
MAGVSSEAEAEALAAARERSRLFLSGLELVQQGAEARVFRGRFQGRAAVVKHRFPKSYRHPELEARLGRRRTVQEARALLRCRRAGIAAPVVFFVDYASNCLYMEEIEDSVTVRDYIQSTMETEKDPQCLLDLARRMGQVLAGMHDQDLIHGDLTTSNMLLRRPLAQLHIVLIDFGLSFVSGLPEDKGVDLYVLEKAFLSTHPHTETAFEAFLKSYGASSKKSSPVLKKLDEVRLRGRKRSMVG

SEQ ID NO: 58392 - DNA, 663 bp, Pyrococcus abyssi GE5
  CDS (1)..(663): transl_table=11
atgaagctaatcaagcaaggagcggaggccaagatttatcttgcagagttctcggagctttactttgattatccaattaaggttatagtgaaggagaggattaagaagaggtacagaattccagagatagatctgaagctcaggaaagagagaactatcagggaggcaaggatacttcgaagggccaaggaattcggagtcaatgttccctacgtgtttgaggttgacactaaaaatatgataatagtgatggagtacatagagggggaaaggctcaaagagctcctggaaaagctccccatggaagaaagacttaaagtatgcagggaagtcggaaggcagattggaaagttacatgaggcggggatagttcacggggacttaacgacctcaaatatgatacttagggaaggcaaggtttacttcatagatttcgggcttgcggagtttgacgatacgattgaagctcagggtgtagatttacacctgcttaagagagccatggagagtactcattataagtggtttgaaaggggctttgaggaagttttgaagggatacatagaaatcagaggagaagataagggaagggaaattagggagaagataagggaaatagaattgaggggtaggtacagggagagaagctggattacgcagtaa

SEQ ID NO: 58393 - protein, 220 aa, Pyrococcus abyssi GE5
MKLIKQGAEAKIYLAEFSELYFDYPIKVIVKERIKKRYRIPEIDLKLRKERTIREARILRRAKEFGVNVPYVFEVDTKNMIIVMEYIEGERLKELLEKLPMEERLKVCREVGRQIGKLHEAGIVHGDLTTSNMILREGKVYFIDFGLAEFDDTIEAQGVDLHLLKRAMESTHYKWFERGFEEVLKGYIEIRGEDKGREIREKIREIELRGRYRERSWITQ

SEQ ID NO: 58394 - DNA, 660 bp, Pyrococcus horikoshii OT3
  CDS (1)..(660): transl_table=11
atgaagctcataaagcagggtgcagaggcaaagatctatctagcggatttttccgagctttactttgattacccccttaaggttatcgtgaaggagaggattaagaagaggtacaggattcctgagatagatatcaagctgaggagggagaggacgattagggaagcaaggattttgcataaagccaaggaactcggagttaacgttccctacgtttttgaggttgacactaagaacatgataatagtcatggagtacatagaaggggagaggctcaaggagctcctcgagagggtaagtatggaggagaggcttaagatatgcagggaggttggaaggctaataggaaggttacacgagggaggaatagttcacggggacttaacaacctctaacatgatcatgaggaatggaaaaatatacttcatagacttcggcctcgccgagttcgacgataccctagaggcccagggtgtagatctgcatttactaaagagggccatggagagcacacactacaaatggttcgaggagggattcaaggaagtgctaaatggatatgaggaggttaggggaagggagaagagggttgagattgaggagaaaataagggagatagagcttagaggaaggtacagggaaaggaaatggatcacttga

SEQ ID NO: 58395 - protein, 219 aa, Pyrococcus horikoshii OT3
MKLIKQGAEAKIYLADFSELYFDYPLKVIVKERIKKRYRIPEIDIKLRRERTIREARILHKAKELGVNVPYVFEVDTKNMIIVMEYIEGERLKELLERVSMEERLKICREVGRLIGRLHEGGIVHGDLTTSNMIMRNGKIYFIDFGLAEFDDTLEAQGVDLHLLKRAMESTHYKWFEEGFKEVLNGYEEVRGREKRVEIEEKIREIELRGRYRERKWIT

SEQ ID NO: 58396 - DNA, 723 bp, Aeropyrum pernix K1
  CDS (1)..(723): transl_table=11
gtggaggatagacgaggtggacataccatggtatccctggctccctggggacccgccgcccggctagaggagctccccctactgaagaggggggccgaggccgagatcaggctgggggagtttatggggctccaggccgtgtataaggctagggttaggaagccctacatgcaccccaggctcgccgagaggcttgtcaggctgaggactaggagggaggccagggttatagcggcagccagggccgcgggggtcagcgccccagccctcctcgccgtcttccccagcctcgggctgattgtgatggagtatgtggagggccccctcctcaaggacgtcatagaccggcggggcctcggggccggggggcttgtggaggaggctggctacaacctcggcctcctccacagggcgggcgtcgtacacggggaccccaccacctcgaactacatagtcaggggagggggtgtggtgctgatagactacgggctggcggagttcagctccagcgttgaggacagggcggtggacctccacctcttcaggagggctgtggagagcacccacgcccccctggcgggggagctctacagcctctacacccggggctacctgagggccgtgggggagtggggcggggaggtgttgcggagggctgaggagataaggctgagggggaggtatgtgagggagaggcggaggagcgtgtggggcgttggctag

SEQ ID NO: 58397 - protein, 240 aa, Aeropyrum pernix K1
MEDRRGGHTMVSLAPWGPAARLEELPLLKRGAEAEIRLGEFMGLQAVYKARVRKPYMHPRLAERLVRLRTRREARVIAAARAAGVSAPALLAVFPSLGLIVMEYVEGPLLKDVIDRRGLGAGGLVEEAGYNLGLLHRAGVVHGDPTTSNYIVRGGGVVLIDYGLAEFSSSVEDRAVDLHLFRRAVESTHAPLAGELYSLYTRGYLRAVGEWGGEVLRRAEEIRLRGRYVRERRRSVWGVG

SEQ ID NO: 58398 - DNA, 1452 bp, Halobacterium sp. NRC-1
  CDS (1)..(1452): transl_table=11
atgcgggaggcgatccccgcagtcatcgagacggtgctcggggcggccgacggcgacatcgacgcggtcgcgttctcccgcgggccgggcctggggccgtgtctgcgcatcgtcggatcggcggcgcgcgcgctcgcccaggctctcgacgtacccctcgtgggcgtcaaccacatggttgcgcacctcgaaatcggccgccaccagtctgggttccagcagcccgtctgcctgaacgcaagcggcgcgaacgcccacgtgttggcgtaccgcaacggccggtatcgcgtgctcggggagacgatggacaccggcgtcgggaacgccatcgacaagttcacgcgccacgtcggctggcagcaccccggcgggccgaaagtcgaaacgcacgcccgggacggcgagtacaccgcgttgccctacgtggtgaagggcatggacttctcgttttccgggatcatgagcgccgccaaagacgccgtcgacgacggcgtgccggtggccgacgtctgccgggggttggaggagaccatgttcgcgatgctgaccgaggtcgcggagcgcgcgctcgcgctcaccggccgggacgaactcgtgttgggcggcggcgtcggccagaacgaccggctgcgggggatgctcgaagcgatgtgtgcggcccgcggggcgtcgtttcacgcgcccgagccgcggttcctgcgggacaacgcgggcatgatcgcggtgctcggcgcgaagatggcggccgccggggcgacgatccccgtggccgactccgcgatcaactcccagttccgccccgacgaggtgtcggtgacgtggcgcgaccccgagtcgccggcacgcgacccgggggccgacgccgtgcgccagggcgccgaagccaccgtcacgttcgccgacgacgccgtgatcaaggagcgcgcgccgaaggcctaccgtcacgaccgcctcgacgaccgcctgcgccgagaccgcaccgtcctggaggccagactgaccagcgacgcccgccggcagggcgttccgacgccgctcgtccgcgacgtcgacgtgccggcggcgacgatcacgctccagcacgtcggggacgccgacctccgggacgcgctctcgcccgcccgcgttcgcgccgtcggccggcatctcgcgaccatccacgacggcgggttcgtgcacggcgacccgaccacgcgcaacgtgcgcgtcggcgccgagcgcacgttcctcatcgacttcgggctggggtattacaccgacgccgtcgaggactacgccatggactgccacgtcttcgagcagagcctcgtcggcaccgccgccgacgccgacgctctcgttgcggccttcgaggacgcctacgaggaggccgccgccagcgggcgcgtgctcgaccagctgcgcgccgtcgagggccgggggcgttaccaggacgaccccgagacggcgtag

SEQ ID NO: 58399 - protein, 483 aa, Halobacterium sp. NRC-1
MREAIPAVIETVLGAADGDIDAVAFSRGPGLGPCLRIVGSAARALAQALDVPLVGVNHMVAHLEIGRHQSGFQQPVCLNASGANAHVLAYRNGRYRVLGETMDTGVGNAIDKFTRHVGWQHPGGPKVETHARDGEYTALPYVVKGMDFSFSGIMSAAKDAVDDGVPVADVCRGLEETMFAMLTEVAERALALTGRDELVLGGGVGQNDRLRGMLEAMCAARGASFHAPEPRFLRDNAGMIAVLGAKMAAAGATIPVADSAINSQFRPDEVSVTWRDPESPARDPGADAVRQGAEATVTFADDAVIKERAPKAYRHDRLDDRLRRDRTVLEARLTSDARRQGVPTPLVRDVDVPAATITLQHVGDADLRDALSPARVRAVGRHLATIHDGGFVHGDPTTRNVRVGAERTFLIDFGLGYYTDAVEDYAMDCHVFEQSLVGTAADADALVAAFEDAYEEAAASGRVLDQLRAVEGRGRYQDDPETA

SEQ ID NO: 58400 - DNA, 672 bp, Sulfolobus solfataricus P2
  CDS (1)..(672): transl_table=11
ttggagaaattaaggttaattaagcgtggcgcagaatccaacatatatgaagggtattttttaggcatacatgcaatatttaagcaaaggatcaagaaaagttatagaaatccagaactagatcacaaaattaactatgagaggacaatactagaagcaaagataatttatactgcactgaaaaatgacgtgaacgtacccgcagtactttttatagatcctaataattatttattggtaattgaatatatagaaggagagatagtaaaagatattataaacacaaataatcctacacaattgttgcctaatattgggaagagaataggggaacttacgggaaagttgcataatattggaatagcacacggtgatttaactaccaataacctaattttaagctctacaaatgacgatatcttcataatagatttcggcttatcaagaagaactcaagatgaggaggatttcgcaacagatttgcatgtatttctgagatctttagaaagtgtacattctgattttaaagatataatatacgatgcatttatagagggttacagaaaaatcatgggaagaaagactgatgagatattagaactagtaaaggatattaggatgagaggtagatatgttgaggagaggcgtaaaaataggagtattaacgaataa

SEQ ID NO: 58401 - protein, 223 aa, Sulfolobus solfataricus P2
MEKLRLIKRGAESNIYEGYFLGIHAIFKQRIKKSYRNPELDHKINYERTILEAKIIYTALKNDVNVPAVLFIDPNNYLLVIEYIEGEIVKDIINTNNPTQLLPNIGKRIGELTGKLHNIGIAHGDLTTNNLILSSTNDDIFIIDFGLSRRTQDEEDFATDLHVFLRSLESVHSDFKDIIYDAFIEGYRKIMGRKTDEILELVKDIRMRGRYVEERRKNRSINE

SEQ ID NO: 58402 - DNA, 684 bp, Sulfolobus tokodaii str. 7
  CDS (1)..(684): transl_table=11
atggagagtagatcaagtagatgtgacatggagattatcagagaattaaagagaggagcagagtccataatttatgaaggatattttgcgggtattcacgctgtatttaagaaaagaatatctaaatcttatagagatcaaaaacttgattataaaattaatagtgaaaggactaaattggaagctagattaatgtattcagctttaaaaaatggtatcaatgttccagcattattacttgttgatccttatgaatacttaattgtcatggaatatatagacggatttcctgtgaaagaaatagttcctaagtataaagatgataatttaatccgaattggtgaaatgataggggaaattgctggaaaactgcataaatctggaatatcacatggagatttcactacaaataatcttatatacactactgataatgagatatttttaatagattttggactatctaagagaagcgatgatattgaagatttcgcaacagatgtgcatgtttttttaaggagtttagaaagtgttcattatgaatttaaagatataattttcaaaggttttgaaaaaggctattctaaatttatggattttaagagtattatgaatacagtgaaacaaataagaatgaggggaagatatgttgaagagcgtagaagtaaacgtaataacgtctaa

SEQ ID NO: 58403 - protein, 227 aa, Sulfolobus tokodaii str. 7
MESRSSRCDMEIIRELKRGAESIIYEGYFAGIHAVFKKRISKSYRDQKLDYKINSERTKLEARLMYSALKNGINVPALLLVDPYEYLIVMEYIDGFPVKEIVPKYKDDNLIRIGEMIGEIAGKLHKSGISHGDFTTNNLIYTTDNEIFLIDFGLSKRSDDIEDFATDVHVFLRSLESVHYEFKDIIFKGFEKGYSKFMDFKSIMNTVKQIRMRGRYVEERRSKRNNV

SEQ ID NO: 58404 - DNA, 636 bp, Pyrobaculum aerophilum str. IM2
  CDS (1)..(636): transl_table=11
gtggagttgatagctaagggcgccgaggccgaaatttatctagtagactggttcgggctgaaggcggtgttaaagtggagaaagccaaagatgtatagagatccaaacttggactaccacatcaggcggaggaggactataaatgaagtgagaaatatgtacatagcttatagtctcgggctaagagttcccgacgtgtatttttttgatcccggagaggccaaaatactaatggagtacgtcgagggaaaaaatctgcgcgatttgctaaatgagggaaattacagttacttacgagaagtaggcgtatatgtaggcagaatgcacaaggccgggctaatacacggcgatttagcccccactaatataattctgacaggggggcaactctgttttatagacttcggtttgggcgagcagagaatggggtggacgaggaaaaccgccgtattactagccagagatatcaacgtcttgttcagaactcttgatctatacggcgaaaaggcagaggagctcaaggcgttattctggagcggctacagagaggaagtaggaggaagagctgcggcagtggagagagaattgttacggataagggcctcggggcgctatgtcgagcgcaagacggaataa

SEQ ID NO: 58405 - protein, 211 aa, Pyrobaculum aerophilum str. IM2
MELIAKGAEAEIYLVDWFGLKAVLKWRKPKMYRDPNLDYHIRRRRTINEVRNMYIAYSLGLRVPDVYFFDPGEAKILMEYVEGKNLRDLLNEGNYSYLREVGVYVGRMHKAGLIHGDLAPTNIILTGGQLCFIDFGLGEQRMGWTRKTAVLLARDINVLFRTLDLYGEKAEELKALFWSGYREEVGGRAAAVERELLRIRASGRYVERKTE

SEQ ID NO: 58406 - DNA, 681 bp, Arabidopsis thaliana
  CDS (1)..(681)
atggattgtgaggaaaacgttagggatgaatcactcgttttgattaaacaaggagcagaagctagggtgttcgagtctacatttgctggaagaagatccatcgtgaaagaacgtttctcgaagaaatatagacatccgattttggatgcaaaactcacacttaaacgcttgaatgcggaagctaggtgtatgacaaaggcaagaaagctcggggtttgtactccagtcctatatgctgtggatactctgcttcactctttaacacttgagtacattgagggggtctctgttaaggatattttccttgagtttgggaccaatggggttgttgaggaacgtttagatgatgttgctgctcagattggggctgcaattgctaagctccatgatggtggcttggctcatggtgatttgaccacatcaaatatgttagtcagaagtggaacaaatcagctggtactaattgattttggcttgagcgtcacatcgaccttgcctgaagacaaagctgttgatttatatgtacttgaaagagccttactctcaatgcattcgtcatgcgggaatgtgatggatcgtatactgacggcgtataggaagtcctcaaagcaatggtcagccacgtttaacaagctcgcacaagtgagacagcgagggagaaagcggactatgattggatga

SEQ ID NO: 58407 - protein, 226 aa, Arabidopsis thaliana
MDCEENVRDESLVLIKQGAEARVFESTFAGRRSIVKERFSKKYRHPILDAKLTLKRLNAEARCMTKARKLGVCTPVLYAVDTLLHSLTLEYIEGVSVKDIFLEFGTNGVVEERLDDVAAQIGAAIAKLHDGGLAHGDLTTSNMLVRSGTNQLVLIDFGLSVTSTLPEDKAVDLYVLERALLSMHSSCGNVMDRILTAYRKSSKQWSATFNKLAQVRQRGRKRTMIG

SEQ ID NO: 58408 - DNA, 681 bp, Pyrococcus furiosus DSM 3638
  CDS (1)..(681): transl_table=11
gtgagaggggagttaaagatgaagctcataaagcagggggctgaagcaaagatatatcttgcagacttttccgaattatactatgatcttcccatcaaggtgatcgttaaggaaagggtctcgaaaagatataggattcctgaaatcgacataaaactcagaaaagagagaacaataagagaagctagaatactccatagagctaagaaagctggtgtaaatgttccctacgtgtttgaagttgataccaagaacatgataatagttatggagttcatagagggggagaggctcaaggagcttttggaaaaacttcccatagaagaaaggttggagatatgtaaggaaattggcagggtcataggaaagttacatgaggcaggtattgtccatggggatttgacgacctccaatatgataatgagagatggaaaaatttacctcatagacttcgggttagctgagtttgacgatactttagaagcccagggtgttgatcttcacttgctgaggagagcaatggagagtactcactacagctgggttgaagagggatttaaagctgttctaagaggatatgaagaggtaagggggaaagagaagaggcgtgagattgaggaaaaaatcaaggaaattgaattgagagggagatatagggagagaagctggattacttcctaa

SEQ ID NO: 58409 - protein, 226 aa, Pyrococcus furiosus DSM 3638
MRGELKMKLIKQGAEAKIYLADFSELYYDLPIKVIVKERVSKRYRIPEIDIKLRKERTIREARILHRAKKAGVNVPYVFEVDTKNMIIVMEFIEGERLKELLEKLPIEERLEICKEIGRVIGKLHEAGIVHGDLTTSNMIMRDGKIYLIDFGLAEFDDTLEAQGVDLHLLRRAMESTHYSWVEEGFKAVLRGYEEVRGKEKRREIEEKIKEIELRGRYRERSWITS

SEQ ID NO: 58410 - DNA, 594 bp, Encephalitozoon cuniculi GB-M1
  CDS (1)..(594)
atggggtttcatttccaaggtgcagagtccatcatctcggctgacggagagactgttgtaaagaagcgtgcaagaaaggcctacaggatagaggcgcttgacctaaagataataaacggcagaacaaagcgggaggcgaaaatcctgaggaagcttgaggcgctaggaataccagctccgagactgataagcacatatggagacactattgtgatggagaaggtcgaagggactgttctaaaggaaatgattgacagctccgacaaccccggggctctctttcgtgacctaggggcccttgtctcaaggctccatattgcggacatcatccacggagatctaacaacatcgaactttatacacggaagcaaaatatatgcaatcgactttggtctgtcatacatatctcgaaaagacgaggacaaggctgttgatttgtatgtttttgaaaaggctgttggatgtgcacatgatgccaagttcctggaggacttctactgcgggtatatgggggagggaagcgagagcgtactgaagaagctggggactgtccgcctgaggggtaggaaaagagaagccatggcatttggatga

SEQ ID NO: 58411 - protein, 197 aa, Encephalitozoon cuniculi GB-M1
MGFHFQGAESIISADGETVVKKRARKAYRIEALDLKIINGRTKREAKILRKLEALGIPAPRLISTYGDTIVMEKVEGTVLKEMIDSSDNPGALFRDLGALVSRLHIADIIHGDLTTSNFIHGSKIYAIDFGLSYISRKDEDKAVDLYVFEKAVGCAHDAKFLEDFYCGYMGEGSESVLKKLGTVRLRGRKREAMAFG

SEQ ID NO: 58412 - DNA, 717 bp, Schizosaccharomyces pombe 972h-
  CDS (1)..(717)
atgtcagaaaaacctgaccttaggcaaagatgttctgatatatatcgtgaaataaaggaaaagaaattaactgtggtaaagcaaggtgcagaagcaatcacgataaaaaccgagttttatccaggtgaggtttgtcttttgaagtgccgacctgcgaaacgatggagacatcctattttagatcagaaattatcaagaaaacgctgcttagtggaagcaagacttttagcaaaatgtcattacgttggaataaaatgtcccatgctgtactttatagatgccaatcgtggtcaaatatatatggaatggattgatggaccttgtgtacgagattatattcgagagatctgcgaatgtgagattgaaaaaaaacttattcctttaatgaagcgaataggatcagaagttgcgaagatgcataagaatgatatcgttcatggagatttgacaactagtaatatgatgctggagtctcacaacaatccggtcccaatttttattgatttcggtttaggaagcgtttccgaatctgaggaagataaagctgtggatatttacgtcctagagagagctttatcaagtactttaccagaaagcgaatctttgtttcatcatgttttagactcttatgcccaaagttggaaacaatctaaggcaacacttcgaagatttgaagaagtacgaatgcgtggccgtaaacgtaccatgataggatga

SEQ ID NO: 58413 - protein, 238 aa, Schizosaccharomyces pombe 972h-
MSEKPDLRQRCSDIYREIKEKKLTVVKQGAEAITIKTEFYPGEVCLLKCRPAKRWRHPILDQKLSRKRCLVEARLLAKCHYVGIKCPMLYFIDANRGQIYMEWIDGPCVRDYIREICECEIEKKLIPLMKRIGSEVAKMHKNDIVHGDLTTSNMMLESHNNPVPIFIDFGLGSVSESEEDKAVDIYVLERALSSTLPESESLFHHVLDSYAQSWKQSKATLRRFEEVRMRGRKRTMIG

SEQ ID NO: 58414 - DNA, 621 bp, Methanopyrus kandleri AV19
  CDS (1)..(621): transl_table=11
gtggaagccggtgacgtcatcgccctcggcgccgagtcgctcctggttcgacacgactggctcgggctcctcgccgtctacaagatccgtcttcccaaaccctaccgtcacccgtccttggacgagcgcctccgtcgcctcaggactcgacgagaagcccgagcactgatcagattacccgagatgggtgtgccgactcctaccctgtacgaggtcgacttggatcttagcctgctgatcaccgagtacattcccgggagaaccctcaagcaggccaccgagagttccttcgatccggaccattaccggaagttgggtaagctcgtcgggcggatgcacgagcacggattcgtccactacgatttgaccacatcgaacatcctcgtgtccggtgacgacctctacatcatcgacttgggactgagcgaggactccgacgaccccgaagaccacgccgtcgacctgcgcgtgttcgaacggtgtctcgagagctcccaccccgaggttaaggaggaggcgtggagagccttcctacgaggctacagggaagagagggaagaagccaccgacacggtgctccgggccttggaggacctcaagtccagggtccggtacatctaa

SEQ ID NO: 58415 - protein, 206 aa, Methanopyrus kandleri AV19
MEAGDVIALGAESLLVRHDWLGLLAVYKIRLPKPYRHPSLDERLRRLRTRREARALIRLPEMGVPTPTLYEVDLDLSLLITEYIPGRTLKQATESSFDPDHYRKLGKLVGRMHEHGFVHYDLTTSNILVSGDDLYIIDLGLSEDSDDPEDHAVDLRVFERCLESSHPEVKEEAWRAFLRGYREEREEATDTVLRALEDLKSRVRYI

SEQ ID NO: 58416 - DNA, 1644 bp, Methanosarcina acetivorans C2A
  CDS (1)..(1644): transl_table=11
ttgaaaaacacattcatccttggaatcgaaggcactgcctggaacctgagtgccgcaatcgtgaccgagaccgagatcattgcagaggtcacggagacctataaacccgaagtaggcggaatccaccccagagaagccgcccagcaccatgcaaagtatgcagcaagtgttatcaaaagactccttgcagaagcaaaagaaaaaggagtggaaccttcagatcttgacggcatagctttttcacagggacccgggctcgggccctgcctgaggaccattgcaaccgcagccaggatgctttccctgtccctggacattcctcttataggggtcaaccactgcatcgcccatatagaaatagggatctggcgaaccccggcaagagatcctgtagttctctatgtaagcggggcaaattcccaggtcatctcatttatggaagggcgctacagggtctttggcgaaacccttgatatcgggcttgggaacgcccttgacaagtttgcgcggagagcaggtctgcctcaccccggggggcctaaaatcgaagcctgcgcaaaagacgcaaaacgatatatccctcttccttatgtgattaaggggatggacctctctttttccgggctttccacggcttcaagcgaagccctgaaaaaagcctcccttgaagatgtctgctactcctatcaggaaaccgcttttgcaatggttgtggaggttgcggaacgcgcccttgcccacaccggaaaaaatgaagtgctgctggcaggcggggttggagcaaacacaaggcttcgcgagatgttaaatgagatgtgtgaagccagaggggcaaagttctatgtgcccgaaaaacgcttcatgggcgacaacgggacgatgatcgcatacaccgggctcctgatgtataagtcaggaaataccctgacccttgaggattcgcgggtgaacccgaatttcaggaccgatgacgtgaacgttacctggataaaagaagaagagatgaaaaaagtcccggaaatctctcccgaggctttcctcagggcgcccccaggagaaaggctggacaacggagctgaagctgttatttaccttgacgaggggccggaagggaaaaaagtgcttgttaaggaaagggtcccgaagctttacagacacaaagagatagatgaaaggatcaggagggaaaggaaccggacagaagcccgtttgatatctgaagccaggcgggcaggagtgcccacgccgatcatctatgacattgaggaattcaagctcaaaatgcagttcatcgaaggagtccccataaagtacctcataacccccgagctttcggaaaaagtcggagagcttgtaggcaggctgcacagttcggggatagtccacggcgaccttaccacctcaaacctcctgcttgcaggggaacgactttacctcatcgacttcgggcttgcctactttgacaaaagcctggaagccagaggagtggacgtccatgtacttttccagacctttgaaagtacgcaccgcggccacgaaacccttgtcaaagcctttgaaaaagggtatggaagtacttttatagattcaaaggatgtactcaagcgagttgaagagataaaaaagagggctcgctatgcataa

SEQ ID NO: 58417 - protein, 547 aa, Methanosarcina acetivorans C2A
MKNTFILGIEGTAWNLSAAIVTETEIIAEVTETYKPEVGGIHPREAAQHHAKYAASVIKRLLAEAKEKGVEPSDLDGIAFSQGPGLGPCLRTIATAARMLSLSLDIPLIGVNHCIAHIEIGIWRTPARDPVVLYVSGANSQVISFMEGRYRVFGETLDIGLGNALDKFARRAGLPHPGGPKIEACAKDAKRYIPLPYVIKGMDLSFSGLSTASSEALKKASLEDVCYSYQETAFAMVVEVAERALAHTGKNEVLLAGGVGANTRLREMLNEMCEARGAKFYVPEKRFMGDNGTMIAYTGLLMYKSGNTLTLEDSRVNPNFRTDDVNVTWIKEEEMKKVPEISPEAFLRAPPGERLDNGAEAVIYLDEGPEGKKVLVKERVPKLYRHKEIDERIRRERNRTEARLISEARRAGVPTPIIYDIEEFKLKMQFIEGVPIKYLITPELSEKVGELVGRLHSSGIVHGDLTTSNLLLAGERLYLIDFGLAYFDKSLEARGVDVHVLFQTFESTHRGHETLVKAFEKGYGSTFIDSKDVLKRVEEIKKRARYA

SEQ ID NO: 58418 - DNA, 1689 bp, Methanosarcina mazei Go1
  CDS (1)..(1689): transl_table=11
gtgacagtaagcagaggaaaaggaacggaaaggagacctgaagccttgaaaaaaacattcatccttggaatcgaaggcactgcctggaacctgagtgccgcaatcgtgaccgagaccgagatcattgccgaggttacagagacatataaacctgaaaaaggcggaatccaccccagggaagccgcccagcaccatgcaaaatatgcggcaggcgttatcaaaaaactccttgcagaagcaaagcaaaacgggatagagccgtcagacctcgacggcatagctttttcacaggggcctggacttgggccgtgcttaaggaccgttgcaacggcagccaggatgctcggcctttcccttggcatcccgcttataggagtcaaccactgtattgcacatattgagatagggatctggaaaactcctgcaaaggaccctgttgtgctctatgtgagcggggcaaattcccaggtaatctcttatatggaagggaggtacagggtttttggagaaacccttgatataggacttggaaatgcccttgataaattcgctcgcggagcaggcttgcctcacccgggtgggcccaaaatcgaggcatatgcaaaagaagcaaagagatatatccctctcccgtacgtgattaaaggtatggacctctcattttccgggctttcaacagctgcaagtgaagccctgagaaaagcctcccttgaagatgtctgttattcttatcaggagactgcctttgcaatggttgtggaggttgcagaacgcgcccttgcccatacaggaaaaaaagaagtgctgcttgcaggcggggtgggagcaaacaccaggcttcgtgagatgttaaatgaaatgtgtgaagccagaggtgcaaagttctatgttcccgaaaaacgctttatgggcgacaacgggacaatgatcgcatacacagggctcctgatgtataagtccggaaataccatttcccttgaagattcgcgcgtaaaccccagtttcaggacagatgatgtcaaagtgacatggataaaggaagaagagatgaaaaaggtccctgaaatctcccctgaaactttcttcaggatgcctcccggggaaattctcgacaacggggctgaagctgttgtctaccttcaagagggacctgaaggtaagagggcgctggtcaaggaaagggtcccaaaggcttacaggcataaagagatagacgagaggataagaagagagaggaacaggacagaagcccgccttatgtctgaagccaggcgcgcaggcgtgcccactccaatcatctatgacgttgaggaattcaagcttaaaatgcagttcatcgaaggggtccccataaagtaccttataacccccccactttcggaaaaggttggagagctcgtgggcaaactgcacagttcaggcatcgtacatggagaccttacaacctcaaacctcctgcttgcaggtgagaggctttatcttatcgacttcgggcttgcgtattttgacaaaagccttgaagccagaggtgtggacgtccatgtgcttttccagacttttgagagcactcaccgcaactatgaagcccttgtcaaagctttcgagaaagggtatgcaagtacttttatagattcagaggatgtactcaggcgagttgaagagataaaaaagagggctcgctatgcataa

SEQ ID NO: 58419 - protein, 562 aa, Methanosarcina mazei Go1
MTVSRGKGTERRPEALKKTFILGIEGTAWNLSAAIVTETEIIAEVTETYKPEKGGIHPREAAQHHAKYAAGVIKKLLAEAKQNGIEPSDLDGIAFSQGPGLGPCLRTVATAARMLGLSLGIPLIGVNHCIAHIEIGIWKTPAKDPVVLYVSGANSQVISYMEGRYRVFGETLDIGLGNALDKFARGAGLPHPGGPKIEAYAKEAKRYIPLPYVIKGMDLSFSGLSTAASEALRKASLEDVCYSYQETAFAMVVEVAERALAHTGKKEVLLAGGVGANTRLREMLNEMCEARGAKFYVPEKRFMGDNGTMIAYTGLLMYKSGNTISLEDSRVNPSFRTDDVKVTWIKEEEMKKVPEISPETFFRMPPGEILDNGAEAVVYLQEGPEGKRALVKERVPKAYRHKEIDERIRRERNRTEARLMSEARRAGVPTPIIYDVEEFKLKMQFIEGVPIKYLITPPLSEKVGELVGKLHSSGIVHGDLTTSNLLLAGERLYLIDFGLAYFDKSLEARGVDVHVLFQTFESTHRNYEALVKAFEKGYASTFIDSEDVLRRVEEIKKRARYA

SEQ ID NO: 58420 - DNA, 675 bp, Drosophila melanogaster
  CDS (1)..(675)
atgtccctagaaatcctgaaacaaggcgctgaaggacgcctatatttgggcgatttcaaaggagaagcctgcctgatcaaggagcggttcgtaaagaagtaccgccacccggaactgaacacccagatcacgcggcagcgcatgaaagcggaggccaaggcatcgggaagatgtctagccgctggaatcctggcaccaaagatcctccactcggacctcaacacccacaagctgtatatggaatatttcgatgcagccaagactgccaagcagttcatccaggaaacagtgtccactcagacggaggatgaagccaagaaatgtctgctggagttctgcacgcggatcggtgaaatcattgggaaaatgcactccaatcacattatacatggcgatctcaccacatctaacatcctcatcaatccgaagggtggcgactacgatgtcattctgattgacttcggcttgagccactacaatcaggccaccgaggacaagggtgtggatctgtacgtcctggagcgggcgctactcagtacgcacagcgaacagccgtatatcttcgagcacgtcctggccgcctatcgcacagcgtgcggtaaggacgaacaggcagtgctcaccaagttcgaggaggtgcgagcacgcggacgcaaaagaaccatgattggttaa

SEQ ID NO: 58421 - protein, 224 aa, Drosophila melanogaster
MSLEILKQGAEGRLYLGDFKGEACLIKERFVKKYRHPELNTQITRQRMKAEAKASGRCLAAGILAPKILHSDLNTHKLYMEYFDAAKTAKQFIQETVSTQTEDEAKKCLLEFCTRIGEIIGKMHSNHIIHGDLTTSNILINPKGGDYDVILIDFGLSHYNQATEDKGVDLYVLERALLSTHSEQPYIFEHVLAAYRTACGKDEQAVLTKFEEVRARGRKRTMIG

SEQ ID NO: 58422 - DNA, 690 bp, Plasmodium falciparum 3D7
  CDS (1)..(690)
atgtctgcaggatctgatgctaggatctatcgatgcacgtttattaaaaaggaagcagtgaaaaaagttatttacagaaaatattacagacataaaaaaattgatacgaaaataaggaaattaagagtatctaatgaaattaagtttacaaaaaaattagctagtttaaatattgatgttccatatatttattttgtcgatgctaaagaaaaaagtttatatttcgagtatgtgaaaggatgtaccataaattttatattaaaaaatttaaaagaatatgaacctaaaatacctatttgtgtaggtatggtgttagcaaaaatacataatggtaatataatacatggagattatactacgtcaaatttaattttaagaaattcttttattcaacaaaataatctattagacctaaagaataataattctccatataattttagtgacttggaaaatgtcaaattgtgtgttatagatttcggattatcctttttatcctcatcaatagaagataaagctgtcgatttgtttgttctcctaaaaaccatcaaaagttttcatagtgaatttccctccttggaggaggatattcttgaaggatacaaaatgaagtctgacaatgttaacgacatatttacaaaattagaaatagttaaacaaaggggaagaaaaagacctatggttggatga

SEQ ID NO: 58423 - protein, 229 aa, Plasmodium falciparum 3D7
MSAGSDARIYRCTFIKKEAVKKVIYRKYYRHKKIDTKIRKLRVSNEIKFTKKLASLNIDVPYIYFVDAKEKSLYFEYVKGCTINFILKNLKEYEPKIPICVGMVLAKIHNGNIIHGDYTTSNLILRNSFIQQNNLLDLKNNNSPYNFSDLENVKLCVIDFGLSFLSSSIEDKAVDLFVLLKTIKSFHSEFPSLEEDILEGYKMKSDNVNDIFTKLEIVKQRGRKRPMVG

SEQ ID NO: 58424 - DNA, 2040 bp, Oryza sativa (japonica cultivar-group)
  CDS (1)..(2040)
atggccacgctcgcgaggagatcgatggtggccttgggccgtcgcgctctgtgctcgggcagcgacctggaggcggcggcgcgcgaagtcgtgtgctccggggcggggagcctcgacgaggtgggcggcgcgctggaccgcctgggcgtggccgtgtcgccggccatggtggcgagggtgatcgatgcgtgtagcgagaggatgggttcagggaggaggctgctgcggttcctgtcctggtgccggtccaaggacgccggtggaattggggacgaggcgttggatagcgcgatcgcggcgctcgcccggatgggggacctcaccgcgatgaggatcgccgtcgccgacgcggagaaggatggccggaggatgtccccggagacgttcaccgttgtcgtcgaggcactcgtgaaattggggaaggaggatgaggctgttcggttgtttagaggcttggagaggcagaggttgctgcctcggcgcgacgcgggtgatggaggggaaggcgtgtggtcgagcagccttgcaatggtgcaggcattgtgcatgaagggccatgctcgcgaggcgcagggcgtcgtgtggcaccacaagagcgagctctcggtagaacccatggttagcatcgttcagcgtagcctgctccacgggtggtgcgtccatgggaatgcgaaggaagctcggagagtccttgatgatatcaagtcttcgtgtaccccactgggtttgccatcattcaatgattatctgcactgcctgtgccataggaacctcaagtttaacccttctgcgcttgtcactgaggctatggacgtcttatcggagatgaggtcctatggtgtcaccccggatgcatctagcctcaacatcttgctttcttgtttgggacgagcaagaagagtgaaagaatcatacagaatcctctacttgatgagagaaggaaaggcagggtgctcccctgactgggttagttactatcttgtggtcagggtcctgtatttaacagggagaattattagagggaaaaggcttgtagatgacatgcttgaaagtggggtgcttccgactgcaaagtttttccatggtctcataggcgttctatgcgggactgagaaagttgaccatgggcttgatatgttcagacttatgaagaggtgtcagttagtggacacacatacctatgatcttcttatagaaaagctttgtaggaatgggagatttgagaatggaaaggagttgtgggatgatgctaaaaagaatggctttatgttaggatgttcagaggatcttttggatcccctgaaaacagaggaacaacaacaggattttggtgtgctactgaagcagggggcggagggaagggtatttgtttcaacatttgtgggacggaagtgtgtaatcaaagagcggttttcaaagaagtaccgacacccattgttggactcaaagttgactcttaaacgcttaaatgctgaagctcgatgcatgacaaaagcaagaaagcttggtgttcccactccagttctttatgccgtggacccacttctgcatacattaacctttgagtatgtggatggcttatctgtgaaagatatactccttggatttgggtcaaacgggatcaatgaagaacaactcattgacatcgccacacaaataggaaatgcagttggcaaactacatgatggaggccttgttcacggtgatttgaccacttcaaatatgataatcaagaacaacacaaatcaactcgttcttattgattttggtctgagtttcatatcaactattcctgaggacaaagcagtggacttatatgtgcttgagagagcattgatttctatgcattcatcatgtggtgatgtgatggagaagattctcacggcgtacagaaaagcttcaaagcaatggtgcgctactacgaacaagctagctcaagcttgtgctagtataggcaagtgcgacctaacgttgaccctgacagcggtcaacgggacccgtccgacctgtgtttgggccgttcttgggcctgctggatag

SEQ ID NO: 58425 - protein, 679 aa, Oryza sativa (japonica cultivar-group)
MATLARRSMVALGRRALCSGSDLEAAAREVVCSGAGSLDEVGGALDRLGVAVSPAMVARVIDACSERMGSGRRLLRFLSWCRSKDAGGIGDEALDSAIAALARMGDLTAMRIAVADAEKDGRRMSPETFTVVVEALVKLGKEDEAVRLFRGLERQRLLPRRDAGDGGEGVWSSSLAMVQALCMKGHAREAQGVVWHHKSELSVEPMVSIVQRSLLHGWCVHGNAKEARRVLDDIKSSCTPLGLPSFNDYLHCLCHRNLKFNPSALVTEAMDVLSEMRSYGVTPDASSLNILLSCLGRARRVKESYRILYLMREGKAGCSPDWVSYYLVVRVLYLTGRIIRGKRLVDDMLESGVLPTAKFFHGLIGVLCGTEKVDHGLDMFRLMKRCQLVDTHTYDLLIEKLCRNGRFENGKELWDDAKKNGFMLGCSEDLLDPLKTEEQQQDFGVLLKQGAEGRVFVSTFVGRKCVIKERFSKKYRHPLLDSKLTLKRLNAEARCMTKARKLGVPTPVLYAVDPLLHTLTFEYVDGLSVKDILLGFGSNGINEEQLIDIATQIGNAVGKLHDGGLVHGDLTTSNMIIKNNTNQLVLIDFGLSFISTIPEDKAVDLYVLERALISMHSSCGDVMEKILTAYRKASKQWCATTNKLAQACASIGKCDLTLTLTAVNGTRPTCVWAVLGPAG

SEQ ID NO: 58426 - DNA, 783 bp, Eremothecium gossypii
  CDS (1)..(783)
atgtctgcagaggttatctcgcgggtttcgcagatctatggcgagggtatcacgttaacgcctatttcacaaggcgctgaggccgttatttttactacgactactcatccgtacctgccctcgacagaaggcagctctaagtacgtcgtgaaatacaggccgcccaagacgtacaggcatccatcgatcgacgtggcactgaccaagcagcggactttgggcgaggcgcggctcctcggtaagctacagcagatcaaggggctccgggttcccaagctactcgcgtgcgacgtctacaatggaagcatctggatggagttcctgggagaagacctgccggaaagccgcgggttcagcaatttgaagaacttcctgtggatgtgtgcctcggaaccctacagcccggtcgtggaggccaccgtgcgcgatgtggggtgccagataggtctgctgcactggaacgactactgccacggtgatctcactacctccaacatcgtgctggtaaggagcggggctgagtgggcgccacacctgattgactttggtcttgggagcaattcgaacctcgtggaggacaagggggtggatttatatgtgctagaacgtgctcttgcgagcacgcactcggcgtttgcggaaaagtacttcgaatggttaatggagggctttacctctgtctaccagtcacatggagagaagggagagcaaaaactgaaggagctactccgcaggttcgaagaagtacgcctgcgcgggaggaagagaagcatgttgggctaa

SEQ ID NO: 58427 - protein, 260 aa, Eremothecium gossypii
MSAEVISRVSQIYGEGITLTPISQGAEAVIFTTTTHPYLPSTEGSSKYVVKYRPPKTYRHPSIDVALTKQRTLGEARLLGKLQQIKGLRVPKLLACDVYNGSIWMEFLGEDLPESRGFSNLKNFLWMCASEPYSPVVEATVRDVGCQIGLLHWNDYCHGDLTTSNIVLVRSGAEWAPHLIDFGLGSNSNLVEDKGVDLYVLERALASTHSAFAEKYFEWLMEGFTSVYQSHGEKGEQKLKELLRRFEEVRLRGRKRSMLG

SEQ ID NO: 58428 - DNA, 1647 bp, Methanococcus maripaludis S2
  CDS (1)..(1647): transl_table=11
atggataattctaaagacgacttaatatgtattggatttgagggaactgctgaaaaatcaggtgttggaataattacctcaaagggcgaagttttgtttaacaaaacaataatttatactccgcctgtacagggaatacaccctagagaagccgcagatcaccacgcagaaacttttgtgaaacttttaaaagaagcattaaacgaagttccgcttgaaaaaattgatcttgtttcattttcactcggtcctggactcggtccaagtttgagggttactgcaacaactgcaagagcactttctctttcaataaataaacccataatcggggtaaatcactgtatcggccacgtggaaattggaaaattaacaactgatgcagtggacccgcttacattatatgtaagtggtggaaatactcaagttttggcatacactggaaaaaaataccgggtaattggtgaaactctcgatattgcgataggaaactgtctcgaccagtttgcaaggcactgtaatttaccgcatccgggtggggtatacgttgagaaatttgcaaaagatggaaataagtttataaaactcccatacaccgttaaaggaatggatctttctctttcagggttattaacgtctgcaatgaaaaaatacgattcaaaagaaagaattgaagatgtatgctactcattgcaggaaacttcattttcaatgctaacagaaatcaccgaaagagcgcttgcacatactaataaagccgaagtaatgcttgttgggggagttgctgcaaataatcggttaaaagaaatgcttaaggtaatgtgtgaagagcagaatgttgatttctacgttccagaaaaacagttttgtggcgataacggtgcaatgattgcatggcttgggatattgcagtatttaaatggaaaaagaatggatttgaaggatacaaaaccgatttcaaactacagaagtgacatggtcgaagttaactggattcatgacgaaagcaaaaacttgaatgatggaaatattaaatctcgaaaaattccaaaacatttgattggaaaaggcgctgaagccgatatatcaaaaggaaggtatttagaatttgaatctattacaaaagagcgagttaaaaaaggataccgtattttaaaactggatgaattgataaggacaagaagaacagtaaaagaagcaagatttttggcagcagttaaagaatgtggaattcatgctccaagcatttatgacatcgataaagagaataaaaaaattataatgggctacattcacggaaaaattgcaaaagacgaaattgaagaaggaaatatcgaattttgtaaaagtttaggggaaactattggaaaaatgcatggcagtggaattgtgcacaatgatttaacaacttcaaactttataatttcaaaaaatccatatataatagattttgggcttggaaaatacagcgatttaattgaagacaaagcaattgatttgatagtcttaaaaaaatcgataatgagcatccactatgataaatttgatttggtctggaataaaataatagacggatacaaaacgtatgaactggctgaatcggttttggaatgcataaaagaggttgaaaaacgggcaagatatctttaa

SEQ ID NO: 58429 - protein, 548 aa, Methanococcus maripaludis S2
MDNSKDDLICIGFEGTAEKSGVGIITSKGEVLFNKTIIYTPPVQGIHPREAADHHAETFVKLLKEALNEVPLEKIDLVSFSLGPGLGPSLRVTATTARALSLSINKPIIGVNHCIGHVEIGKLTTDAVDPLTLYVSGGNTQVLAYTGKKYRVIGETLDIAIGNCLDQFARHCNLPHPGGVYVEKFAKDGNKFIKLPYTVKGMDLSLSGLLTSAMKKYDSKERIEDVCYSLQETSFSMLTEITERALAHTNKAEVMLVGGVAANNRLKEMLKVMCEEQNVDFYVPEKQFCGDNGAMIAWLGILQYLNGKRMDLKDTKPISNYRSDMVEVNWIHDESKNLNDGNIKSRKIPKHLIGKGAEADISKGRYLEFESITKERVKKGYRILKLDELIRTRRTVKEARFLAAVKECGIHAPSIYDIDKENKKIIMGYIHGKIAKDEIEEGNIEFCKSLGETIGKMHGSGIVHNDLTTSNFIISKNPYIIDFGLGKYSDLIEDKAIDLIVLKKSIMSIHYDKFDLVWNKIIDGYKTYELAESVLECIKEVEKRARYL

SEQ ID NO: 58430 - DNA, 702 bp, Anopheles gambiae str. PEST
  CDS (1)..(702)
atggtacagcagctcctaaagcagggagcagaagggaaactgtacatcggcacctacaaaggcaaccggtgtttggtgaaggaacgcttcgagaagaaataccgccatccggcactcgatcggcagctcacccggcaacgcatcaaagcggaacagaaagccttccaacgatgtgctgccgccggtctgtccaccccagccctttacggcgtcgatttagagcagcgcaagatctacatggaatatctggagcgtagtcgtacggcaaaagagtttatcgacgagctgacggcaaccacggcagcggatgctttgcaggaatcagcccagctgaagcagcttgctgaacagatcggccacatggtgggtgtgctgcatcgaaacaatctagtgcacggtgatctgaccacctccaacatgctgctcgatccggtggaaaagggtgcggaagagtccgtcttcccgtaccgtctcgtgacgatcgactttgggctgtcccactttagtgataaccacgaaaacaagggtgtcgatttatacgtgctcgagcgagcgattctaagcgctcacagtcaactgccgggcttgttcggtatgatactggaggcgtaccgtgagcacaatacgaaccattgcaaggaaacaatcgccaagtacgaagaggtacgggcccggggacgaaagcgaacgatggtgggataa

SEQ ID NO: 58431 - protein, 233 aa, Anopheles gambiae str. PEST
MVQQLLKQGAEGKLYIGTYKGNRCLVKERFEKKYRHPALDRQLTRQRIKAEQKAFQRCAAAGLSTPALYGVDLEQRKIYMEYLERSRTAKEFIDELTATTAADALQESAQLKQLAEQIGHMVGVLHRNNLVHGDLTTSNMLLDPVEKGAEESVFPYRLVTIDFGLSHFSDNHENKGVDLYVLERAILSAHSQLPGLFGMILEAYREHNTNHCKETIAKYEEVRARGRKRTMVG

SEQ ID NO: 58432 - DNA, 735 bp, Rattus norvegicus
  CDS (1)..(735)
atggctggcgcgtcttcggaggcggaggcggaggcgctggccgcggcgcgcgagcggagccgcctcttcctgagcggcctggagctggtgcagcagggcgccgaggctcgagtgttccgtggccgcttccagggccgagcggccgtggtgaagcaccgcttccctaagggctaccggcacccggagctggaggcgcggctcggccggcggcggacggttcaggaggctcgcgcgctgttgcgctgccgccgtgcgggaatagctgcccccgtcgtcttctttgtggactatgcttctaactgcctatatatggaagaaatcgaagactcggtgactgttcgagattatattcaatccactatggagactaaacaagacccccaatgcctcttggacttggccaggaagatcgggcaggttctggccagactgcatgacgaggacctcattcacggggacctcaccacctccaacatgctcctgacacggcccctggagcagctgcacatcgtgctcatcgacttcgggctgagttttgtctcaggactgccagaagacaaaggcgtagacctctatgtcctggagaaagccttcctcagcacgcacccccacactgagactgtgtttgaagcctttctgaagagttacggtgcctcatccaagaagtccgatccagtgctgaagaagttagatgaggtgcgcctgagagggcgaaagcggtccatggttgggtag

SEQ ID NO: 58433 - protein, 244 aa, Rattus norvegicus
MAGASSEAEAEALAAARERSRLFLSGLELVQQGAEARVFRGRFQGRAAVVKHRFPKGYRHPELEARLGRRRTVQEARALLRCRRAGIAAPVVFFVDYASNCLYMEEIEDSVTVRDYIQSTMETKQDPQCLLDLARKIGQVLARLHDEDLIHGDLTTSNMLLTRPLEQLHIVLIDFGLSFVSGLPEDKGVDLYVLEKAFLSTHPHTETVFEAFLKSYGASSKKSDPVLKKLDEVRLRGRKRSMVG

SEQ ID NO: 58434 - DNA, 741 bp, Rattus norvegicus
  CDS (1)..(741)
atggctgccgggtcttcggaggcagagacggaggcggaggcgctggccgcggcgcaggagcggagccgcctcttcctgagcggcctggagctggtgcagcagggcgccgaggctcgagtgttccgtggccgcttccagggccgagcggccgtggtgaagcaccgcttccctaagggctaccggcacccggagctggaggcgcggcttggccggcggcggacggtgcaggaggctcgcgcgctgttgcgctgccgccgtgctggaatagctgcccccatcgtcttctttgtggactatgcttctaactgcctatatatggaagaaatcgaagactcggtgactgttcgagattatattcaatccactatggagactaaacaagacccccaatgcctcttggacttggccaggaagatcgggcaggttctggccagactgcatgacaaggacctcattcacggggacctcaccacctccaacatgctcctgacacggcccctggagcagctgcacatcgtgctcatcgactttgggctgagttttgtctcaggactgccagaagacaaaggcgtcgacctctatgtcctggagaaggccttcctcagcacgcacccccacaccgagactgtgtttgaagcctttctgaagagttacggtgcctcgtccaagaagtccagtccagtgctgaagaagttagatgaggtgcgcctgagagggcgaaagcggtccatggtcggatag

SEQ ID NO: 58435 - protein, 246 aa, Rattus norvegicus
MAAGSSEAETEAEALAAAQERSRLFLSGLELVQQGAEARVFRGRFQGRAAVVKHRFPKGYRHPELEARLGRRRTVQEARALLRCRRAGIAAPIVFFVDYASNCLYMEEIEDSVTVRDYIQSTMETKQDPQCLLDLARKIGQVLARLHDKDLIHGDLTTSNMLLTRPLEQLHIVLIDFGLSFVSGLPEDKGVDLYVLEKAFLSTHPHTETVFEAFLKSYGASSKKSSPVLKKLDEVRLRGRKRSMVG

SEQ ID NO: 58436 - DNA, 810 bp, Magnaporthe grisea 70-15
  CDS (1)..(810)
atggcggggtcgcaaaccacttgtcctgacccctcatcctaccccttccccttgccagcgatccttacccaccctgccagtgcgccaccgacactcatcacacaaggcgccgagggccgcctgtacaaaacaacatacttgcggccggatttgccgtgcgccctcaagcacaggccatcgaagccatatcgacatccgatcctggatgcccgcctaacgcgccagcgcatcctcgccgaggcgcgcatcctatccaagtgcaggcgcgatggcaccgccgctggcgtgccggctgtgtacgcgctggacgaggcggcgggatggttgatgctggagtggatagagggggtgccggtgcgcgtgagcatcaacgagtggcttaagcggaggacaaggttgggggcctcgtccgccatacaggaagacgagcagctcgtcaagctcatgaggaagatgggtgccgcagtggcggctatacatcgcgttggcgtagttcacggtgacctgaccacgagcaacatgatgctccgtcctccacagaaccagggcgaggtagccgaggataggcttctcgatggcgacgtggttgtgatcgattttggcctggcgagccagagcgtttccgatgaggatagagccgtggacctctatgtattggagagagcatttggaagcacgcaccccagagccgaggctgtctttgagcaagtcctcaagggataccaggagggattcaaacaagcaacgccagtgctgaggaaactggaagatgtgcggatgagggggcgcaaaagaagcatgatcggatga

SEQ ID NO: 58437 - protein, 269 aa, Magnaporthe grisea 70-15
MAGSQTTCPDPSSYPFPLPAILTHPASAPPTLITQGAEGRLYKTTYLRPDLPCALKHRPSKPYRHPILDARLTRQRILAEARILSKCRRDGTAAGVPAVYALDEAAGWLMLEWIEGVPVRVSINEWLKRRTRLGASSAIQEDEQLVKLMRKMGAAVAAIHRVGVVHGDLTTSNMMLRPPQNQGEVAEDRLLDGDVVVIDFGLASQSVSDEDRAVDLYVLERAFGSTHPRAEAVFEQVLKGYQEGFKQATPVLRKLEDVRMRGRKRSMIG

SEQ ID NO: 58438 - DNA, 789 bp, Gibberella zeae PH-1
  CDS (1)..(789)
atgacgacaaccacggctacggcgaccgccgaccccgcggagcaagcgcaccagtttcccctccctaaaatcctcgagtaccccgcgtcaaccccgccaatcctcatcacacaaggggccgagggtcgtctctacaaaaccacttatctgttgccggatattccctgcgctctaaagtaccgtcctccgaagccctggcgacacccgattcttgaccagcgccttacgaaacaccgcatcctttcagaggctcgcattcttgcaaagtgccgccgcgatggtgtccgtgtaccggcggtctatgctgtagatgaatctgccggttggctgatgctggaatgggtatctggaggacctgtccgtaagagcatcaacgagagactgggaaacaggacagagggtatcgagaacgacgcggagttgaaggatctcatgcgcagaatcggtaccgctattggtaacatgcacaaggtcggcattgttcacggcgacttgactacaagcaatatgatgttggaacctctggccaacccgcaagacgacaatcctttgcacggagagttggttatcattgacctgggtctttcaagtggaagcatatcagacgaggatcgtgcagtagatctctatgttttggagagagcttttggtagtacacatcctcgggcagaatgcgtcttctcagaggtgctcgatgcttacggtcaaacctttaaacaagccaaggttgtacttaaaaagttggaagatgtgcgaatgagaggtcgcaaacgaagcatgcttggatga

SEQ ID NO: 58439 - protein, 262 aa, Gibberella zeae PH-1
MTTTTATATADPAEQAHQFPLPKILEYPASTPPILITQGAEGRLYKTTYLLPDIPCALKYRPPKPWRHPILDQRLTKHRILSEARILAKCRRDGVRVPAVYAVDESAGWLMLEWVSGGPVRKSINERLGNRTEGIENDAELKDLMRRIGTAIGNMHKVGIVHGDLTTSNMMLEPLANPQDDNPLHGELVIIDLGLSSGSISDEDRAVDLYVLERAFGSTHPRAECVFSEVLDAYGQTFKQAKVVLKKLEDVRMRGRKRSMLG

SEQ ID NO: 58440 - DNA, 711 bp, Apis mellifera
  CDS (1)..(711)
atgttgaataatataaaagattttgaattaatagcacaaggcgctgaagcacgtatatataagggcacttatctgggaaagttaacattaatcaaggaaagattcgaaaagaaatatagacatccagacttagatatacgtctcacaaaagatcgaataaaagccgaatgtcgtgctatactccgtgctaaaactgcaggaatcgcaacaccagctatatatttgataaatttagaacgacgatgtatttatatggaatatatacaagatgcaataatattaaaagattttcttgataaaaatgttttgaaagaagcaaatattgatcatttgttaaattttatagcacaaggacttggagtacttattgctaaattacatttgaaaaatataattcatggggatttaactacttccaatattcttttgaaaaatattgacaattatattgaaaaatatgatgttgcgaataattttgttataatagattttggattagctcatatagaatcgaacatagaagataaagcagtcgatttatacgttcttgaacgatcattattaagtgcacattcagaaataccttcattattctcaaaaatatttgatatttatcaaatacattatgcaaataaaaatcaatgtaaagaaattgtttctaaatataaggaagtacaattacgaggacgaaaacgattaatgatcggttaa

SEQ ID NO: 58441 - protein, 236 aa, Apis mellifera
MLNNIKDFELIAQGAEARIYKGTYLGKLTLIKERFEKKYRHPDLDIRLTKDRIKAECRAILRAKTAGIATPAIYLINLERRCIYMEYIQDAIILKDFLDKNVLKEANIDHLLNFIAQGLGVLIAKLHLKNIIHGDLTTSNILLKNIDNYIEKYDVANNFVIIDFGLAHIESNIEDKAVDLYVLERSLLSAHSEIPSLFSKIFDIYQIHYANKNQCKEIVSKYKEVQLRGRKRLMIG

SEQ ID NO: 58442 - DNA, 966 bp, Gallus gallus
  CDS (1)..(966)
atgtgctgcccggtgttggtgacggcagcctgcagcgggtgccacagccaggtgtctgcagcagctctgcgtggctctgaccgctgcaaacgctccctgtgcctgagggcaggagcggctgagaaagccctcgcgagcacaaagaaaacagcaatgcaagaggagagagaaccccgactcggtgcagaacctctccttaaccccagctggcggcgagggctggccggccttcacccacgtggagctgtgggcctggggacacccaaggaacaggagacacccacggtaccgaagcgggagctccggcggtgcccgctggtgcagcagggcgccgaggcgcgcgtctaccgggggagcttcctggggcgcgcggccgtggccaagctccgcttccccaagctgtaccggcacccggcgctggaggagcggctcagccggcggcgcacggcgcaggaggcgcgatccctgctgcgctgccggcgggcagggatcccggctcccgtggtctacttcgtggattacgcgtccaactgcatttatctggaagatatcgttggcgcgatcgctgttcaggatcacatctactccgtgcagcggagcggcagcgatgccagcagcctcctcggcttggcggagaagatgggccagctgctggccaggatgcacgacgaggacctcatccacggggacctcacgacgtccaacgtgctgctgcggccgcccgcggagcggctggacttggtgctgattgactttgggctcagctttatttcgggtcttcccgaggataaaggagtcgatctgtacgtgctggaaaaagccttccttagtacccatcccgatacggaaactgtgtttcaggctctgctgcagagctacgcggccgcctctaagaaatccggcccggtgatcaaacgtctggatgaggtgcggctcagggggaggaagaggtccatgattgggtaa

SEQ ID NO: 58443 - protein, 321 aa, Gallus gallus
MCCPVLVTAACSGCHSQVSAAALRGSDRCKRSLCLRAGAAEKALASTKKTAMQEEREPRLGAEPLLNPSWRRGLAGLHPRGAVGLGTPKEQETPTVPKRELRRCPLVQQGAEARVYRGSFLGRAAVAKLRFPKLYRHPALEERLSRRRTAQEARSLLRCRRAGIPAPVVYFVDYASNCIYLEDIVGAIAVQDHIYSVQRSGSDASSLLGLAEKMGQLLARMHDEDLIHGDLTTSNVLLRPPAERLDLVLIDFGLSFISGLPEDKGVDLYVLEKAFLSTHPDTETVFQALLQSYAAASKKSGPVIKRLDEVRLRGRKRSMIG

SEQ ID NO: 58444 - DNA, 801 bp, Candida glabrata CBS138
  CDS (1)..(801)
atgtctcaagaaattgtcgatagggtgcggaactatctgtctcctaatattccagttacaccaatttcgcaaggtgctgaggcggtggtatttactacatctgtgcatccataccttcccgaaaattgcaactctaatgagaagtatattatcaagtacagatctcctaaaaggtatagacatccagttattgataagtcattaacaaaacacaggacactcggtgaagcaagacttttatctaaactctataccattgaaggtttacatgtaccgaagctaatagcatgtgatgcttacaatggttatttatggcttgaattcctgggagaagatcttcctgaaaattttggatatagcaatcttaagaatttcctatggatgtacgatgcaaagaatgatccgtattgcgaagtggtcaagagggcattgattgaagttggagaacaaattggtaaactacattggaacgactactgtcatggtgacctaacgagctcgaatatagtaatggttcactctgatactgattcacaccattgggtaccccatttaattgattttggcttagggtctaccacaactatggtagaagataaaggtgtggatatatatgtgcttgaaagagctattttgagtacacattcacaacatgccgaacagtatattgaatggatgcttgatggtttcaaatcggtatacgagaagaatggcaagttaggtaaaaagaaactcgatgagttactgaagaggtttgcagaggtgagacttcgcggaagaaagagaagtatgataggctaa

SEQ ID NO: 58445 - protein, 266 aa, Candida glabrata CBS138
MSQEIVDRVRNYLSPNIPVTPISQGAEAVVFTTSVHPYLPENCNSNEKYIIKYRSPKRYRHPVIDKSLTKHRTLGEARLLSKLYTIEGLHVPKLIACDAYNGYLWLEFLGEDLPENFGYSNLKNFLWMYDAKNDPYCEVVKRALIEVGEQIGKLHWNDYCHGDLTSSNIVMVHSDTDSHHWVPHLIDFGLGSTTTMVEDKGVDIYVLERAILSTHSQHAEQYIEWMLDGFKSVYEKNGKLGKKKLDELLKRFAEVRLRGRKRSMIG

SEQ ID NO: 58446 - DNA, 792 bp, Kluyveromyces lactis NRRL Y-1140
  CDS (1)..(792)
atgtctgccgaaataattgctagcatagccgatgtgttaactgataacatccctttaacaccaatctctcagggcgctgaggcagttgtatttacatcaccggtacatccatatttgcccaagaacagaacagatggtgacgataagttatacatcttgaaatatagacctgagaagaaatacagacaccctgtgatagacaagacattaactaaacataggacactaggggaatcgaggcttttagctaaattaaggctaattgatgggctgaacgttccaaaattaataggatgtgatccatatcacgggtgtatctggctagagttcttgggagaagacttacctaatggacatggtttcagcaacttaaagaattttctatggatgaatgcctctgatccctattccgatcttgttagggatactatgatcaatgtcggcaaacagatcgggttaatgcattggaacgattattgtcatggagatttaacaacctcgaacattgttttagtcagagcaggagaggattggcagccatatctgatcgactttggtctaggatccatatcaacattagtggaagacaaaggcgttgatttgtacgtgttagagagagccatcataagtactcattcatcatttgctaatagatataacttatgggttcttgaaggtttcaaaagcgtatttgaatctcatggtaaagcagggcttgggaagtataaagatttaattagaaggtttgaagaggttaggttacgtggtagaaagagaagtatgatcggataa

SEQ ID NO: 58447 - protein, 263 aa, Kluyveromyces lactis NRRL Y-1140
MSAEIIASIADVLTDNIPLTPISQGAEAVVFTSPVHPYLPKNRTDGDDKLYILKYRPEKKYRHPVIDKTLTKHRTLGESRLLAKLRLIDGLNVPKLIGCDPYHGCIWLEFLGEDLPNGHGFSNLKNFLWMNASDPYSDLVRDTMINVGKQIGLMHWNDYCHGDLTTSNIVLVRAGEDWQPYLIDFGLGSISTLVEDKGVDLYVLERAIISTHSSFANRYNLWVLEGFKSVFESHGKAGLGKYKDLIRRFEEVRLRGRKRSMIG

SEQ ID NO: 58448 - DNA, 783 bp, Debaryomyces hansenii CBS767
  CDS (1)..(783)
atgacggatcatatagtgaagaaagcacaagagtgcttaccaaatatcccattaacagttatatcccaaggagcagaagcgttagtgttctatactgatgtccatccatatgctaatgaaccatatttacaaaaccgtggaaaatacgtcatcaaatatagaccatccaaaccatatagacaccctaaggtagacagcagtattaccaaatctcgtactgtgggggaagtaaagttcatgtataagttaaacaagttgaatataaattccccaagaataattctggcagattacaataacggcataatttggatggaatacataggatacagcttacctaatggagacgtgagctctttcaagaactggttatggtatcttgaaaggaacaaccaagattgtacaagcgagtctgttgagaagatgtgcttcaaggtggggcaacttattggaaaactacacttacacgaaatgatacacggagatttgacttcgtcgaatatattattgaatgatgatgagccagtattaatcgactttggattgtcatcatactcgggattagcagaagatagagccgttgatctatatgttttagagagagcaataaccagtacgcattctgtatatgctaaggagtataaccaatggttgttacaaggatacgaggatgtccataagcataaagaatttggcaaacagggccaaaagaaattagtagaagtgttgaagaaattagacgacgtaagattaagaggaagaaagagaagcatgttaggttga

SEQ ID NO: 58449 - protein, 260 aa, Debaryomyces hansenii CBS767
MTDHIVKKAQECLPNIPLTVISQGAEALVFYTDVHPYANEPYLQNRGKYVIKYRPSKPYRHPKVDSSITKSRTVGEVKFMYKLNKLNINSPRIILADYNNGIIWMEYIGYSLPNGDVSSFKNWLWYLERNNQDCTSESVEKMCFKVGQLIGKLHLHEMIHGDLTSSNILLNDDEPVLIDFGLSSYSGLAEDRAVDLYVLERAITSTHSVYAKEYNQWLLQGYEDVHKHKEFGKQGQKKLVEVLKKLDDVRLRGRKRSMLG

SEQ ID NO: 58450 - DNA, 747 bp, Yarrowia lipolytica CLIB99
  CDS (1)..(747)
atgatcacacttccagagcagctggagaagctgtccaagcaggaaaatctcattgcacaaggcgctgagtcgttggtgtattccgcccagcacccctacctcccccaacaagaatgcatcgttaaatacagacccaagaagccatatcgtcttccggaacttgatgcccagctcagcaaacacagaacgctggccgaggcccgggtgttgcagaagctggctcttggagacgtggaagtgccccatctggtcttcatcgatgccaaaaacggactcatctacatggagaagatcgaaggtctgagtgtgaagcagtggatctggaacgaggagggagacaccgaaggaggggcccaggaggccggagataagagcagatcgttaccggatggtgacgtgtcttctctgaaggacaccctggttcttgtcggccaagaaatcggcaagttgcataaatctgacattgtccatggcgatctgaccacttcgaacgtcatgttgagagacggcaagcctgtcatcatcgactttggactcgcttccgtgtccactctggccgaagataaggctgtggatctatatgtcatggagcgagccgttctcagtactcatcctgtccacagtcaacagtactgcgactggttgtttgaaggatacctggctgttgtcggcaagagtcagaaagaggtgatgcgaaaactggaggatgttcgacagcgaggacgaaagcggtccatgctaggttga

SEQ ID NO: 58451 - protein, 248 aa, Yarrowia lipolytica CLIB99
MITLPEQLEKLSKQENLIAQGAESLVYSAQHPYLPQQECIVKYRPKKPYRLPELDAQLSKHRTLAEARVLQKLALGDVEVPHLVFIDAKNGLIYMEKIEGLSVKQWIWNEEGDTEGGAQEAGDKSRSLPDGDVSSLKDTLVLVGQEIGKLHKSDIVHGDLTTSNVMLRDGKPVIIDFGLASVSTLAEDKAVDLYVMERAVLSTHPVHSQQYCDWLFEGYLAVVGKSQKEVMRKLEDVRQRGRKRSMLG

SEQ ID NO: 58452 - DNA, 762 bp, Pan troglodytes
  CDS (1)..(762)
atggcggcggccagagctactacgccggccgatggcgaggatcccgccccggaggctgaggctctggccgcagcccgggagcggagcagccgcttcttgagcggcctggagctggtgaagcagggtgccgaggcgcgcgtgttccgtggccgcttccagggccgcgcggcggtgatcaagcaccgcttccccaagggctaccggcacccggcgctggaggcgcggcttggccgacggcggacggtgcaggaggcccgggcgctcctccgctgccgccgcgctggaatatctgccccagttgtcttttttgtggactatgcttccaactgcttatatatggaagaaattgaaggctcagtgactgttcgagattatattcagtccactatggagactgaaaaaactccccagggtctctccaacttagccaagacaattgggcaggttttggctcgaatgcacgatgaagacctcattcatggcgatctcaccacctccaacatgctcctgaaaccccccctggaacagctgaacattgtgctcatagactttgggctgagtttcatttcagcacttccagaggataagggagtagacctctatgtcctggagaaggccttcctcagtacccatcccaacactgaaactgtgtttgaagcctttctgaagagctactccacctcctccaaaaaggccaggccagtgctaaaaaaattagatgaagtgcgcctgagaggaagaaagaggtccatggttgggtag

SEQ ID NO: 58453 - protein, 253 aa, Pan troglodytes
MAAARATTPADGEDPAPEAEALAAARERSSRFLSGLELVKQGAEARVFRGRFQGRAAVIKHRFPKGYRHPALEARLGRRRTVQEARALLRCRRAGISAPVVFFVDYASNCLYMEEIEGSVTVRDYIQSTMETEKTPQGLSNLAKTIGQVLARMHDEDLIHGDLTTSNMLLKPPLEQLNIVLIDFGLSFISALPEDKGVDLYVLEKAFLSTHPNTETVFEAFLKSYSTSSKKARPVLKKLDEVRLRGRKRSMVG

SEQ ID NO: 58454 - DNA, 759 bp, Dictyostelium discoideum
  CDS (1)..(759)
atggatgccaatgaatgtagcaatagtgaaaattcagcgacaacaacaataccgaaatcagcatcaccatctacaactatatcaacaaaagttgtaaaattagatgaaattggtatacttatttcacaaggtgcagaagctaaaacatatgaaactgatttatatggattaaaatgtattgtaaaagaaagattttcaaaagcatatagacatccaatattagatcaaaagatatcatcaaagagaatattacaagaagttagatcattaaataaatgtaaaaaaaagggaattcaagtaccatcactttatttagttgatatcggtaataatagaatctatatggaatttataaaaggtgaaactgtaaaacattatttatacaaaaatcaagaatcaactcaacaccaaaatcaaatagaatcaataatgaaagaattgggtaaccaaattggtataatacatgaaatgaatgtaattcatggtgatttaaccacttcaaatatgttattaagagaatcaacaaatgagttggttttcattgattttggtcttagttatacttcaaattctgtagaagataaagctgttgatctttacgttttagagcgtgctttcattagtactcatccaaattctgaacaattatttcaaacaattttatcaaactatgaattaacttcatcaaattctaaaattgtaattcaaaaattaaatcaagttagattaagaggtagaaagaaaacttgttttggttaa

SEQ ID NO: 58455 - protein, 252 aa, Dictyostelium discoideum
MDANECSNSENSATTTIPKSASPSTTISTKVVKLDEIGILISQGAEAKTYETDLYGLKCIVKERFSKAYRHPILDQKISSKRILQEVRSLNKCKKKGIQVPSLYLVDIGNNRIYMEFIKGETVKHYLYKNQESTQHQNQIESIMKELGNQIGIIHEMNVIHGDLTTSNMLLRESTNELVFIDFGLSYTSNSVEDKAVDLYVLERAFISTHPNSEQLFQTILSNYELTSSNSKIVIQKLNQVRLRGRKKTCFG

SEQ ID NO: 58456 - DNA, 519 bp, Entamoeba histolytica HM-1:IMSS
  CDS (1)..(519)
atgaataaaaaacgagtaagtaatgaaaataaaacacttcaacgatttaatgaattaaatattccatgtcctaaagtattttattgtaataatttagatattgtaatggagtatattgatggaaaaacattaaagagttttgtgaatggtatgtacaaaaatgaaaaatacagtgatgaagctatttgtgtgatggggaaattaggaaaacttattggcacaattcataaaaaaggatttattcatggtgatttaactacttcaaacttcatgattaaacaaactggagatatcattattattgattttggattaacaacaatgtcagaaacaatagaaaatagagctgttgatttatatgtattagaacgagctcttttatgtacacactacaaagcagaagatttatttagatatattttagaaggatatcgtgaaacaggagataaagctaatgaagttattcaacatcttaatgaagttcgattaagaggaagaaagaaagatatgtcaggataa

SEQ ID NO: 58457 - protein, 172 aa, Entamoeba histolytica HM-1:IMSS
MNKKRVSNENKTLQRFNELNIPCPKVFYCNNLDIVMEYIDGKTLKSFVNGMYKNEKYSDEAICVMGKLGKLIGTIHKKGFIHGDLTTSNFMIKQTGDIIIIDFGLTTMSETIENRAVDLYVLERALLCTHYKAEDLFRYILEGYRETGDKANEVIQHLNEVRLRGRKKDMSG

SEQ ID NO: 58458 - DNA, 696 bp, Entamoeba histolytica HM-1:IMSS
  CDS (1)..(696)
atgacttataaaacctcttcatttgactttaaaagtcttcttcttcatttggatgaaaaagacaaagtaagtcaaggggcagaagcagttatatataaagtgagtacaccaaattgtatctttcttattaaacaccgatttgctaaatcatatagagaacctactttagacaaatcaatgaataaaaaacgagtaagtaatgaaaataaaacacttcaacgatttaatgaattaaatattccatgtcctaaagtattttattgtaataatttagatattgtaatggagtatattgatggaaaaacattaaagagttttgtgaatggtatgtacaaaaatgaaaaatacagtgatgaagctatttgtgtgatggggaaattaggaaaacttattggcacaattcataaaaaaggatttattcatggtgatttaactacttcaaacttcatgattaaacaaactggagatatcattattattgattttggattaacaacaatgtcagaaacaatagaaaatagagctgttgatttatatgtattagaacgagctcttttatgtacacactacaaagcagaagatttatttagatatattttagaaggatatcgtgaaacaggagataaagctaatgaagttattcaacatcttaatgaagttcgattaagaggaagaaagaaagatatgtcaggataa

SEQ ID NO: 58459 - protein, 231 aa, Entamoeba histolytica HM-1:IMSS
MTYKTSSFDFKSLLLHLDEKDKVSQGAEAVIYKVSTPNCIFLIKHRFAKSYREPTLDKSMNKKRVSNENKTLQRFNELNIPCPKVFYCNNLDIVMEYIDGKTLKSFVNGMYKNEKYSDEAICVMGKLGKLIGTIHKKGFIHGDLTTSNFMIKQTGDIIIIDFGLTTMSETIENRAVDLYVLERALLCTHYKAEDLFRYILEGYRETGDKANEVIQHLNEVRLRGRKKDMSG

SEQ ID NO: 58460 - DNA, 858 bp, Aspergillus nidulans FGSC A4
  CDS (1)..(858)
atgccaccaacgaaccgccccccaccattttccaccattctttcttccgcgtcccttccttcttactcttcaacagatgaattaacaccaatatatcaaggcgctgaagcgcacctctacaaaactacgttcctctcaccgtcccagcccgccgcgctcaaaatccgcccgtcaaaaccctaccggcacccgatcctcgatcgccgcctaacccgcgcccgcatattacaagaagcgcgttgtctccagaagttagtgaaagagggtgtatcggtccccgcattattgggtgtggattgggagccgagtgctggagatgggagctcttggcttgttatggaatggattgagggtgagcctgtcagggttattctggaggaatgggaggcatatttgaaaggcattgagagggaaaagaggctgggcttgggagagggtgtgcaagggagcgaggaggagaaggttcgcgggcttatgcggaggattgggagggctgttggggggttgcatagagcgggtgttatacatggggacttgacaacgagcaatcttatgctgcgccctttgggctctgcagatacgactgaaaccatagaggagagggatcagtcaccctctatggcaggtgaagttgtcatgattgacttcggactcgcgatgcagagctcccaggatgaggaccgcgcggtggatctctatgtcctagaacgggcttttgggagctcgcatccacgaacggaaaggtttttcgaggaagttcttgttgggtatagagaaagttataagggtgcggtctcggctctgaagagactggaagatgtgaggatgagaggaaggaagaggagcatgattgggtag

SEQ ID NO: 58461 - protein, 285 aa, Aspergillus nidulans FGSC A4
MPPTNRPPPFSTILSSASLPSYSSTDELTPIYQGAEAHLYKTTFLSPSQPAALKIRPSKPYRHPILDRRLTRARILQEARCLQKLVKEGVSVPALLGVDWEPSAGDGSSWLVMEWIEGEPVRVILEEWEAYLKGIEREKRLGLGEGVQGSEEEKVRGLMRRIGRAVGGLHRAGVIHGDLTTSNLMLRPLGSADTTETIEERDQSPSMAGEVVMIDFGLAMQSSQDEDRAVDLYVLERAFGSSHPRTERFFEEVLVGYRESYKGAVSALKRLEDVRMRGRKRSMIG

SEQ ID NO: 58462 - DNA, 648 bp, Plasmodium berghei
  CDS (1)..(648)
atgaaaatatataaatgcgatttcataggaaaggaagcaattaaaaaagtaatttacagaaaatattatagacacaaaaaaatcgattcaaaaatacgaaaattaagaatatcaaatgaaatcaaatttactaaaaaactagccagtttaaatattgacgtaccatatttatatttcgttgatacgaaagaaaaaagcttatattttgaatacgtcaatggatgcacaataaataatatattaaaaagtatctcacaatatcaaccgaacattcctaaattcattggtatcacattagcaaaaatacataatggaaatgtaatacatggagattttactacatcaaatttaattttaagatattcatatattaatgaaaatgaaatttttaataatttaaataatgccccttatgaattgaatgatatcaaggaaatcaagctttgcgttatcgattttggtctatcctttttatcagcttcggttgaggataaggctgtggatttgtttgttctcttgaaagccattaaaagtttccatagtgaatttcctaaattggaagaagacattttattggggtatgaaacccaatcgaataattttgatttaatcagaaaaaaactagaaacaggtttgctcataaattaa

SEQ ID NO: 58463 - protein, 215 aa, Plasmodium berghei
MKIYKCDFIGKEAIKKVIYRKYYRHKKIDSKIRKLRISNEIKFTKKLASLNIDVPYLYFVDTKEKSLYFEYVNGCTINNILKSISQYQPNIPKFIGITLAKIHNGNVIHGDFTTSNLILRYSYINENEIFNNLNNAPYELNDIKEIKLCVIDFGLSFLSASVEDKAVDLFVLLKAIKSFHSEFPKLEEDILLGYETQSNNFDLIRKKLETGLLIN

SEQ ID NO: 58464 - DNA, 891 bp, Candida albicans SC5314
  CDS (1)..(891): transl_table=12
atgacagatcacctaattgctaaagtacaagaacatgtacctaacattccattgaaaataatatcacaaggtgcagaagcactagtttttgaaacatcagttcacccgtactacaactacaattcgagtgaaaaacaccatgagtcaccttctttgcacaatcatacaacatttataataaaatatcgtcccacgaaaccctatcgtcaccctaaaatagatttgcaaattaataaatcacgaactattggcgaagttaagtttatgtataaactctcaaaattaaacattgcctgtcctaatatcattctgacagattttaataacggtatcatatggatggaatgtcttggatcaaaattgcccaatggcacaataagttcatttaagaattggttatggtatttagaaagtcaagagaaagaggatcccagtataaacctccatgacgatgaccaagtcgaattggtttgtcaaaaagttggacaattgataggtcgattacatttaaacgatatgattcatggcgatttaacttcatcaaacataattttaacagaggtggatactaagaaaaatgaagatacagatgccaataatagttcagtttattttgaaccggcgttgattgattttggtttatcttcattttcaggattagcagaagataaggctgttgatctatatgttttggagagagcaattctaagtacccattcaaactatgccgataaacttaatggctggctattagaaggataccaacaaatccatgattctattgaattcaataaaaccaaacaacaattaggtaaactgaaattaaaagatacgattaaaagactagaagatgtccgtttaagaggaagaaaaagaagtatgttgggttga

SEQ ID NO: 58465 - protein, 296 aa, Candida albicans SC5314
MTDHLIAKVQEHVPNIPLKIISQGAEALVFETSVHPYYNYNSSEKHHESPSLHNHTTFIIKYRPTKPYRHPKIDLQINKSRTIGEVKFMYKLSKLNIACPNIISTDFNNGIIWMECLGSKLPNGTISSFKNWLWYLESQEKEDPSINLHDDDQVELVCQKVGQLIGRLHLNDMIHGDLTSSNIILTEVDTKKNEDTDANNSSVYFEPALIDFGLSSFSGLAEDKAVDLYVLERAILSTHSNYADKLNGWLLEGYQQIHDSIEFNKTKQQLGKSKLKDTIKRLEDVRLRGRKRSMLG

SEQ ID NO: 58466 - DNA, 648 bp, Plasmodium chabaudi
  CDS (1)..(648)
atgaaaatatataaatgtgatttcattggaaaggaagcaattaaaaaagtaatttacagaaaacattatagacacaaaaagattgattcaaaaatacgaaaattaagagtatcaaatgaaatcaaatttactaaaaaactagccagtttaaatattgatgtcccatatttatattttgttgatacaaaagaaaaaagcatatattttgaatatgtcaatggctgtacaataaataatatattaaaaagtatcaaacaatatcaaccaaatattcctaaattcattggtatcacattagcaaaaatacataatggaaatgtaatacatggagattttaccacatcaaatttaattttaagacattcatatattaatgaaaatgaaatttttaataatttaaataatgccccttatgaattggctgatatcacggagataaaactttgtgttatcgattttggtctatcctttttatcagcttcggttgaggataaggctgtggatttgtttgttctcttgaaagccatcaaaagtttccatagtgaatttcctaaattggaagaagacattttattggggtatgaaacccaatcgaataattttgatttaatcagcaaaaaactagaaacaggttcgcttataaattaa

SEQ ID NO: 58467 - protein, 215 aa, Plasmodium chabaudi
MKIYKCDFIGKEAIKKVIYRKHYRHKKIDSKIRKLRVSNEIKFTKKLASLNIDVPYLYFVDTKEKSIYFEYVNGCTINNILKSIKQYQPNIPKFIGITLAKIHNGNVIHGDFTTSNLILRHSYINENEIFNNLNNAPYELADITEIKLCVIDFGLSFLSASVEDKAVDLFVLLKAIKSFHSEFPKLEEDILLGYETQSNNFDLISKKLETGSLIN

SEQ ID NO: 58468 - DNA, 834 bp, Aspergillus fumigatus Af293
  CDS (1)..(834)
atggcttcaacggacccatacacaccgcctcccctcccttctcccttcacgaacacaacccctccaccgcaattgctcacccaaggcgccgaagcgcacctctacaagaccgtcttcctctcaccctccgccccagctgctctgaaggtccgcccgtcaaagccctaccggcacccgattctcgaccgacggctcacgcgccagcgcatactgcaggaagctcggtgcctggtaaaactcgtccgggaaggcgtcaatgtccccgcggtgctggcgctggattgggagggccaatctggcgaaaaggggttcggcggggcctggttgatgatggagtggattgagggaatggtggtgcgcgtcgtactggagcggtgggagaaatacatgaagcggaaccaggcgggcctgggcgcggaggaatttgaaaaggaagaagcgcgggtccgagatttgatgaagagaattgggcacgcagttggagcgctgcacaaagccggcgttatccacggggatctgacaacgagcaatcttatcctgcgaccgcctactcgtgcggagcagcaacccgccgctgacgagacaaatccgtctatggagggggatgttgttctgatcgattttggcttggccagtcagagtctgcaagacgaagaccgcgccgtcgatctatacgtgcttgagagggcgtttggtagcacccatcctcgtactgagccgctcttcacagaggtcctcagcgggtataaggaaagctacaagggcgcaagctctgcattgaaacgattagaggaagtacggatgagaggccgtaagagaagtatgattggatga

SEQ ID NO: 58469 - protein, 277 aa, Aspergillus fumigatus Af293
MASTDPYTPPPLPSPFTNTTPPPQLLTQGAEAHLYKTVFLSPSAPAALKVRPSKPYRHPILDRRLTRQRILQEARCLVKLVREGVNVPAVLALDWEGQSGEKGFGGAWLMMEWIEGMVVRVVLERWEKYMKRNQAGLGAEEFEKEEARVRDLMKRIGHAVGALHKAGVIHGDLTTSNLILRPPTRAEQQPAADETNPSMEGDVVLIDFGLASQSLQDEDRAVDLYVLERAFGSTHPRTEPLFTEVLSGYKESYKGASSALKRLEEVRMRGRKRSMIG

SEQ ID NO: 58470 - DNA, 1476 bp, Ustilago maydis 521
  CDS (1)..(1476)
atgtctggaatcgatcatcgagcaggcagcggctcgttgtcgagctcaccatcggcacgtacaccgcggctggctttcccagtagcccgctctaggcctacatctattgttgactcagtcgaagcgaccagcgaagctatcctctctacttcgcccgcctcttctaccacctcggcgggcgcttcgccgcgcaagcacacgcaatcagccgcagatcgactcgcatctgcacaggcaaaggatgctgctgctgcggccaaatcgcatcgagcacgcaccacgtccagcacatcacgttctagcaccgagggaggtcgagctaagctcccatcactgctgcaggccaccactagctccagatcggcagcaacgccggtgaccagcacctatctcgacatctcttcgagtgcaccaggagaagaaagtgcgtcaaaaccaagcaacgcctcgaagcacgccactgatacgcatgtagtcgctctcgacggtcaatcaatgtcgaaacgtgcttcgcgtgatccgccttccatcatcagtgccaaagtagctggttcgagcatgcccaagaaggtgtccgcggcgcctaaatcaactccgaacgcacctccactggtggcgctgctctccgactcgaacctgtctgtgctcatcaaacagggcgctgaggccaaagtctacatctcgcgcatcgctaccaacaacattctcacatggccccgaccacgctcttccaagctagaatcgagcaaggtggagcctcctgctcctgtgctgctcaagtggcgctttccaaaaacgtaccgacatccgacgctgtcgagcaacattaccgcatcgcgcaccatcatggaggctagggcactgctgcgttgcgccaaggccggtgtagcagtgcctgccgttcgatgtgtggatgagaaggaaggtatcttaggtctcgagctcatcccgggcaaaagtgtccgagagtggctcggtggcggtgccgaaggcgacgatgaggctttggtggatgaggctgatacagcgagaactcaagaggaggaggtgctttccgagattgatcaagccaaattgatgaggttgataggtaaacagttggccattatgcacgaagccgacatcattcacggtgaccttacgacgtcgaatatgatgctgcgcccggcagcgccttgctcgtccacgtcgggctcagcaacggtcgatctggatcatgacgaggtggttctcattgatttcggtctgtcttcggtctcgacattcgccgaagacaaggcagtagacctgtacgtgctcgagagggcatttgcttcgacccaccctgcatccgaagcgctctaccgcaccatcctcgatagctatgcggaagaggttaccgctcgatccgctggcaagggccgagggaagggttccaaactgaacaaatgggaagagacgcgacgcaagctcgaagaaggtaagatgaaatattga

SEQ ID NO: 58471 - protein, 491 aa, Ustilago maydis 521
MSGIDHRAGSGSLSSSPSARTPRLAFPVARSRPTSIVDSVEATSEAILSTSPASSTTSAGASPRKHTQSAADRLASAQAKDAAAAAKSHRARTTSSTSRSSTEGGRAKLPSLLQATTSSRSAATPVTSTYLDISSSAPGEESASKPSNASKHATDTHVVALDGQSMSKRASRDPPSIISAKVAGSSMPKKVSAAPKSTPNAPPLVALLSDSNLSVLIKQGAEAKVYISRIATNNILTWPRPRSSKLESSKVEPPAPVLLKWRFPKTYRHPTLSSNITASRTIMEARALLRCAKAGVAVPAVRCVDEKEGILGLELIPGKSVREWLGGGAEGDDEALVDEADTARTQEEEVLSEIDQAKLMRLIGKQLAIMHEADIIHGDLTTSNMMLRPAAPCSSTSGSATVDLDHDEVVLIDFGLSSVSTFAEDKAVDLYVLERAFASTHPASEALYRTILDSYAEEVTARSAGKGRGKGSKLNKWEETRRKLEEGKMKY

SEQ ID NO: 58472 - DNA, 723 bp, Strongylocentrotus purpuratus
  CDS (1)..(723)
atggcatcggctgtgacttgcgaccaagcgacgctggaaggcgatacctctcagtcgaagctcactctcttgaaacagggagcagaagcccgtatttacctgagcactttcatgggtcgtagctccatcgtgaagcagagattcaagaagtcttacagacatcctaagctggacgctaagctttcacagaagcgcaccggacaagaagtcaggacaatcgtcaaatgcaggaaggctgggatcactacacctgtggtatactttgtcgacaatgacactcattccatccacatggaatacatagaagactccctcacagtccgagagtacattcaacagattcagaactccggggaatccaacgatgatgaaaggttggtgtcactcgcctcaaaggttggaacgaccctagcatccatgcacaatgtggacatcattcatggggatttgacgacctcaaacatgcttctgcgtcaaccttacgaggactcgcgcctgataatgatcgatttcggactcagtcagatatcgcatatgtcggaggataaaggggttgatctctatgtcttggagagggcgtttctaagctcacacccgaacacggaagagttgtttaagacagttcttgatgtgtatgcggagaactacaaaaagtctggagaagtgttgaagaagctggaggaagtaagacaacgagggagaaagagggtgatgttaggctag

SEQ ID NO: 58473 - protein, 240 aa, Strongylocentrotus purpuratus
MASAVTCDQATLEGDTSQSKLTLLKQGAEARIYLSTFMGRSSIVKQRFKKSYRHPKLDAKLSQKRTGQEVRTIVKCRKAGITTPVVYFVDNDTHSIHMEYIEDSLTVREYIQQIQNSGESNDDERLVSLASKVGTTLASMHNVDIIHGDLTTSNMLLRQPYEDSRLIMIDFGLSQISHMSEDKGVDLYVLERAFLSSHPNTEELFKTVLDVYAENYKKSGEVLKKLEEVRQRGRKRVMLG

SEQ ID NO: 58474 - DNA, 432 bp, Strongylocentrotus purpuratus
  CDS (1)..(432)
atggaatacatacaggactccctcacagtccgagagtacattcaacagattcagaactctggggcatccaacgatgatgaaaggttggtgtcactcgcctcaaaggtcggaacgaccctagcatccatgcacagtgttgacatcatccatggggatttgacgacctcaaacatgcttctgcgccaaccctacgaggactcgcgcctgataatgatcgatttcggactcagtcagatatcgcatatgtcggaggataaaggggttgatctctatgtcttggagagggcttttctaagctcacacccgaacacggaagacttgtttaagactgttcttgatgtatatgcggagaattacaagaagtctggagaagtgttgaagaagctggaggaagtaagacaacgagggagaaagagggtgatgttaggctag

SEQ ID NO: 58475 - protein, 143 aa, Strongylocentrotus purpuratus
MEYIQDSLTVREYIQQIQNSGASNDDERLVSLASKVGTTLASMHSVDIIHGDLTTSNMLLRQPYEDSRLIMIDFGLSQISHMSEDKGVDLYVLERAFLSSHPNTEDLFKTVLDVYAENYKKSGEVLKKLEEVRQRGRKRVMLG

SEQ ID NO: 58476 - DNA, 774 bp, Trypanosoma cruzi
  CDS (1)..(774)
atggggaaaaacgagactgacacggatgttctgacaagtaacgttgaagttggatccgtcttgtcgcaatgcgcggagtcacgagtgcatgagtgtaacttttacggttatcgcgccgtctgcaagcaccgttttcccaaagcgtaccgtcatcctgctttagatcaacgcctccgggagcagcggactgtccgggagggtcgagcacttgcacgctgcctcaaaaacggagtcttggccccaaccgtttttgctgttgaccgtgaacggtgcgcaattgtcatggagcgcattgacggtctcaccgtacgcgagatattcaatcacgagcaaggaaatgttgcacaagggaagacggacgtgtcttttcttgtctcgttcctcttaaggggaatgggggaggtggttggcctcctgcataacgcagacatcattcacggcgatctcacaacatcgaatttcatgtgcaaacgaaattttttggagcgacgactgtctacggaaaatttggcgtcaaacacctcttctcgcgatagcattgttgttttagattttggacttgtgatggacaagaatagtgcggaggagcgtgccgtcgacctgtacgttcttgagcgtgcgctgaagtcctcgcatccatttctggagcacgtggccactagactggtcctggagggctaccaccgcaccgtggatccgcagaagggttccgtcaccatggcgcgtctggaagcagtgcgggcacgtggccgtaaacggagcatgattggctag

SEQ ID NO: 58477 - protein, 257 aa, Trypanosoma cruzi
MGKNETDTDVLTSNVEVGSVLSQCAESRVHECNFYGYRAVCKHRFPKAYRHPALDQRLREQRTVREGRALARCLKNGVLAPTVFAVDRERCAIVMERIDGLTVREIFNHEQGNVAQGKTDVSFLVSFLLRGMGEVVGLLHNADIIHGDLTTSNFMCKRNFLERRLSTENLASNTSSRDSIVVLDFGLVMDKNSAEERAVDLYVLERALKSSHPFLEHVATRLVLEGYHRTVDPQKGSVTMARLEAVRARGRKRSMIG

SEQ ID NO: 58478 - DNA, 741 bp, Trypanosoma brucei
  CDS (1)..(741)
atgaatacgcacgcggccgctgttacggttgggtcggtgctgtttcaatgcgccgagtcacgtgtgtatgaatgcgatttctacagtcaccctgccgtatgcaaatatcggcttccaaagccttacaggcaccctacattggataaaaggcttcgtgagcagcgctctgtgcgtgaggcaagggcattggtgagatgtcaaaagcaagggatcgcggtgccagcggtgtatgccatcgaccgtgagagttgcgccatcgtaatggaacgaattattgggatgagtgtacgggacgtgcttaatgaggcgcagcggccgttggagggcgcagtgtcaccggtggccgcccgcctgttggaagggatgggtgaagtggtggggcttctgcacaatgctcatataatccacggggatcttacaacctcaaacttcatgtaccgaacagcaactgtggcggaggggaaggctgatagtgcagcatgtggagccgctccacgtgatcgtctcgtcgtgttggactttggtttagtgatggacaaaaatagtgcggaagagcgtgcagtcgacttgtatgttcttgagcgggccattaaatcgtcgcacccgtcgctcgaaggcgtggcttcagcgtttatcttaaacggctaccgtcgtactgcagatccacatcaagtggaagcgactatcacacgtcttggggctgtgcgggcgcgtggtcgcaagcgtagtatggtgggatag

SEQ ID NO: 58479 - protein, 246 aa, Trypanosoma brucei
MNTHAAAVTVGSVLFQCAESRVYECDFYSHPAVCKYRLPKPYRHPTLDKRLREQRSVREARALVRCQKQGIAVPAVYAIDRESCAIVMERIIGMSVRDVLNEAQRPLEGAVSPVAARLLEGMGEVVGLLHNAHIIHGDLTTSNFMYRTATVAEGKADSAACGAAPRDRLVVLDFGLVMDKNSAEERAVDLYVLERAIKSSHPSLEGVASAFILNGYRRTADPHQVEATITRLGAVRARGRKRSMVG

SEQ ID NO: 58480 - DNA, 909 bp, Canis familiaris
  CDS (1)..(909)
atgtgggaggcggggccactgccacaggcggaagcgtcggcctcggagtggccgaagaggcccgaagactcacggggcgagccgaacatcgccggcagtttccggagagaggcgacgggctccgagaggcggcgccgaggcgcagtcatggcggcccccgacgccgctgccggcgccgagagcgaggagccgccgcgggaggccgaggcgctggccgcggcccgggagcggaacggccgcttcttgagcggcctggaactggtgaagcagggcgccgaggcgcgcgtgttccgcggccgcttccagggccgcgcggcggtggtgaagcaccgcttccccaagggctaccggcacccggcgctggaggcgcggctcggccggcggcggacggtgcaggaggcccgggcgctgctccgctgccgccgcgcagggatatctgctccagttgtcttttttgtagactatgcatccaactgcttatacatggaagaaatcgaaggctcagtgactgttcgagattatattcagtctaccatggagactgaaaaaactcctcaaagtctcctcagcctagccaagacagttgggcaggttttggctcgaatgcacgatgaagacctcattcatggtgatctcaccacctcgaacatgctcctgaaaccccccgtggaacagctgaacattgtgctcatagactttgggctgagtttcatttcagcacttccagaagataagggagttgacctctacgtgctagagaaagccttcctcagtacccaccccaaaactgagactgtgtttgaagccttcctgaaaagctactccaccttctccaaaaagtccaggccagtgttaaaaaaattagatgaagttcgcctaagaggaagaaagaggtccatggttgggtag

SEQ ID NO: 58481 - protein, 302 aa, Canis familiaris
MWEAGPLPQAEASASEWPKRPEDSRGEPNIAGSFRREATGSERRRRGAVMAAPDAAAGAESEEPPREAEALAAARERNGRFLSGLELVKQGAEARVFRGRFQGRAAVVKHRFPKGYRHPALEARLGRRRTVQEARALLRCRRAGISAPVVFFVDYASNCLYMEEIEGSVTVRDYIQSTMETEKTPQSLLSLAKTVGQVLARMHDEDLIHGDLTTSNMLLKPPVEQLNIVLIDFGLSFISALPEDKGVDLYVLEKAFLSTHPKTETVFEAFLKSYSTFSKKSRPVLKKLDEVRLRGRKRSMVG

SEQ ID NO: 58482 - DNA, 666 bp, Thermococcus kodakarensis KOD1
  CDS (1)..(666): transl_table=11
gtgaagctaatagcccagggggccgaggcgaagatatacgaggcggactttgaggaggtctttggtgttcctctgctcaaagagagggtcatcgtaaagcacaggattccaaagaggtacaggatcaaggagatagacgtgaagctgaggaaggagagaaccgtaagggaagcgagaattctccacagggcaaaggagttcggcgtcaactgtccccacgtttatgaggttgacctgagggacatgaagctcgtgatggagtacatagagggacagaggctcaaggagctccttgagagcgtcccgatggaagagaggcttgagctgtgccgcgaggtcgggagacagattggaaagctacacaaggctgggatagtccacggggatttaacgacctcgaacatgatattcagggacggcaaggtctacctgatagactttggcttggccgacttcgactcgacgcttgaagcaaggggcgttgacctgcacctcctcaggagggcgatggagagcacccactacacctggttcgagaggggcttcgaggccgtccttgaaggctatgctgaagttctcggcgaagaagcgaggaaagaagtcgaggagaagatgagggagatagagagcaggggcaggtacagggagaggagctggcttagttag

SEQ ID NO: 58483 - protein, 221 aa, Thermococcus kodakarensis KOD1
MKLIAQGAEAKIYEADFEEVFGVPLLKERVIVKHRIPKRYRIKEIDVKLRKERTVREARILHRAKEFGVNCPHVYEVDLRDMKLVMEYIEGQRLKELLESVPMEERLELCREVGRQIGKLHKAGIVHGDLTTSNMIFRDGKVYLIDFGLADFDSTLEARGVDLHLLRRAMESTHYTWFERGFEAVLEGYAEVLGEEARKEVEEKMREIESRGRYRERSWLS

SEQ ID NO: 58484 - DNA, 660 bp, Sulfolobus acidocaldarius DSM 639
  CDS (1)..(660): transl_table=11
atggagatagtcagagagataaaaagaggagcggaagctataatatacgaggggtattttgcaggcatacatgctgtgtttaaaaaaaggataaaaaagagttatagaaacgatattgttgatagagccattaatgagagcagaaccaaattggaagctagaatgatatactcagctctaaaatctggggtaaatgtaccagcaatacttttggttgatcctatacaattcctgatagtaatggaatatatagagggtactacactaagggatatatttaaccaaggaagaaacttaagggagttaggaaaagaaatgggcttaatgatatcccttcttcataaggctaatataatccacggagatctaactacgacaaatatgatatacacagatgaaggattatttctaattgatttcggacttgctaagaaaagtaatgatattgaggattttgcaacagatattcatgttttattgagatccctagaaagtattcacagtcattttaaagacgaaatatttgaaggattcaaggaaggatactctaccatgatggactcagacaaagttatagaaaaaatgaaggagattagaatgaggggaagatacgttgaagaaagaagaaaaaagagagataatactagtcacgtccaatga

SEQ ID NO: 58485 - protein, 219 aa, Sulfolobus acidocaldarius DSM 639
MEIVREIKRGAEAIIYEGYFAGIHAVFKKRIKKSYRNDIVDRAINESRTKLEARMIYSALKSGVNVPAILLVDPIQFLIVMEYIEGTTLRDIFNQGRNLRELGKEMGLMISLLHKANIIHGDLTTTNMIYTDEGLFLIDFGLAKKSNDIEDFATDIHVLLRSLESIHSHFKDEIFEGFKEGYSTMMDSDKVIEKMKEIRMRGRYVEERRKKRDNTSHVQ

SEQ ID NO: 58486 - DNA, 1638 bp, Methanosarcina barkeri str. fusaro
  CDS (1)..(1638): transl_table=11
ttgaaaaacacgttcatccttggaatcgagggcactgcctggaacctgagtgccgcaatcgtgaccgaaaccgagattattgccgaggtcacagagacctacaaacccacggccggtgggattcaccccagggaagcagcccagcatcatgcaaagtacgcagccagcgttataaaaaggcttcttgcagaggcaaaagagaagggagtcaagccttcagatattgacgggatagctttttcccagggacctgggcttgggccgtgcctgaggacggttgcaacggcagccagaatgctttccatatcccttggcattccacttataggtgtcaaccactgcattgctcatattgagattgggatctggagaactcctgcaatggaccctgtcgttctttacgtaagtggggccaattctcaggttatttcctatatgggagggcggtatagagtctttggggaaaccctggatatagggcttggaaatgcccttgataaatttgcgcgaggggctaacctaccgcatcccggagggccaaagattgaggcatacgcaaaaaacgcaacgaaatatatccatcttccttatgtgataaaaggcatggacctttccttttccggactttccacggcagccagtgaagccttgaaaaaagctcctcttgaagatgtctgctattcttaccaggaaacagcttttgcaatggttgttgaggttgcagagcgagcacttgctcacaccggaaaaaaagaagtcttgctggcaggaggagttggggcgaacacaaggctccgggaaatgttaaatgatatgtgcgaggccagaggcgcgaagttctatgtgcccgaaaaacgctttatgggagataacgggacaatgatcgcatatactgggcttctaatgtataagtccggaaacactctttcccttgaagattctcgcgtaaatcccagttaccggactgatgatgtgaaagtgacctggatccaggaagaaaagatgaaaagagttcctgaaatttcccccggaacttccctcaagcttggggaactgctggacaatggagccgaggctattgtttacctggaagaagggcctgaagggaagaaaatacttgttaaggaaagagtcccgaaggcttacaggtataaagagattgatgagaggatcaggactgaaagaaaccggacagaagcccgcttgatgtctgaatctcgacgccatggggtttctacgccgattatctatgatgtggaagatttcaagcttaagatgcagtatattgatggtgtccccataaaatacctggttactcctgagctttcagaaaaagtaggagaacttgtaggaaaactacacagtgcgggtatagtacatggggaccttacgacctcaaatatcctgcttgcaggcgagagactttatctccttgacttcgggcttgcttattacgacaaaggacttgaggccagaggggtagacgtccatgtacttttccagacttttgagagtacccaccgcaatcatgaggcccttatcgaagctttcaaaaaagggtaccggagaacttttatagattcagaggatgtactcacgcgtgttgaagagataaaaaagagggctcgttatgcataa

SEQ ID NO: 58487 - protein, 545 aa, Methanosarcina barkeri str. fusaro
MKNTFILGIEGTAWNLSAAIVTETEIIAEVTETYKPTAGGIHPREAAQHHAKYAASVIKRLLAEAKEKGVKPSDIDGIAFSQGPGLGPCLRTVATAARMLSISLGIPLIGVNHCIAHIEIGIWRTPAMDPVVLYVSGANSQVISYMGGRYRVFGETLDIGLGNALDKFARGANLPHPGGPKIEAYAKNATKYIHLPYVIKGMDLSFSGLSTAASEALKKAPLEDVCYSYQETAFAMVVEVAERALAHTGKKEVLLAGGVGANTRLREMLNDMCEARGAKFYVPEKRFMGDNGTMIAYTGLLMYKSGNTLSLEDSRVNPSYRTDDVKVTWIQEEKMKRVPEISPGTSLKLGELLDNGAEAIVYLEEGPEGKKILVKERVPKAYRYKEIDERIRTERNRTEARLMSESRRHGVSTPIIYDVEDFKLKMQYIDGVPIKYLVTPELSEKVGELVGKLHSAGIVHGDLTTSNILLAGERLYLLDFGLAYYDKGLEARGVDVHVLFQTFESTHRNHEALIEAFKKGYRRTFIDSEDVLTRVEEIKKRARYA

SEQ ID NO: 58488 - DNA, 1596 bp, Ferroplasma acidarmanus Fer1
  CDS (1)..(1596): transl_table=11
atgaaagtcctgcggcttgagggcacagctcatacaataagtgccggtatcgtagacgataatagaatcatttcaaatttctcatcaacttacataccaaaaaatggtggcatacatccaagggaagcagcaatccaccacgccgataacatattgcctgttatgaagaaagcatttgaagaaagtggcctatcacctggccagataaacctggtggctttttccatgggccccggcctagggccgtgtttgagggttgtagctacagctgccagggcattttcaattaaatacgggattccattaataggtgttaaccacccgctcgggcatgtggaaataggaaggaaactttccggggcaaaggatcctataatgttatatatttccggggggaatacacagattatagcacatgaagaaaattcctataaagttcttggggagaccatggatattgggctgggaaatctgctggacaaactggcaagggatgtaggcataccatttccaggaggaccaaaaatagaggaatttgctttaaaaggtgataaattgctggatttgccatactctgtaaagggaatggatacatcattttcaggaatttatacagcagccaggaattatataggaagggaatccatagaaaatatatgctatagcgtccaggaaacaaccttttccatgctggtagaggttttagaacgggcattatattatacagataaaagggagattttacttgcaggaggggtagccagaaacgatcggctccgttcaatggtttcacatatggcaaagtcatctggatatgttgcctatcttacagataaaaaatactgtatggataatggtgccatgatcgcacaggcaggcatgttaatgtatctttctgggcagaggcagcatataatggatacaaaggtaaatcaaagtttcaggatcgatgaagtcaaggttccctggattaactcaaaaaagcctgttataagcaataacaggggggcagaagcattgatttcagaatcgcagttttatggtaggaaaactattacaaaacagcgcgtagaaaaagaatacagaaatcaggaactggatcgcaaaataagaacagaaagaatgaaaaatgagtttaaccttatattcaggctaaaaagcaatggaataaattctcctattctgtatgattttgataagtataatttcacattagttatgcaaaaacttgatggtataacactcaataaactaatcaggtctggggataactatatggcggttataaataaacttggccagataataggagaaatgcataacctattaatctcacatggcgatctgaaccccaacaatatcatggttgttgggccagatatatatctaatagaccccagcatgggaaaatttaattgtgaaatagaagatatggcagatgacattttcctcctcacagaatcatttaaaaatctgtattcaaactatgatgtgcttgaaaatcattttataagttcttataaggaaaaatccaccaattatgtagaaattataaaaacgctggatgaaataaagcaaagaaggagatatgtttga

SEQ ID NO: 58489 - protein, 531 aa, Ferroplasma acidarmanus Fer1
MKVLRLEGTAHTISAGIVDDNRIISNFSSTYIPKNGGIHPREAAIHHADNILPVMKKAFEESGLSPGQINLVAFSMGPGLGPCLRVVATAARAFSIKYGIPLIGVNHPLGHVEIGRKLSGAKDPIMLYISGGNTQIIAHEENSYKVLGETMDIGLGNLLDKLARDVGIPFPGGPKIEEFALKGDKLLDLPYSVKGMDTSFSGIYTAARNYIGRESIENICYSVQETTFSMLVEVLERALYYTDKREILLAGGVARNDRLRSMVSHMAKSSGYVAYLTDKKYCMDNGAMIAQAGMLMYLSGQRQHIMDTKVNQSFRIDEVKVPWINSKKPVISNNRGAEALISESQFYGRKTITKQRVEKEYRNQELDRKIRTERMKNEFNLIFRLKSNGINSPILYDFDKYNFTLVMQKLDGITLNKLIRSGDNYMAVINKLGQIIGEMHNLLISHGDLNPNNIMVVGPDIYLIDPSMGKFNCEIEDMADDIFLLTESFKNLYSNYDVLENHFISSYKEKSTNYVEIIKTLDEIKQRRRYV

SEQ ID NO: 58490 - DNA, 879 bp, Leishmania major
  CDS (1)..(879)
atgtcatcgagcaacgcacaggcagagctagggcccggcgggagcacgcactccatcgagttgggccgccttatctttcaaggtgcggagtcgaaggtgtattgctgcagcttctacggcgcactggctttatgcaagcatcgttttgtgaagcggtaccgcgacccaagcctcgatgagcgtctgcgtacgcaacgtacgcgtcgcgaggcacgcgccttggaacgttgcgtgaagaagggcatccgtgcaccgcgtctgttaggtgcggactacatcaacacttttcttgtcatgtcctatgaggctggcccaaccgtgaaggaggcgctcgacatcgagcacgccgcctatatgcagcaagtgtcgaagggtaaaagtacgtctgcgcagcagcagcaaccgcagaccacaccgtcgccctcggcgttgggcaacgctgcaccgtcgccggtgactgctgcccttctgcagagtattggtgtcgtggtggcgcggttgcacaacgcgaacatcgtccacggcgacctcacaacctccaactttatttgcacgtgcgacgggctcgaggcggcggcacccggtgcagatggcgcagatgccctcgcgtcgagttcgccggtgctgccaacagcggaggacattgttgttctcgactttgggctcatctccgagaagtacagcacagaggagcgcgcggtggacctctatgtgctggagcgcgccatcgcttcgacccacccgtatctctcctcttttgccagcgacattattcttgaaggctatcgcagcgccgctgacccgaagaagggagaggaggcgctgcggcgactggaggcggtgcgcgcgcgtgggcgcaagcgcaccatgatcggctag

SEQ ID NO: 58491 - protein, 292 aa, Leishmania major
MSSSNAQAELGPGGSTHSIELGRLIFQGAESKVYCCSFYGALALCKHRFVKRYRDPSLDERLRTQRTRREARALERCVKKGIRAPRLLGADYINTFLVMSYEAGPTVKEALDIEHAAYMQQVSKGKSTSAQQQQPQTTPSPSALGNAAPSPVTAALLQSIGVVVARLHNANIVHGDLTTSNFICTCDGLEAAAPGADGADALASSSPVLPTAEDIVVLDFGLISEKYSTEERAVDLYVLERAIASTHPYLSSFASDIILEGYRSAADPKKGEEALRRLEAVRARGRKRTMIG

SEQ ID NO: 58492 - DNA, 627 bp, Theileria annulata
  CDS (1)..(627)
atgtacaaggatactgaccatataatagctcagggagcagaagctgtttgtttattcgttgtcaagaaggttcagtttttgggcaaggaatgtgtattgaagagacgactgcctaagttattccgacacactgatcttgatcagagtttaactcgaagccgtatggtcgctgagtgtcggagtacatacaaattaagaaaagaaggagtttacgtacccgtgatatatcttgtagatttcttaaaaagagaaactatttatgaatacgttcaaggggatactgtaaacttttccatttctaactcaacctttaattcttaccatctcattggtgaaaatattgctttgatgcataacgccaacattatacacggagatttaaccaccaagaatatgattatgacaaacgatggactactttgtatcatagattttggcttgagctttttttctacaatatcggaggacaaagctgttgatttatacgtcttggaacgatgcttgaccccctcagagtttgagaaggttttaaactcatacaagtcagttgtttttgagtctgacgagataatacgtaaactcgaggaagttaggcttcgaggtcgtaaaagggacctcacaggataa

SEQ ID NO: 58493 - protein, 208 aa, Theileria annulata
MYKDTDHIIAQGAEAVCLFVVKKVQFLGKECVLKRRLPKLFRHTDLDQSLTRSRMVAECRSTYKLRKEGVYVPVIYLVDFLKRETIYEYVQGDTVNFSISNSTFNSYHLIGENIALMHNANIIHGDLTTKNMIMTNDGLLCIIDFGLSFFSTISEDKAVDLYVLERCLTPSEFEKVLNSYKSVVFESDEIIRKLEEVRLRGRKRDLTG

SEQ ID NO: 58494 - DNA, 714 bp, Xenopus laevis
  CDS (1)..(714)
atggaaggcgatgcagaaagcaagagcaggctgcggactcgctcgtatctggagggcttgtcgctgatgaagcagggtgccgaggccagagtttaccgggggcggtttctagggaaaaatgcggtgataaaggagaggttccccaaggcctacagacacccgactctggatgggaaactcacccataaacgcacggcccaggaggtccgctctatattaaggtgtaggagagcaggtatttcagcaccagtggtttatttcgttgactatgtttccaactgtatttaccttgaagacattgaggaatcgactactgtgagagactacatattatcgatgcagcagagtgggaaggagacaagtagcctgaatgctttggcagagaagattgggcaggtgttgggccgaatgcacgatgaggacgttgtccatggagacctcaccacgtccaacatgctcctgcgccccccgtgtgatgatctcaacctggttctgattgattttggcctcagtttcatctctgctcttccagaagataaaggggtggatctgtacgtgctggagaaggctttcctcagcacccaccccaacacagaggagaccttcaggctcctgttacaaagctactcctctacctccaaaaaatccggccccgtaataaagaaactggatgaggtgcgcctgcgcggacggaaacgctcaatggtgggatag

SEQ ID NO: 58495 - protein, 237 aa, Xenopus laevis
MEGDAESKSRLRTRSYLEGLSLMKQGAEARVYRGRFLGKNAVIKERFPKAYRHPTLDGKLTHKRTAQEVRSILRCRRAGISAPVVYFVDYVSNCIYLEDIEESTTVRDYILSMQQSGKETSSLNALAEKIGQVLGRMHDEDVVHGDLTTSNMLLRPPCDDLNLVLIDFGLSFISALPEDKGVDLYVLEKAFLSTHPNTEETFRLLLQSYSSTSKKSGPVIKKLDEVRLRGRKRSMVG

SEQ ID NO: 58496 - DNA, 1671 bp, Caenorhabditis briggsae
  CDS (1)..(1671)
atgggaaaaagcaaaaatcgcgttgtaaaaccgaaacgacgggacaagcctccaaggcagaaagatgtagaagaagaaaaggaagaagaagaagtagaagattcagaagacgctgacgacgaatccacatcagaaccaggatcagacgaagatgccacgtcatctgaagaagaagaatacgatttccccttccgtctagctatgtacgatttcaatcagtgtgatcccaaacgatgctccggaaggaaactcctgcgtgccgatttgattacagaagtgaaactgggtcaaagatttcctggattagtgttaagtcccactggaaagtacacgctggcaccgagggaccgtccgtttgtcgaacaacatggactgtgtgtagtagattgttcatggaaggaggtggagagaacaccgttgcataaagtaaaagccccggaacaccgtctcctgccttatttggtcgctgctaattcagtaaactatggaaaaccgtgccacttgacatgcgcagaagccatggccgctggtttatacattttgggattccgagaagcggctcatcgtcttatgaagcctttcacttggggggagcactttattgagctgaacaaggagttgttggagctgtatgcggcttgtaacacgccggaagaagtgatcaaggcgcagaatgagtatttggagaggattgataaggagcgggaggagcactcgagggatattgatctaccgccgagtagtagtgaggaagaggaaaccgaggaggaagctgaatttttgtttgttcttgttcttgttattcatctcgttgattctcttataaactctgtttttttttgttctttaaattcaaaaatttcagattttaagcgtttttccgctattgaatatatatttttaccatcttttgttcaattcgctagctactggctttttagatccttaaaaatgccagaaatcgaggaagaaatggatttcgagacgacaacggaggagggatttggatacgagctgaacgatattctgtatcaaggcgccgaggcaaaagtcacgaaatgtgtctggttgggacgagaggcggttatcaaagagagattctccaaagggtatcgacacccgacactcgacactcgcctcaacaaagcccgaacgaaacaggagattcgcggaatgtggaaagctcgacagctcggtgtcctggtgcccactgtctacttcatcgacgcggaaaagaaccaactgattctggagtatattaaaggaccgacagcgaaatattggatttcccaactctccagcgatgaatacgacgaaaaaatgcgcgaattcggcgcagttttgggagcgaatctggcgaaattacatctaggaggactggttcatggagatctaacgacgtcgaatatgattcttaaaaacggagaattgagtcgcttgacgttcattgattttggattatcgtcacagggaaaggtaactccagaagaaaaaggcgtggatttatacgtcttggagagagcagtcgtgagcacacatgagaatagcaaggcgctgttggaagggctcatggaaggatacaaaaaggtcaacgagaagcagttcactgccgtcgaaaagaagctggaagagatccgacttcgtggccgaaaacgggagatgatcggataa

SEQ ID NO: 58497 - protein, 556 aa, Caenorhabditis briggsae
MGKSKNRVVKPKRRDKPPRQKDVEEEKEEEEVEDSEDADDESTSEPGSDEDATSSEEEEYDFPFRLAMYDFNQCDPKRCSGRKLLRADLITEVKLGQRFPGLVLSPTGKYTLAPRDRPFVEQHGLCVVDCSWKEVERTPLHKVKAPEHRLLPYLVAANSVNYGKPCHLTCAEAMAAGLYILGFREAAHRLMKPFTWGEHFIELNKELLELYAACNTPEEVIKAQNEYLERIDKEREEHSRDIDLPPSSSEEEETEEEAEFLFVLVLVIHLVDSLINSVFFCSLNSKISDFKRFSAIEYIFLPSFVQFASYWLFRSLKMPEIEEEMDFETTTEEGFGYELNDILYQGAEAKVTKCVWLGREAVIKERFSKGYRHPTLDTRLNKARTKQEIRGMWKARQLGVLVPTVYFIDAEKNQLILEYIKGPTAKYWISQLSSDEYDEKMREFGAVLGANLAKLHLGGLVHGDLTTSNMILKNGELSRLTFIDFGLSSQGKVTPEEKGVDLYVLERAVVSTHENSKALLEGLMEGYKKVNEKQFTAVEKKLEEIRLRGRKREMIG

SEQ ID NO: 58498 - DNA, 762 bp, Homo sapiens
  CDS (1)..(762)
atggcggcggccagagctactacgccggccgatggcgaggagcccgccccggaggctgaggctctggccgcagcccgggagcggagcagccgcttcttgagcggcctggagctggtgaagcagggtgccgaggcgcgcgtgttccgtggccacttccagggccgcgcggcggtgatcaagcaccgcttccccaagggctaccggcacccggcgctggaggcgcggcttggcagacggcggacggtgcaggaggcccgggcgctcctccgctgtcgccgcgctggaatatctgccccagttgtcttttttgtggactatgcttccaactgcttatatatggaagaaattgaaggctcagtgactgttcgagattatattcagtccactatggagactgaaaaaactccccagggtctctccaacttagccaagacaattgggcaggttttggctcgaatgcacgatgaagacctcattcatggtgatctcaccacctccaacatgctcctgaaaccccccctggaacagctgaacattgtgctcatagactttgggctgagtttcatttcagcacttccagaggataagggagtagacctctatgtcctggagaaggccttcctcagtacccatcccaacactgaaactgtgtttgaagcctttctgaagagctactccacctcctccaaaaaggccaggccagtgctaaaaaaattagatgaagtgcgcctgagaggaagaaagaggtccatggttgggtag

SEQ ID NO: 58499 - protein, 253 aa, Homo sapiens [sequence omitted]

SEQ ID NO: 58500 - DNA, 762 bp, Homo sapiens
  CDS (1)..(762)
atggcggcggccagagctactacgccggccgatggcgaggagcccgccccggaggctgaggctctggccgcagcccgggagcggagcagccgcttcttgagcggcctggagctggtgaagcagggtgccgaggcgcgcgtgttccgtggccgcttccagggccgcgcggcggtgatcaagcaccgcttccccaagggctaccggcacccggcgctggaggcgcggcttggcagacggcggacggtgcaggaggcccgggcgctcctccgctgtcgccgcgctggaatatctgccccagttgtcttttttgtggactatgcttccaactgcttatatatggaagaaattgaaggctcagtgactgttcgagattatattcagtccactatggagactgaaaaaactccccagggtctctccaacttagccaagacaattgggcaggttttggctcgaatgcacgatgaagacctcattcatggtgatctcaccacctccaacatgctcctgaaaccccccctggaacagctgaacattgtgctcatagactttgggctgagtttcatttcagcacttccagaggataagggagtagacctctatgtcctggagaaggccttcctcagtacccatcccaacactgaaactgtgtttgaagcctttctgaagagctactccacctcctccaaaaaggccaggccagtgctaaaaaaattagatgaagtgcgcctgagaggaagaaagaggtccatggttgggtag

SEQ ID NO: 58501 - protein, 253 aa, Homo sapiens
MAAARATTPADGEEPAPEAEALAAARERSSRFLSGLELVKQGAEARVFRGRFQGRAAVIKHRFPKGYRHPALEARLGRRRTVQEARALLRCRRAGISAPVVFFVDYASNCLYMEEIEGSVTVRDYIQSTMETEKTPQGLSNLAKTIGQVLARMHDEDLIHGDLTTSNMLLKPPLEQLNIVLIDFGLSFISALPEDKGVDLYVLEKAFLSTHPNTETVFEAFLKSYSTSSKKARPVLKKLDEVRLRGRKRSMVG

SEQ ID NO: 58502 - DNA, 735 bp, Mus musculus
  CDS (1)..(735)
atggctggcacgtcctcggaggcggaggccgaggcgctggccgctgcgcgcgagcggagccgcctcttcctgagcggcctagagctggtgcagcagggcgccgaggcgcgcgtcttccgtggccgcttccagggccgcgcggccgtggtgaagcaccgcttcccgaagagctaccggcacccggagctggaggcgcggctcggccggcggcggacagtgcaggaggcgcgcgcgctgctccgctgccgccgtgcggggatagctgccccagtcgtcttctttgtggactatgcgtctaactgcttatatatggaagaaatcgaagactcggtgactgttcgggattatatccaatccactatggagactgaaaaggacccccagtgcctcttggacctggccaggaggatggggcaggttctggccggaatgcacgaccaagacctcattcacggggacctcaccacctccaacatgctcctgaggcggcccctggcgcagctgcacatcgtgctcatcgactttgggctgagctttgtctcaggactgccggaagataaaggcgtcgacctctatgtcctggagaaggccttcctcagcacgcacccccacaccgagaccgcgtttgaagcctttctgaagagttacggggcctcgtccaagaagtccagtccagtgctgaagaagttagatgaggtgcgcctgagagggcgaaagcggtccatggtcgggtag

SEQ ID NO: 58503 - protein, 244 aa, Mus musculus
MAGTSSEAEAEALAAARERSRLFLSGLELVQQGAEARVFRGRFQGRAAVVKHRFPKSYRHPELEARLGRRRTVQEARALLRCRRAGIAAPVVFFVDYASNCLYMEEIEDSVTVRDYIQSTMETEKDPQCLLDLARRMGQVLAGMHDQDLIHGDLTTSNMLLRRPLAQLHIVLIDFGLSFVSGLPEDKGVDLYVLEKAFLSTHPHTETAFEAFLKSYGASSKKSSPVLKKLDEVRLRGRKRSMVG

SEQ ID NO: 58504 - DNA, 26 bp, Artificial sequence
  Primer sequence
atgacgcaagaattcattgataaagt

SEQ ID NO: 58505 - DNA, 25 bp, Artificial sequence
  Primer sequence
ttatcctagcatacttctcttacga

SEQ ID NO: 58506 - protein, 375 aa, Artificial sequence
  Consensus
  Variant (2)..(3): Xaa in position 2 to 3 is any amino acid
  Variant (8)..(8): Xaa in position 8 is any amino acid
  Variant (11)..(15): Xaa in position 11 to 15 is any amino acid
  Variant (16)..(103): Xaa in position 16 to 103 is any or no amino acid
  Variant (105)..(105): Xaa in position 105 is any amino acid
  Variant (107)..(107): Xaa in position 107 is any amino acid
  Variant (109)..(110): Xaa in position 109 to 110 is any amino acid
  Variant (112)..(112): Xaa in position 112 is any amino acid
  Variant (115)..(117): Xaa in position 115 to 117 is any amino acid
  Variant (120)..(121): Xaa in position 120 to 121 is any amino acid
  Variant (123)..(125): Xaa in position 123 to 125 is any amino acid
  Variant (127)..(129): Xaa in position 127 to 129 is any amino acid
  Variant (131)..(131): Xaa in position 131 is any amino acid
  Variant (133)..(133): Xaa in position 133 is any amino acid
  Variant (135)..(135): Xaa in position 135 is any amino acid
  Variant (137)..(141): Xaa in position 137 to 141 is any amino acid
  Variant (142)..(143): Xaa in position 142 to 143 is any or no amino acid
  Variant (145)..(146): Xaa in position 145 to 146 is any amino acid
  Variant (148)..(148): Xaa in position 148 is any amino acid
  Variant (150)..(152): Xaa in position 150 to 152 is any amino acid
  Variant (154)..(156): Xaa in position 154 to 156 is any amino acid
  Variant (157)..(167): Xaa in position 157 to 167 is any or no amino acid
  Variant (169)..(169): Xaa in position 169 is any amino acid
  Variant (172)..(172): Xaa in position 172 is any amino acid
  Variant (174)..(181): Xaa in position 174 to 181 is any amino acid
  Variant (182)..(182): Xaa in position 182 is any or no amino acid
  Variant (184)..(186): Xaa in position 184 to 186 is any amino acid
  Variant (187)..(227): Xaa in position 187 to 227 is any or no amino acid
  Variant (229)..(231): Xaa in position 229 to 231 is any amino acid
  Variant (234)..(235): Xaa in position 234 to 235 is any amino acid
  Variant (238)..(238): Xaa in position 238 is any amino acid
  Variant (241)..(243): Xaa in position 241 to 243 is any amino acid
  Variant (257)..(259): Xaa in position 257 to 259 is any amino acid
  Variant (260)..(286): Xaa in position 260 to 286 is any or no amino acid
  Variant (288)..(288): Xaa in position 288 is any amino acid
  Variant (295)..(301): Xaa in position 295 to 301 is any amino acid
  Variant (302)..(306): Xaa in position 302 to 306 is any or no amino acid
  Variant (317)..(317): Xaa in position 317 is any amino acid
  Variant (320)..(321): Xaa in position 320 to 321 is any amino acid
  Variant (323)..(323): Xaa in position 323 is any amino acid
  Variant (325)..(328): Xaa in position 325 to 328 is any amino acid
  Variant (329)..(334): Xaa in position 329 to 334 is any or no amino acid
  Variant (336)..(345): Xaa in position 336 to 345 is any amino acid
  Variant (346)..(362): Xaa in position 346 to 362 is any or no amino acid
  Variant (365)..(365): Xaa in position 365 is any amino acid
  Variant (368)..(369): Xaa in position 368 to 369 is any amino acid
  Variant (372)..(372): Xaa in position 372 is any amino acid
IXXGAEAXVYXXXXXXXXXXXXXXXXXXXXXXXXXXXXXXXXXXXXXXXXXXXXXXXXXXXXXXXXXXXXXXXXXXXXXXXXXXXXXXXXXXXXXXXXXXXXXVXKXRXXKXYRXXXLDXXLXXXRXXXEXRXLXRXXXXXXXIXXPXVXXXDXXXXXXXXXXXXXXLXMEXIXXXXXXXXXIXXXXXXXXXXXXXXXXXXXXXXXXXXXXXXXXXXXXXXXXXXXXLXXXIGXXIGXLHXXXIIHGDLTTSNMLLXXXXXXXXXXXXXXXXXXXXXXXXXXXXXXLXLIDFGLXXXXXXXXXXXXEDKAVDLYVLXRAXXSXHXXXXXXXXXXLXXXXXXXXXXXXXXXXXXXXXXXXXXXVLXKLXXVRXRGR

SEQ ID NO: 58507 - protein, 40 aa, Artificial sequence
  Consensus
  Variant (2)..(3): Xaa in position 2 to 3 is any or no amino acid
  Variant (5)..(5): Xaa in position 5 is any amino acid
  Variant (8)..(10): Xaa in position 8 to 10 is any amino acid
  Variant (11)..(11): Xaa in position 11 is Ile, Leu or Val
  Variant (12)..(12): Xaa in position 12 is Asp, Glu or Asn
  Variant (13)..(14): Xaa in position 13 to 14 is any amino acid
  Variant (15)..(15): Xaa in position 15 is Ile, Leu or Met
  Variant (16)..(18): Xaa in position 16 to 18 is any amino acid
  Variant (20)..(22): Xaa in position 20 to 22 is any amino acid
  Variant (24)..(33): Xaa in position 24 to 33 is any amino acid
  Variant (34)..(34): Xaa in position 34 is Asp, Gly or Asn
  Variant (35)..(35): Xaa in position 35 is Ile, Leu or Val
  Variant (36)..(36): Xaa in position 36 is any amino acid
  Variant (37)..(37): Xaa in position 37 is Ala, Cys, Ser, Thr or Val
  Variant (39)..(39): Xaa in position 39 is any amino acid
  Variant (40)..(40): Xaa in position 40 is Ile, Leu or Val
RXXKXYRXXXXXXXXXXXRXXXEXXXXXXXXXXXXXXPXX

SEQ ID NO: 58508 - protein, 21 aa, Artificial sequence
  Consensus
  Variant (2)..(3): Xaa in position 2 to 3 is any amino acid
  Variant (4)..(4): Xaa in position 4 is Ile, Leu or Val
  Variant (5)..(5): Xaa in position 5 is Ala, Gly or Ser
  Variant (6)..(6): Xaa in position 6 is any amino acid
  Variant (7)..(7): Xaa in position 7 is Ile, Leu or Met
  Variant (9)..(13): Xaa in position 9 to 13 is any amino acid
  Variant (19)..(20): Xaa in position 19 to 20 is Ser or Thr
GXXXXXXHXXXXXHGDLTXXN

SEQ ID NO: 58509 - protein, 5 aa, Artificial sequence
  Consensus
  Artificial sequence
IDFGL

SEQ ID NO: 58510 - protein, 18 aa, Artificial sequence
  Consensus
  Variant (2)..(2): Xaa in position 2 is Ala, Asp, Glu or Asn
  Variant (3)..(3): Xaa in position 3 is any amino acid
  Variant (4)..(4): Xaa in position 4 is Ala or Gly
  Variant (8)..(8): Xaa in position 8 is any amino acid
  Variant (9)..(9): Xaa in position 9 is Leu or Val
  Variant (10)..(10): Xaa in position 10 is Phe, Leu or Met
  Variant (11)..(11): Xaa in position 11 is any amino acid
  Variant (12)..(12): Xaa in position 12 is Glu, Lys or Arg
  Variant (13)..(13): Xaa in position 13 is Ala, Cys, Ser or Thr
  Variant (14)..(14): Xaa in position 14 is Phe, Ile, Leu, Met or Val
  Variant (15)..(17): Xaa in position 15 to 17 is any amino acid
  Variant (18)..(18): Xaa in position 18 is Glu or His
EXXXVDLXXXXXXXXXXX

SEQ ID NO: 58511 - DNA, 2391 bp, Saccharomyces cerevisiae
  CDS (1)..(2391)
atggtttgctgcttatgggtgcttctagcattgttgcttcatctcgatcatgtagcatgcgaagacgatgcgtactcattcacttctaaagaacttaaggcttacaagcaggaagtgaaggagctgttttatttcggcttcgacaattatttagagcatgggtatccatatgatgaggtaaaacccatttcatgcgttcctaagaagagaaactttgaagatcctactgatcaaggcaccaacgatatattgggcaattttacaatcactttaatagattctttaaccactattgctatactggaagaccggccgcagtttttgaaagctgttcgacttgttgaaaggacatttcctgatggcaatttcgatattgattccacaatacaagtttttgaaattactatacgtgttatcggatcactactatcatcacatctttatgctacggatcccacaaaggcagtgtatttaggggacgattatgatggctcactgttacgtctcgcccagaatatggcagataggctcttacctgcatatttaacgtctaccggattacctatgccacggagaaacatcaaacgaaaatgggatgtctctgaatttccagaatttttggagacagagaataatgtggccgctatggcgtctcccatgttcgaattcactattttatcttacttgacaggcgatcccaagtatgagaaagttaccagatacgcatttgataaaacatggtctcttagaactggtttggatttgctacccatgtcctttcaccccgaaaaactaacaccatatacgcccatgactggaatcggcgcctccatcgactcccttttcgaatacgctttgaaaggtgctattttatttgatgattcagaattaatggaagtttggaacgtagcatacgaggcattaaagactaactgtaaaaacgattggttttttgctaatgtaatggctgacacagggcatttgtttgttccctggattgattctttgagtgcttttttctccggtttacaggtgcttgctggtgatttggatgatgccatagcgaaccatttaatgtttttaaaaatgtggaacacctttggcggtattcctgaaaggtggaactttagtcctccggagtttcccccactatctccattagagcgatcgggagctgttgctttggataatatcctccccttagaatggtacccattaagaccggaattttttgagtcaacctatttcttatatagagctacaaaagacccgttttacttaaatattggggtacatctgctaaaagacctcaagcaacgatttaagtctaactgcggatttgcaggtttccaaaatgtaatcacgggcgaactgcaagatagaatggaaacatttgtgttgagtgaaactttgaaatacctgtatttattatttgatgaagagaacgaattacataacagcgctagtgacgtaattttcagtacagaagcccatccaatgtggttgccccaagaagtgaggtccaactataaacgtaacgctaaatttaacaactctgtctactcgtcgcacttggaaatttgccagaaaaaggacagggaacaagctggagagaacacattgagccaaagaattgtggggttcgccaaatcgatctttcataaaggtccaccagacgaagaggctactgatccaattatagactataccattgatactgaacttcccggtacatgctctataaagcctcatcatgtaattggtgacgaattttggtattctccaatgttgagcaattttgacagattattcgagattgactcccggttcgctgccacgctaattaaaccttcacacatgcataactataatgcaattgaactagaacctggattttataacaggtggtccaatccgcaatttagcacgtgcctgatcccacccaccaccgaaattttcgaactactattcgaccttcctggatatcatcagttgaatccattaatgttagaaaacaaaactattacatttgaaacctttggaggtaggtcaaggttgaagatcgaaaaattgcaaatctaccaaattgattactatggagacttaatcactgcatcgacattccaagacgtctcccgcaaggatattttctcgaatgcatgcgatgcagtggcaagcttgtattctcccacttatctttacagagtagtagccatcaacggacgcatattgcctcgccatggaagtgtacaaatcaagaaacatagtcctgtgctcacttccaatggcacaagagaggaagacgaattcaaaatggatggcatcgggattaatgaccattcccaactcatgttagaatgcacgcccatcatcaacttatttattgtatga

SEQ ID NO: 58512 - protein, 796 aa, Saccharomyces cerevisiae
MVCCLWVLLALLLHLDHVACEDDAYSFTSKELKAYKQEVKELFYFGFDNYLEHGYPYDEVKPISCVPKKRNFEDPTDQGTNDILGNFTITLIDSLTTIAILEDRPQFLKAVRLVERTFPDGNFDIDSTIQVFEITIRVIGSLLSSHLYATDPTKAVYLGDDYDGSLLRLAQNMADRLLPAYLTSTGLPMPRRNIKRKWDVSEFPEFLETENNVAAMASPMFEFTILSYLTGDPKYEKVTRYAFDKTWSLRTGLDLLPMSFHPEKLTPYTPMTGIGASIDSLFEYALKGAILFDDSELMEVWNVAYEALKTNCKNDWFFANVMADTGHLFVPWIDSLSAFFSGLQVLAGDLDDAIANHLMFLKMWNTFGGIPERWNFSPPEFPPLSPLERSGAVALDNILPLEWYPLRPEFFESTYFLYRATKDPFYLNIGVHLLKDLKQRFKSNCGFAGFQNVITGELQDRMETFVLSETLKYLYLLFDEENELHNSASDVIFSTEAHPMWLPQEVRSNYKRNAKFNNSVYSSHLEICQKKDREQAGENTLSQRIVGFAKSIFHKGPPDEEATDPIIDYTIDTELPGTCSIKPHHVIGDEFWYSPMLSNFDRLFEIDSRFAATLIKPSHMHNYNAIELEPGFYNRWSNPQFSTCLIPPTTEIFELLFDLPGYHQLNPLMLENKTITFETFGGRSRLKIEKLQIYQIDYYGDLITASTFQDVSRKDIFSNACDAVASLYSPTYLYRVVAINGRILPRHGSVQIKKHSPVLTSNGTREEDEFKMDGIGINDHSQLMLECTPIINLFIV

SEQ ID NO: 58513 - DNA, 1731 bp, Rattus norvegicus
  CDS (1)..(1731)
atgcctttccggctgcttatcccgctcggcctcgtgtgcgtgctgctgcccctgcaccatggtgcgccaggccccgaaggcaccgcgcccgaccccgcccactacagggagcgagtcaaggccatgttctaccacgcctacgacagttacctggaaaatgcctttccctacgatgagctgagacctctcacctgtgacgggcacgacacctggggcagtttttctctgacactgattgatgccctggacaccttgctgattttggggaatacctctgaattccaaagagtggtggaggttctccaggacaacgtggactttgatatcgacgtcaatgcctctgtgttcgaaaccaacatccgagtggtaggaggactcctttctgctcacctcttgtcaaagaaggctggtgtggaggtggaagctggatggccttgttctggacctctcctcaggatggcggaggaagcagcccgaaaactcctcccagcgtttcagacccccacgggcatgccctatggaactgtgaacctgcttcatggcgtgaaccctggagagactcctgttacctgtacagcagggattgggaccttcattgtggaatttgctaccctgagcagcctcaccggtgaccctgtgtttgaagatgtggccagagtggccctgatgcgcctctgggagagccggtcagatattgggctggtcggcaatcacatcgatgtgctcactggcaaatgggtggctcaggacgcaggcatcggggctggtgtggattcctattttgagtacctggtaaaaggagccatcctccttcaggataagaagctcatggccatgtttctagagtacaacaaagccatccggaattacacgcacttcgatgactggtacctctgggtgcagatgtacaaggggaccgtgtccatgcctgtcttccagtccttggaggcctactggcctggtcttcagagccttattggggatattgacaatgccatgagaaccttcctcaactactacactgtatggaagcagtttggggggctgccagaattctacaacattcctcagggatacacagtggagaagcgagaaggctacccactccgaccggagctcatcgagagcgcaatgtacctctaccgtgccacaggggatcccactctcttagaactggggagagatgctgtggagtccattgagaaaatcagcaaggtggagtgcgggttcgccacgatcaaggacctccgggatcacaaacttgacaaccgcatggagtctttcttcctggccgagactgtgaaatacctctaccttctgtttcacccaaacaacttcatccacaacaatggctccacttttgactctgtgatgaccccccatggggagtgcatcctgggagctgggggctacatcttcaacacggaagctcaccccatcgaccctgccgccttgcactgttgccggaggctgaaggaagagcagtgggaagtggaggacttgataaaggagttctactctctcagacagagcaggtcaagagctcagagaaagacagtgagttcggggccctgggagcccccagcagggccaggcacactctcctcacctgaaaaccagcccagggagaagcagcctgccaggcagagagccccgctcctcagctgccccagccagcccttcacttctaaactggccctgctaggccaggttttcctagactcctcataa

SEQ ID NO: 58514 - protein, 576 aa, Rattus norvegicus
MPFRLLIPLGLVCVLLPLHHGAPGPEGTAPDPAHYRERVKAMFYHAYDSYLENAFPYDELRPLTCDGHDTWGSFSLTLIDALDTLLILGNTSEFQRVVEVLQDNVDFDIDVNASVFETNIRVVGGLLSAHLLSKKAGVEVEAGWPCSGPLLRMAEEAARKLLPAFQTPTGMPYGTVNLLHGVNPGETPVTCTAGIGTFIVEFATLSSLTGDPVFEDVARVALMRLWESRSDIGLVGNHIDVLTGKWVAQDAGIGAGVDSYFEYLVKGAILLQDKKLMAMFLEYNKAIRNYTHFDDWYLWVQMYKGTVSMPVFQSLEAYWPGLQSLIGDIDNAMRTFLNYYTVWKQFGGLPEFYNIPQGYTVEKREGYPLRPELIESAMYLYRATGDPTLLELGRDAVESIEKISKVECGFATIKDLRDHKLDNRMESFFLAETVKYLYLLFHPNNFIHNNGSTFDSVMTPHGECILGAGGYIFNTEAHPIDPAALHCCRRLKEEQWEVEDLIKEFYSLRQSRSRAQRKTVSSGPWEPPAGPGTLSSPENQPREKQPARQRAPLLSCPSQPFTSKLALLGQVFLDSS

SEQ ID NO: 58515 - DNA, 1668 bp, Xenopus tropicalis
  CDS (1)..(1668)
atggttacgatattgtacccactttatctgggtatccttggtgccctgctgccaggctatcatgccagggaccgggggctcacggaggaggaaatggcccaatacagggatcgggtgaaatccatgttttatcacgcgtacaacaactacttggaccatgccttcccctacgatgaactgcgccccctcacctgtgatggacaagatacctggggaagtttctccctgactctaattgatgcgttagacaccttactgattattggaaacgtcaccgagttccagagagtagtaaatgtcctgcaggatactttggattttgacattgatgtcaatgcttcagtcttcgagaccaacatccgagttgtgggtggtctcttgtctgctcaccttttctccaaaagagccggcctggaactggaaccggggtggccttgcactggccccctacttcgcatggcagaagaggctgctcgcaaactccttccagcgtttgacacagccacagggatgccttacgggacagtcaacctgctgagaggtgttaaccctacagagacccccgtgacatgcacagccggcgtcggaacatttattgtggagtttgccactctgagtcgccttacaggagacccacagtttgagatggtggcaagaagagccctcagaggattgtgggagagcaggtctgatattgggctggtaggaaaccatgtagacgtcatgacctccaagtgggtagctcaggatgctggaatcggggccggcgttgattcctactttgaatatctggtgaaaggggcgatcctgctgcaggacgaggaattaatgtctatgtttcttgaatacaacaaggccctccagaacttcaccaaatacgacgactggtatgtgtgggttcagatgtataagggcacggtcactatgcccgttttccaatcactggaagccttttggccaggattacagagtttagtgggagatatcagaagtggaatgagatcattcctcaattactacacagtatggaggcagtttggtgggttaccggaattttacagcattcctcagggatttaccgtggagaaaagagagggctaccccctccggccggagctgattgagagcgcaatgtatctgtacaaggcgaccagagatccaattctgttagagctgggaagagatgccgtggagtccattgaaaggataagcaaagtggactgtggatttgcaacgatcaaagacgttcgagatcacaagctggataaccgcatggagtctttcttcctggccgaaaccatcaagtacctctatttgctgtttgacccagacaactttatccacaatgatggctccacctctgatctggtggtgactccatacggggagtgcgtcatgggggcaggcggctacgtcttcaacaccgaggcccaccctatagaccctgctgcgctgcactgctgtaagagggactctgctgagcagtgggaagtggaagacctggtgagggagtttttctccatcaagagcagcagtaatcctaaggcacaacaacataggccagactctcagaacagaaacaaaagcaaaagaacctctaagctcagctgcccaagccagccattcacttcgaaactttccatccttgggcaggtttttcttgattga

SEQ ID NO: 58516 - protein, 555 aa, Xenopus tropicalis
MVTILYPLYLGILGALLPGYHARDRGLTEEEMAQYRDRVKSMFYHAYNNYLDHAFPYDELRPLTCDGQDTWGSFSLTLIDALDTLLIIGNVTEFQRVVNVLQDTLDFDIDVNASVFETNIRVVGGLLSAHLFSKRAGLELEPGWPCTGPLLRMAEEAARKLLPAFDTATGMPYGTVNLLRGVNPTETPVTCTAGVGTFIVEFATLSRLTGDPQFEMVARRALRGLWESRSDIGLVGNHVDVMTSKWVAQDAGIGAGVDSYFEYLVKGAILLQDEELMSMFLEYNKALQNFTKYDDWYVWVQMYKGTVTMPVFQSLEAFWPGLQSLVGDIRSGMRSFLNYYTVWRQFGGLPEFYSIPQGFTVEKREGYPLRPELIESAMYLYKATRDPILLELGRDAVESIERISKVDCGFATIKDVRDHKLDNRMESFFLAETIKYLYLLFDPDNFIHNDGSTSDLVVTPYGECVMGAGGYVFNTEAHPIDPAALHCCKRDSAEQWEVEDLVREFFSIKSSSNPKAQQHRPDSQNRNKSKRTSKLSCPSQPFTSKLSILGQVFLD

SEQ ID NO: 58517 - DNA, 1851 bp, Gallus gallus
  CDS (1)..(1851)
atgcaatggcgctcgctggtgctggggctgctgctgctgaggctggggctgcacgcgctgctggcgctgctccccgcgctggcgcccggcctctgcctgcgcctccgcctcccgttccccttcccgccgcgttccgccgccctcggccctcccggcgccgcgcggccgctgcccggcgggggctcctcgcattggggttcgctgcggggcggcggcggcgcggcggggcgcgatgagtacgagacgcgctacagcgccgcgttccccccgcagctgcgggcccggctgcgcgacgccgcccgcggtatgttcgccttcggctacgacagctacatgcagcacgccttccccagcgacgagctcgaccccctgcactgctgcggccgcgggcccgaccgcgacgacccttcgaatctgaacatcaacgatgtcttagggaactactcgctgacgctgatagatgcactggataccctagcggtgatgggaaattcttccgagttccagaaggcggtgaagctggtgattgacacagtttcatttgacaaagactcaacagtccaagtttttgaggcaaccatcagggttttgggaagcctgctttctgcccacataataattacagatgccaaacagccttttggtgatatgaccattaaggattatgacaacgaactgctgcacatggctcatgacctagcagtgagactgctcccagcatttgagaacaccaaaactggaattccgtatcctcgggtcaacctgaagaagggagttcctccaaacagcaataatgaaacttgcactgcaggagccggttccttgttggtagagtttggtattctgagcaggctgctcggcgattccacatttgaatgggtggccaggagagcagtcaaagcactctggagtctcaggagtaacaacactggactgctaggaaatgttgtgaatattcaaactggccattgggttggaaagcagagtggcttgggggcaggatcagattcgttttatgaatacctcctgaagtcctacatcctctttggagagaaggaagacttagagatgttcatcgatgcttatcagaacattcagaaccacttacgaaggggtcgagaagcttgcaatgaaggtgaaggtgacccgcctttgtatgttaatgtaaacatgttcactggacagctgatgaacacatggattgactccttgcaagccttttttcctggactgcaggtgttgataggagacgtagaagatgctatttgcctccatgctttttattatgccatatggaaacgatatggagccctcccagaaaggtacaactggcaattgcaagcaccggatgttcccttttatccactgaggccggagttagtggaatccacatatcttctttaccaggccacaaagaacccattttaccttcatgtgggaatggatattctacagagtttggaaaaatacacaaaagcgaagtgtggctatgctacattacaccatgtggtggagaagacaaaagaagatcgaatggagagcttttttctcagtgaaacatgtaaatatttgtacctgttgtttgatgaagacaatccagtgcataagtctggaaataaatatatgtttactactgagggacatattgtgtctgtggatgaacgttttcggaactcgctgtggcaagatatcctccctggggaggagggcacagaaaaagttaagcctaacgaattaaaggccgtcaacttcagttctaattgtaacagagttccggatgagaggagatacttgctgccgttgaagagcaactacatgagacagatcgatcggatggtgggcttgatctga

SEQ ID NO: 58518 - protein, 616 aa, Gallus gallus
MQWRSLVLGLLLLRLGLHALLALLPALAPGLCLRLRLPFPFPPRSAALGPPGAARPLPGGGSSHWGSLRGGGGAAGRDEYETRYSAAFPPQLRARLRDAARGMFAFGYDSYMQHAFPSDELDPLHCCGRGPDRDDPSNLNINDVLGNYSLTLIDALDTLAVMGNSSEFQKAVKLVIDTVSFDKDSTVQVFEATIRVLGSLLSAHIIITDAKQPFGDMTIKDYDNELLHMAHDLAVRLLPAFENTKTGIPYPRVNLKKGVPPNSNNETCTAGAGSLLVEFGILSRLLGDSTFEWVARRAVKALWSLRSNNTGLLGNVVNIQTGHWVGKQSGLGAGSDSFYEYLLKSYILFGEKEDLEMFIDAYQNIQNHLRRGREACNEGEGDPPLYVNVNMFTGQLMNTWIDSLQAFFPGLQVLIGDVEDAICLHAFYYAIWKRYGALPERYNWQLQAPDVPFYPLRPELVESTYLLYQATKNPFYLHVGMDILQSLEKYTKAKCGYATLHHVVEKTKEDRMESFFLSETCKYLYLLFDEDNPVHKSGNKYMFTTEGHIVSVDERFRNSLWQDILPGEEGTEKVKPNELKAVNFSSNCNRVPDERRYLLPLKSNYMRQIDRMVGLI

SEQ ID NO: 58519 - DNA, 1977 bp, Mus musculus
  CDS (1)..(1977)
atgtacccaccgccggcgccgccgccggcgcctcaccgggacttcatctcggtgacgctgagcctgggcgagagctacgacaacagcaagagccggcggcggcgctcatgctggaggaaatggaagcagctttcgaggctacagcggaatgtgattctcttcgtcttgggctttctgattctctgtggattcctgtactctcttcatacggctgaccagtggaaagctctgagtggcagacctgcagaagtagagaagatgaagcaagaagtcctgcctgtcttaccagcgcctcagaaggaaagtgctgaacaagaagggtttgcagacatactctctcagaagcggcaaaggcattttcggcggggccctccccatctgcagattagaccccccaacacagtctccaaggatgggatgcaggatgatgctaaggagagagaagcagccctggggaaggctcagcaggaagaaaacacacagagaaccgtcatcagctggcggggagccgtgattgagcctgaacaggccactgaacttccttacaaaagagctgaagcctccatcaaacctctggttttggcatccaagatatggaaagagccagcccccccgaatgagcgccagaagggagtgattgaggcctttctccatgcttggaagggttaccaaaagtttgcttggggccatgatgaactaaaacctgtgtccaaaaccttcagtgagtggtttggcctgggcctcaccctgatcgatgccttggataccatgtggattttgggtctgaagcaagaatttaagcaagccaggaaatgggtatcagagaacttagactttcagaagaatgttgatgtcaacctgtttgagagcaccattcgcatcttagggggcctgctgagtacctaccacctgtcgggggacagcctcttcctgaccaaagctgaagattttggaaaacggctgatgcctgccttcactacgccctccaagatcccatactctgatgtgaacattggcactggatttgcccactcaccccagtggacttcagacagcacggtggcagaagtgacgagcattcagttggagttccgggagctctctcgtcttactggaataaagaaattccaggaggccgtggaggaagtgacaaagcacatccactccctgtctgggaagaaagacgggctggtgcctatgttcatcaacacgaacagcggcctcttcacccacccaggagtgttcaccttgggggccagggctgacagctactacgaatacctgctgaaacagtggatccagggtggcaagaaggagacacagttgctggaagactatgttaaagccattgaggggataaaagcccatctgctccggcagtctcagcccagaaagctcaccttcgtgggagaacttgcccacggccgcttcagtgccaagatggaccacttagtgtgcttcctgccggggacgctggctttgggtgtccaccatggcctgccagctgaccacatggatctagctcgggccctcatggagacctgctaccagatgaaccaacagatggagacaggtctgagccctgagattgcacatttcaacatgtaccctcgggcagatcataaagatgtggaggtcaagccagctgacaggcacaacctgctgcggccagagacggtggaaagcctattctatctgtaccgtgtcacaagggaccgcaagtaccaggactggggctgggaaatcctgcagagcttcaataagtacacacgggtcccctcaggtggctattcttctatcaacaacgtccagaattcccacaagcctgagcccagggacaagatggagagcttctttgtgggggaaaccctgaagtacttgtacctgctcttttctgatgacctggagctgctcagtctggacagctgtgtgttcaacacagaagcccatcccctccccatctgggctcctgcgtag

SEQ ID NO: 58520 - protein, 658 aa, Mus musculus
MYPPPAPPPAPHRDFISVTLSLGESYDNSKSRRRRSCWRKWKQLSRLQRNVILFVLGFLILCGFLYSLHTADQWKALSGRPAEVEKMKQEVLPVLPAPQKESAEQEGFADILSQKRQRHFRRGPPHLQIRPPNTVSKDGMQDDAKEREAALGKAQQEENTQRTVISWRGAVIEPEQATELPYKRAEASIKPLVLASKIWKEPAPPNERQKGVIEAFLHAWKGYQKFAWGHDELKPVSKTFSEWFGLGLTLIDALDTMWILGLKQEFKQARKWVSENLDFQKNVDVNLFESTIRILGGLLSTYHLSGDSLFLTKAEDFGKRLMPAFTTPSKIPYSDVNIGTGFAHSPQWTSDSTVAEVTSIQLEFRELSRLTGIKKFQEAVEEVTKHIHSLSGKKDGLVPMFINTNSGLFTHPGVFTLGARADSYYEYLLKQWIQGGKKETQLLEDYVKAIEGIKAHLLRQSQPRKLTFVGELAHGRFSAKMDHLVCFLPGTLALGVHHGLPADHMDLARALMETCYQMNQQMETGLSPEIAHFNMYPRADHKDVEVKPADRHNLLRPETVESLFYLYRVTRDRKYQDWGWEILQSFNKYTRVPSGGYSSINNVQNSHKPEPRDKMESFFVGETLKYLYLLFSDDLELLSLDSCVFNTEAHPLPIWAPA

SEQ ID NO: 58521 - DNA, 1737 bp, Homo sapiens
  CDS (1)..(1737)
atgcctttccggctgctcatcccgctcggcctcctgtgcgcgctgctgcctcagcaccatggtgcgccaggtcccgacggctccgcgccagatcccgcccactacagggagcgagtcaaggccatgttctaccacgcctacgacagctacctggagaatgcctttcccttcgatgagctgcgacctctcacctgtgacgggcacgacacctggggcagtttctctctgactctaattgatgcactggacaccttgctgattttggggaatgtctcagaattccaaagagtggttgaagtgctccaggacagcgtggactttgatattgatgtgaacgcctctgtgtttgaaacaaacattcgagtggtaggaggactcctgtctgctcatctgctctccaagaaggctggggtggaagtagaggctggatggccctgttccgggcctctcctgagaatggctgaggaggcggcccgaaaactcctcccagcctttcagacccccactggcatgccatatggaacagtgaacttacttcatggcgtgaacccaggagagacccctgtcacctgtacggcagggattgggaccttcattgttgaatttgccaccctgagcagcctcactggtgacccggtgttcgaagatgtggccagagtggctttgatgcgcctctgggagagccggtcagatatcgggctggtcggcaaccacattgatgtgctcactggcaagtgggtggcccaggacgcaggcatcggggctggcgtggactcctactttgagtacttggtgaaaggagccatcctgcttcaggataagaagctcatggccatgttcctagagtataacaaagccatccggaactacacccgcttcgatgactggtacctgtgggttcagatgtacaaggggactgtgtccatgccagtcttccagtccttggaggcctactggcctggtcttcagagcctcattggagacattgacaatgccatgaggaccttcctcaactactacactgtatggaagcagtttggggggctcccggaattctacaacattcctcagggatacacagtggagaagcgagagggctacccacttcggccagaacttattgaaagcgcaatgtacctctaccgtgccacgggggatcccaccctcctagaactcggaagagatgctgtggaatccattgaaaaaatcagcaaggtggagtgcggatttgcaacaatcaaagatctgcgagaccacaagctggacaaccgcatggagtcgttcttcctggccgagactgtgaaatacctctacctcctgtttgacccaaccaacttcatccacaacaatgggtccaccttcgacacggtgatcaccccctatggggagtgcatcctgggggctggggggtacatcttcaacacagaagctcaccccatcgaccctgccgccctgcactgctgccagaggctgaaggaagagcagtgggaggtggaggacttgatgagggaattctactctctcaaacggtgcaggtcgaaatttcagaaaaacactgttagttcggggccatgggaacctccagcaaggccaggaacactcttctcaccagaaaaccatgaccaggcaagggagaggaagcctgccaaacagaaggtcccacttctcagctgccccagtcagcccttcacctccaagttggcattactgggacaggttttcctagactcctcataa

SEQ ID NO: 58522 - protein, 578 aa, Homo sapiens
MPFRLLIPLGLLCALLPQHHGAPGPDGSAPDPAHYRERVKAMFYHAYDSYLENAFPFDELRPLTCDGHDTWGSFSLTLIDALDTLLILGNVSEFQRVVEVLQDSVDFDIDVNASVFETNIRVVGGLLSAHLLSKKAGVEVEAGWPCSGPLLRMAEEAARKLLPAFQTPTGMPYGTVNLLHGVNPGETPVTCTAGIGTFIVEFATLSSLTGDPVFEDVARVALMRLWESRSDIGLVGNHIDVLTGKWVAQDAGIGAGVDSYFEYLVKGAILLQDKKLMAMFLEYNKAIRNYTRFDDWYLWVQMYKGTVSMPVFQSLEAYWPGLQSLIGDIDNAMRTFLNYYTVWKQFGGLPEFYNIPQGYTVEKREGYPLRPELIESAMYLYRATGDPTLLELGRDAVESIEKISKVECGFATIKDLRDHKLDNRMESFFLAETVKYLYLLFDPTNFIHNNGSTFDTVITPYGECILGAGGYIFNTEAHPIDPAALHCCQRLKEEQWEVEDLMREFYSLKRCRSKFQKNTVSSGPWEPPARPGTLFSPENHDQARERKPAKQKVPLLSCPSQPFTSKLALLGQVFLDSS

SEQ ID NO: 58523 - DNA, 1683 bp, Arabidopsis thaliana
  CDS (1)..(1683)
atggcgagaagtagatcgattagtggttatgggatatggaaatatttgaatcctgcgtattatcttagaagaccgagacgtttggctttgcttttcattgtcttcgtctctgtttctatgcttgtctgggatcgtattaatcttgcccgagaacatgaggttgaagtttttaagctaaatgaagaagtttcacggttggagcagatgttagaagagcttaatggtggtgttggcaataagcctttgaagactctgaaggatgccccagaagatccagttgataaacagcgaaggcagaaagtaaaagaggcaatgatccatgcttggagctcttatgaaaagtatgcatgggggaaagatgagcttcagcctcggacaaaagatggcactgatagctttggtggccttggagcaactatggtagattctttagatacactctatataatgggtctagatgagcagtttcaaaaagccagagagtgggttgcaagctcattggatttcgacaaggattatgacgccagtatgtttgagacaaccataagagttgtaggcggacttcttagtgcgtatgatctttctggggacaaaatgttccttgaaaaggctaaggatattgcagacagattattgcctgcatggaatactccaacgggtataccttacaatattatcaacttgagaaatggaaatgctcacaatccttcatgggcggcagggggagacagtattctcgcagactccggcactgagcagctcgagtttattgccctttcccaaaggacaggggacccaaaatatcagcagaaggtagagaaggttattacagaactgaataagaactttcctgctgatggtttacttcccatctatataaatccggataatgctaatccatcgtactctaccacaacatttggtgccatgggagatagcttttatgagtatttgctcaaagtttgggtgcaagggaacaaaacatctgccgtgaaaccctatagagatatgtgggagaaatcaatgaaaggtttgttaagcttggtcaagaaatcaacaccttcatcatttacgtatatatgtgagaagaacggaaataatttgattgataagatggatgaattggcgtgctttgctcctggaatgttggctttaggagcttcaggttatggccctgatgaagaaaaaaagtttctttcacttgctggagagcttgcctggacttgttataacttttaccaatcgacaccaacgaaacttgctggagagaactatttcttcactgcagggcaggacatgagtgttggcacatcttggaacattttaagaccagaaaccgttgaatcactgttttacctctggcgattaactgggaacaagacatatcaagagtggggatggaatatatttcaagcatttgagaagaactctcgcgtagaatctggatatgtaggcttgaaggatgtcaatacaggtgctaaagacaacaagatgcaaagcttcttcttagctgagactcttaagtatctatatcttctcttttcgccttcatctgttatttcattagacgagtgggttttcaacacagaagcccatccgcttaagattgtggcacggaatgatccgcgtaagccaactatagcactacgccagaggaagtttggtcatcagattaacgtttag

SEQ ID NO: 58524 - protein, 560 aa, Arabidopsis thaliana
MARSRSISGYGIWKYLNPAYYLRRPRRLALLFIVFVSVSMLVWDRINLAREHEVEVFKLNEEVSRLEQMLEELNGGVGNKPLKTLKDAPEDPVDKQRRQKVKEAMIHAWSSYEKYAWGKDELQPRTKDGTDSFGGLGATMVDSLDTLYIMGLDEQFQKAREWVASSLDFDKDYDASMFETTIRVVGGLLSAYDLSGDKMFLEKAKDIADRLLPAWNTPTGIPYNIINLRNGNAHNPSWAAGGDSILADSGTEQLEFIALSQRTGDPKYQQKVEKVITELNKNFPADGLLPIYINPDNANPSYSTTTFGAMGDSFYEYLLKVWVQGNKTSAVKPYRDMWEKSMKGLLSLVKKSTPSSFTYICEKNGNNLIDKMDELACFAPGMLALGASGYGPDEEKKFLSLAGELAWTCYNFYQSTPTKLAGENYFFTAGQDMSVGTSWNILRPETVESLFYLWRLTGNKTYQEWGWNIFQAFEKNSRVESGYVGLKDVNTGAKDNKMQSFFLAETLKYLYLLFSPSSVISLDEWVFNTEAHPLKIVARNDPRKPTIALRQRKFGHQINV

SEQ ID NO: 58525 - DNA, 1875 bp, Arabidopsis thaliana
  CDS (1)..(1875)
atggactcaaatttcaagtggcttttgtttgccatcttgatctctctgacattttcgggttttgttcttcaccatggagttctcgctgaaagtgttaagcctgatgaagctaaacagcttagagacgaggtacgtgggatgttttatcatgcctttgatggatatatgaacaatgcgtttccactcgatgaattgagaccgttatcttgccaaggagaagatactcttggaggctatgcgttgactctgattgactcgttggatacattagctttacttggtgaccgagagcgcttcacttcttctgttgaatggattggtaaaaatcttcagtttaatataaataaaacagtctctgtgtttgagacaactatccgagtccttggggggttactatctgctcatctgattgcaagtgattatgcaacgggcatgagaattccatcttacaacaatgaattactagttttggctgagaatttggcacggagaatgcttcctgcatttgatacaccgactggaatcccatttggatctgtgaatttgatgtacggtgttgacaaacatgaaagcaagataacatcaactgccggtggtggtactttgtctttagagtttggcgtgcttagtcgtttaacaaatgatcctgttttcgaacaagttgcaaagaatgcggtgaggggactatgggcacgtcgttcaaatctcgacttggttggtgctcacatcaatgtctttacaggtgaatggacacagaaggatgctggtataggaacaagcattgattccttctatgagtatctactcaaggcttatatactatttggggatgaggaatatctatacatttttcaagaagcttatagatctgcaatgcagtaccttcacaaggatccttggtatgtagaagtcaatatggattccgcagctattgtctggccagtatttaacagccttcaagctttctggccaggacttcaggttttagctggagacgttgatccagcaataagaactcacactgccttctttagcgtctggaaacgatatggtttcacccctgagggttttaatcttgctacacttagtgtccagtatgggcaaaagagttatcccttaaggccggaattaatcgagagtacatactggttgtacaaagctaccagagatcccaggtatcttgatgcaggacgtgactttgtggctagtttgcaatacggggcaaaatgtccttgcggttattgtcacatcacagatgtagaactgcataaacaagaagatcacatggagagcttcttcctcgcagaaacggtgaagtacttatggctactctttgacttagctgttgactcggataacctcgtagacaatggcccttacaagtacatcttcagtactgagggtcatctcttaccaataacaccacaaatatctctagctcgggaacattgctcttactttggtggatactgtccaagcaattccacaaaactagaacaagaagtccttggagaagacagtagtaacgatgatcacagtaacgattatccttaccacgaatcttttccagttaccggtttgataaagggtttatgtccaggactaacacatgctcagaaatatggtttttcgtatgttctaccggagaagacagatcgtgaagatgttaatcaacctaaaccggtagttacaagcagttcaattgtgttaatctcggatcaaacagtggagaagagaccacaggaagaagaaggatttacttctcagtctgaaccaataatgacaatctctggtggtagtagcaacgaccaaacaggtcaagagctaaccttgttagagtcagaaactgatgatcaaagatcatactcttcttaa

SEQ ID NO: 58526 - protein, 624 aa, Arabidopsis thaliana
MDSNFKWLLFAILISLTFSGFVLHHGVLAESVKPDEAKQLRDEVRGMFYHAFDGYMNNAFPLDELRPLSCQGEDTLGGYALTLIDSLDTLALLGDRERFTSSVEWIGKNLQFNINKTVSVFETTIRVLGGLLSAHLIASDYATGMRIPSYNNELLVLAENLARRMLPAFDTPTGIPFGSVNLMYGVDKHESKITSTAGGGTLSLEFGVLSRLTNDPVFEQVAKNAVRGLWARRSNLDLVGAHINVFTGEWTQKDAGIGTSIDSFYEYLLKAYILFGDEEYLYIFQEAYRSAMQYLHKDPWYVEVNMDSAAIVWPVFNSLQAFWPGLQVLAGDVDPAIRTHTAFFSVWKRYGFTPEGFNLATLSVQYGQKSYPLRPELIESTYWLYKATRDPRYLDAGRDFVASLQYGAKCPCGYCHITDVELHKQEDHMESFFLAETVKYLWLLFDLAVDSDNLVDNGPYKYIFSTEGHLLPITPQISLAREHCSYFGGYCPSNSTKLEQEVLGEDSSNDDHSNDYPYHESFPVTGLIKGLCPGLTHAQKYGFSYVLPEKTDREDVNQPKPVVTSSSIVLISDQTVEKRPQEEEGFTSQSEPIMTISGGSSNDQTGQELTLLESETDDQRSYSS

SEQ ID NO: 58527 - DNA, 1623 bp, Caenorhabditis elegans
  CDS (1)..(1623)
atgggcctccgatcacacgaacaacttgtcgtgtgtgtcggagttatgtttcttctgactgtctgcatcacagcgtttttctttcttccgtcaggcggcgctgatctgtatttccgagaagaaaactccgttcacgttagagatgtgcttatcagagaggaaattcgtcgtaaagagcaagatgagttacggcggaaagccgaagaagccaatcccattccaattccaaaacctgaaattggagcatcagatgatgcagaaggacgaagaattttcgtgaaacaaatgattaaattcgcatgggacggatatcggaaatatgcctggggggagaatgaattgaggcccaacagtagatcaggacattcttcatcgatatttgggtatggaaagacgggtgcaacaattattgatgctattgatacattgtatttggttggattaaaagaagaatataaagaggccagagactggattgctgattttgatttcaaaacgtctgcgaaaggagatctatcagtttttgaaacaaatatccgattcactggtggcctactctccgcatttgcacttaccggagacaaaatgttcttgaagaaagcagaagatgtggcaactattcttcttccggcttttgaaactccttctggaataccaaattcattaattgatgctcaaacaggaagatccaaaacgtatagttgggcaagcggaaaggcaattctctcggaatacggttcaattcaacttgaattcgattatctctccaatctgactggaaatccagtttttgctcaaaaagctgataaaataagagatgttttaactgcaatggagaaaccagaaggactttatccaatttatattactatggataatccaccaagatggggacaacatcttttctcaatgggtgcaatggctgacagttggtatgaatatctgctcaaacaatggattgccactggtaaaaaagatgatcgcacgaaaagagaatacgaagaagcgatatttgcaatggaaaaacgaatgcttttcaaatcggaacagtcgaatctttggtatttcgcaaaaatgaacggaaatcgcatggaacattcatttgaacatcttgcatgcttttccggtggaatggttgttcttcatgcaatgaatgagaaaaataaaacaatatcagatcattatatgacgttgggaaaagaaattggtcatacatgtcatgaatcgtacgctagatccacaactggaatcggcccagaatccttccaattcacatcgagtgtagaggcaaaaacagaacgtcgtcaggattcatattatattcttcgtcctgaagtcgttgagacatggttctacttgtggagggctacaaaagacgagaaatatcgacaatgggcttgggatcatgttcaaaatttggaggagtattgtaagggcactgccggatactctggaatccgaaacgtctacgaatcgagcccggaacaagatgatgtgcagcagtcattcctcttcgctgagctcttcaaatatctgtatttaattttcagtgaagataacattcttccacttgatcaatgggttttcaataccgaagctcatccattccgcattcggcattaa

SEQ ID NO: 58528 - protein, 540 aa, Caenorhabditis elegans
MGLRSHEQLVVCVGVMFLLTVCITAFFFLPSGGADLYFREENSVHVRDVLIREEIRRKEQDELRRKAEEANPIPIPKPEIGASDDAEGRRIFVKQMIKFAWDGYRKYAWGENELRPNSRSGHSSSIFGYGKTGATIIDAIDTLYLVGLKEEYKEARDWIADFDFKTSAKGDLSVFETNIRFTGGLLSAFALTGDKMFLKKAEDVATILLPAFETPSGIPNSLIDAQTGRSKTYSWASGKAILSEYGSIQLEFDYLSNLTGNPVFAQKADKIRDVLTAMEKPEGLYPIYITMDNPPRWGQHLFSMGAMADSWYEYLLKQWIATGKKDDRTKREYEEAIFAMEKRMLFKSEQSNLWYFAKMNGNRMEHSFEHLACFSGGMVVLHAMNEKNKTISDHYMTLGKEIGHTCHESYARSTTGIGPESFQFTSSVEAKTERRQDSYYILRPEVVETWFYLWRATKDEKYRQWAWDHVQNLEEYCKGTAGYSGIRNVYESSPEQDDVQQSFLFAELFKYLYLIFSEDNILPLDQWVFNTEAHPFRIRH

SEQ ID NO: 58529 - DNA, 1599 bp, Caenorhabditis elegans
  CDS (1)..(1599)
atggttcgcataaaaattaatcgaaaaactctctttattttattcattgcttatatgcaactactcgtatttcttgcactttatctgaatctagctggaccagcagaacttctcaatcctagaagacagaaattttttggaacaaactcggcaaatcgacaaaattcgaatgaaacatatggcacaccaaaggcaaccaagttgaaaagagcgccgccagtttttcaaggtcctacgaatgaaagacaaaaagccattgtacgagcattccagcatgcttggtctggatataaaaagtatgcatggggtcatgatgaacttcgcccagtttcaaagcgatttgacgattcttttgggcttggacttaccattatagatagtttagatactgcgataataatgggattggaagaagaaactcgcgatggtgttgaatggattcgggaaaatctgaacgtgtctccagccagaagcgttaatgtattcgagaccacaattcgagttctcggtggactgttgagtgggtatcatctgacaggagaagaagcgctccttgaaaaagctactcagcttggagataatttgatcaaagccttcactaaatcgtcttcactaataccaaaaagtgatgtaaacctagataacgggaatgcttgcagtccaaatcgcgatctttcttctttagctgaagccaccactttacaattggaattcagagacttgacagccttgaccggtgatcaaaagtatgaagatgtggcgttcggagcatcggagcatgttcacaatgttggatgtaaaaagatggatggactgtgcccattttacattgacggaaaaggagaattcaaaaaatcaagtattactcttggagctcgtgctgacagctactacgaatatcttatcaagcaatggcttcaaaccaaaaaatcaattgattggctgcgtgacgacttcattcaatccattgccgccatgaaaaagcatctctatagacaatctcagccgaatagcatctggtttctcggtgaaataaccgaattggcacagttctatccaaaaatggatcaccttgtctgtttcctttccggatctcttgtactttcccatttaaatggtcttgatcatgacaatgaacatttggaaatggctaaaaatattggaaatgtttgtcataaaatgtatgaaaatccaacaggacttggaccagaaataatacatttcaatatggaggatagttctgatatgacacaagcggatacttatgtgaagaatcttgatgctcattcacttctccgtccagaagcaattgaagcgtggttctatttgtatcgtgttactaaagataagaaatatcaagagtggggatggaaagcttttgagtcgattgaaaagtatgcaaaagtggaaactggtggatacagctcaattgacaatgtgctcagaaagaagatcaaaagacgtgacaaaatggaatcattcttccttgctgagaccctcaaatacctttaccttctaatggctgatgatcaagaaatccttccactcgatcgatgggttctcaacactgaagcccacccacttccaatttacaattga

SEQ ID NO: 58530 - protein, 532 aa, Caenorhabditis elegans
MVRIKINRKTLFILFIAYMQLLVFLALYLNLAGPAELLNPRRQKFFGTNSANRQNSNETYGTPKATKLKRAPPVFQGPTNERQKAIVRAFQHAWSGYKKYAWGHDELRPVSKRFDDSFGLGLTIIDSLDTAIIMGLEEETRDGVEWIRENLNVSPARSVNVFETTIRVLGGLLSGYHLTGEEALLEKATQLGDNLIKAFTKSSSLIPKSDVNLDNGNACSPNRDLSSLAEATTLQLEFRDLTALTGDQKYEDVAFGASEHVHNVGCKKMDGLCPFYIDGKGEFKKSSITLGARADSYYEYLIKQWLQTKKSIDWLRDDFIQSIAAMKKHLYRQSQPNSIWFLGEITELAQFYPKMDHLVCFLSGSLVLSHLNGLDHDNEHLEMAKNIGNVCHKMYENPTGLGPEIIHFNMEDSSDMTQADTYVKNLDAHSLLRPEAIEAWFYLYRVTKDKKYQEWGWKAFESIEKYAKVETGGYSSIDNVLRKKIKRRDKMESFFLAETLKYLYLLMADDQEILPLDRWVLNTEAHPLPIYN

SEQ ID NO: 58531 - DNA, 1707 bp, Caenorhabditis elegans
  CDS (1)..(1707)
atgaaatttgtcaaaaatgtgttaattttcatcgcattgttctctacgacgtgctcactcaaaacaacgaaaaatccatttcttttaacgaaggaggaaataaaatatgcgtcaatttcagatgtggatttgcaatatggattggcaaaaacacgcgaaatgtttcaatttggatgggataactacatggaacatgcatttccagcagatgaattagatccaattcattgtagaggccgtggacacgatcatgataatccagataatattaatgttaacgatgtgcttggagattactcgttgggattaattgacactttggattcgcttgtggtttttggagacgcagacgaattcaaacgagctgttaatcttgtaattaaaacagtatcgtttgaaaagaatacaacagttcaagtattcgaatcaactattcgagtgatgggtggtcttctggctgctcatatgattgctgccgataaaactaatcgatttggtcctttctatatgtcagactacggtggagaacttttaacacttgcccatgatttagctgggcgacttttaccagcgttcgatggaacggccaccggaattccttacacccgtataaacttgcaaaagggaattcttccgggaacgacaaactctacatgtacatcaggcgcggggagtctattgcttgaatttggtgtattgtcaaagctgcttggagatgacacctatgaacgacttgctcgacgagttaatgaaaagttgtggaatttaagaaatgaggtcactggattgcatggaaacttaattgacattcaaactggagaatggcttggtcacttagcaggcctcggtgctggaattgattcattctatgaatatatgctaaagtcgtacatcctttttggtaatcaacgagatttagatatgtataatgaatcatttgctcgtatcacaacatacatgcgtcgaggtcgttctaggtgttccagtcttgaaggtgatattccaatttatgtaaatgttgattcaagagatggaagcacttcaaatacatggatcgattctcttcaggcaagtttcgcaggagttctggttttggctggtgaagtcgacgaggctgtgtgccatcatgccctttactatgcaatttggaagaaatacggagttctacccgaacgattcaattggcagttacaagctcctgatgtctcattttatccacttcgtccagaatttgttgaatctacatatctattgtacactgctacgaaaaatccattttatcagcatgttggactggaaattcttgattcattagaaacaattactcgagtaaaatgtggcttcgcaactgtgcatgatgtcattgatggaagtcttgaagatcgaatggaatcgtttttcttatcagaaacattaaagtatttatacttgttgttcgatgtagatcatccaattaacaaggaacagcaagaaagtgttcttttttcaacagagggtcacatatttccaatatccccgctgttcaatctgcctcctactccgccatctcaatatgatccacctctcaaaccattgccacgtaccaactcatcattttgcgaaactgccacagacttcacttttggaaccccaccacttcgtcattctcaaatgcgtgaattgttcaaagttattggagttgattcggttcttcacgattggttataa

SEQ ID NO: 58532 - protein, 568 aa, Caenorhabditis elegans
MKFVKNVLIFIALFSTTCSLKTTKNPFLLTKEEIKYASISDVDLQYGLAKTREMFQFGWDNYMEHAFPADELDPIHCRGRGHDHDNPDNINVNDVLGDYSLGLIDTLDSLVVFGDADEFKRAVNLVIKTVSFEKNTTVQVFESTIRVMGGLLAAHMIAADKTNRFGPFYMSDYGGELLTLAHDLAGRLLPAFDGTATGIPYTRINLQKGILPGTTNSTCTSGAGSLLLEFGVLSKLLGDDTYERLARRVNEKLWNLRNEVTGLHGNLIDIQTGEWLGHLAGLGAGIDSFYEYMLKSYILFGNQRDLDMYNESFARITTYMRRGRSRCSSLEGDIPIYVNVDSRDGSTSNTWIDSLQASFAGVLVLAGEVDEAVCHHALYYAIWKKYGVLPERFNWQLQAPDVSFYPLRPEFVESTYLLYTATKNPFYQHVGLEILDSLETITRVKCGFATVHDVIDGSLEDRMESFFLSETLKYLYLLFDVDHPINKEQQESVLFSTEGHIFPISPLFNLPPTPPSQYDPPLKPLPRTNSSFCETATDFTFGTPPLRHSQMRELFKVIGVDSVLHDWL

SEQ ID NO: 58533 - DNA, 2346 bp, Caenorhabditis elegans
  CDS (1)..(2346)
atgatcactcgaaaagcaatattctttttagcattagcgtcaattattcaagcatcagatgattccgaagctcccgataataaaaagtcttcaataagattcactccatcagttattgattcttatagagaaaaagttcaaaaaatgttctaccacgcctacaacggatatttggatcatgcatttccactagatgaactgaaaccaataacatgcgttggacaagacacctggggatcattctctctttcattaattgatgctctagatactcttctggtgatgggaaatacaaccgaattccgaagagcagtgtcacttgttcttgagaaagctcgtgatgatgctaatgtgaatgtttctgttttcgagacgaatatcagagttgttggcggattaatatctgcacatatgctagcgggaaggcataaagatcttgtcgtagattgggaaggttatccatgtgatagtccgcttctcaaattagctgttaaaatggctgatcgacttatgcctgctttcaatacagaaactggaatgccctatggaactgttaacttgaaatatggagttcataaagatgaaacaccaattacttgtacagctggtgtgggcacatttcttattgaatttggtaccctctcacgtttgactggcgatgacaaatacgaaaaagtggctctaaaagcgttggatgctttatggtcgacaagatcaccaatcggactcgtgggcaatcatatcaatgttcaaacaggacaatggacggcaactgattctggaattggtgctggcgttgatagttatttcgagtatttagcaaaaggagcatatctattcagaagaccaagtcttatgaaacaatttcatgaacatgcaacatcaattaataaacatgttcggaaaggtgaatggtttatgtgggtatcaatggccaaaggatctgtctccttgccaatttttcaatctcttgaagcattctggcctggaactctaacaatggttggtgatgttcaagatgcatcaagaattatgttaacatattctgaagttatacgaaaatacgggttcccacctgaattttataacattcataatgaagagccaggagaaaaacgagccgcatttcctttacggcctgaaatggttgaatcattgatgtatctgtatagagcgacaaaggatgaaacgtggttagaacttggagctgaaatgattgatgcaatagaatcatcagcccgaactaaatgtggctatgctacaatcaacaatgtaaaagagcatagtattgaagatagaatggagtcatttttccttgctgaaacaactaaatatctttatttattgttcgatccaacaaacttcattcattcaaaaggagatcaagctagaatattgacgagtccaaagaatttgacttgtgtgatctatggaggaggctatatattcaacactgaagctcatccagttgatccaggaatgttggattgctgtagtgtacaagcaaaacgggatcaggaagttggtgtgaaacaagtgaacaatggtgatgagcatgagaaaatgaatcgaacagaaaagggcggtgaaaagtatttcgagaatcaatatggaaaaaatgaaaatttaattgaattcgaagttgatgagaaactgaaaaaagaatctgaaaaacgaaagattgaactggaagcagaaaaagtgaaagaaaattcacataaagcaatgctcaaagtgcgagaaatacttgtaagagctcatcagaaggatgaagcaatgcagcgaaatggtgaaacatctgattcggctagaaaactgatggatcaactctacaaagcatacccaaatcatacggcagagttggaaaatttgaataaagaagcaattattgaatttgaagaacttcaacatttggaggatattcgagaacttgttagagaaatcccgatacctgaagttttttgtgagaaatgctgtgtcccacttcatgaaattgtcgattcggttgtacttcgagtgttaatggccgatgtttacgaatatcatttttatccaacgagaaaaacaaaatttcttcatggtcctgtttgttggttagaggaaacaccacggattgaggatgattacaaaaatgagccaccaagtgtgaacacagaaaaatggaatagtcctctcttcacaagtgatcaggcttctctcaatgattttatcggagacgatcttgaaactgttcgaaagtttggattcaaaactcttctggctcctggttacaaaaaattggataaattaattgctggacagaatattgcgttgcgaagaaagaagtcgtggtattatgaagtttag

SEQ ID NO: 58534 - protein, 781 aa, Caenorhabditis elegans
MITRKAIFFLALASIIQASDDSEAPDNKKSSIRFTPSVIDSYREKVQKMFYHAYNGYLDHAFPLDELKPITCVGQDTWGSFSLSLIDALDTLLVMGNTTEFRRAVSLVLEKARDDANVNVSVFETNIRVVGGLISAHMLAGRHKDLVVDWEGYPCDSPLLKLAVKMADRLMPAFNTETGMPYGTVNLKYGVHKDETPITCTAGVGTFLIEFGTLSRLTGDDKYEKVALKALDALWSTRSPIGLVGNHINVQTGQWTATDSGIGAGVDSYFEYLAKGAYLFRRPSLMKQFHEHATSINKHVRKGEWFMWVSMAKGSVSLPIFQSLEAFWPGTLTMVGDVQDASRIMLTYSEVIRKYGFPPEFYNIHNEEPGEKRAAFPLRPEMVESLMYLYRATKDETWLELGAEMIDAIESSARTKCGYATINNVKEHSIEDRMESFFLAETTKYLYLLFDPTNFIHSKGDQARILTSPKNLTCVIYGGGYIFNTEAHPVDPGMLDCCSVQAKRDQEVGVKQVNNGDEHEKMNRTEKGGEKYFENQYGKNENLIEFEVDEKLKKESEKRKIELEAEKVKENSHKAMLKVREILVRAHQKDEAMQRNGETSDSARKLMDQLYKAYPNHTAELENLNKEAIIEFEELQHLEDIRELVREIPIPEVFCEKCCVPLHEIVDSVVLRVLMADVYEYHFYPTRKTKFLHGPVCWLEETPRIEDDYKNEPPSVNTEKWNSPLFTSDQASLNDFIGDDLETVRKFGFKTLLAPGYKKLDKLIAGQNIALRRKKSWYYEV

SEQ ID NO: 58535 - DNA, 2796 bp, Caenorhabditis elegans
  CDS (1)..(2796)
atgttcaacacaagatggaaggtgttcatatttttggcactatgctatcgaatatcacatggagaagagttggataagaaaaagttacaaaaagaggcatacgacatgtttatgcatggatacaattcttacatgaactacgcatttcctgctgatgagctcatgcccctttcatgcaaaggacggatccgaggtgtgacccccagccgaggagatgttgacgatgtcctgggaaacttttcggtgactttattggacagcctggataccttggttgtaatgaatgagcttgatgagtttgaaaaagctatagacttggttatcaaacatgtgcgatttgattctgatcacgttgtcagtgtttttgaaactaatatcagagttctcggtggtttgatctcagctcacgtgttggcagaattagtaaaagaaaagtacccaaatcggctgacaacttatgataatcagctgctcaaaatggcgactgaagttggaaatcgactactccctgctttcaatacaaccagtggcttgccatttagtaggatcaacttgaaacatggtatgcaagatcacttgaaaagacagaaggatacatgtacggcttgcggaggaacaatgattttggaatttgctgctcttacaagtttgaccggtgacccaatttatgagaagaaagcaaggaaagctatggacttcttatggcaacaacgtcacagatcttctgacctgatgggtactgtgctcaatgttcattcaggagattggacacgacgggaaagtggaattggagcaggaatagattcttattacgagtatactctcaaagcttacattctccttggtgatgaaagttatcttgacagattcaataagcactatgaagctatcaaaagatacatcaacaagggtccaatatttgtcgacgtacacatgcataggccaacagttgccacaaggggcttcatggactctcttctcgctttttggcccggcttacaagtattgaaaggagatgtcaaggaagcaattgaaatgcatgaaatgctgttccaagtcatacaaaagcacaagttcttgcctgaggctttcactcatgattttcaagtacactgggctgaacacccaatccgacctgaatttgtagaaagtacctacttcttgtatcgagctaccaaggatccccattacttgcatgttgcgaagcagattatggatagtatcaacaagtatgtgaaagtgccttgcggatttgctgctttaaaagatattcgaactatggtcaaagaagatcaaatggaatcgttcgtactttcggaaactttcaaatatctctacatgatcttcactgatcctgaagatctaatgtttgatcccgatcactacgtacttaccacagaggctcacttcttgcctttaagcattggacacaaggagaaaatagaaaataaaataaacccacgtcgaatgatattgcgagcggacgagccacagcagaaaaactacgtgtgtgcaaacccaatcgatttcacgaagttacccactgaacgggaagaagcccaattgataagagaaaggacgaaaattatgttgggagagcttagaaatggggcgagtgcaggtggtgcagcaccgggcaacatgatatgtgaatctccggccgacagaattcgagcatgggcgttttcgtcaagtaaccaagaacacgtcaaacaattggttatgatggggattgaactcattaccttgagtgatggccgtttgcatttaagccataaatcagtaaacgcagcttcaccactttatgcaagatggggaatggaatttatggaggaaatgcagcactatgtcgaacaactcgataaatctggtggtactcctgagcacactcaacagttcgtgcaaatccttaaccgtccttattacggaaaaccatacctacgcggatctgctgctcaatttggacgagacattgcagcaacaaaagcccttgttggacgtgcggccaagacaattccattccgagcatgtgacaaaattttgaacgccgaccaggtagttggaaaaattgcagttgtcgaaaggtcggattgcgttttccaagataaagctagatttgtgcaacaagctggagctataggaatggttgtgattgatcacgaatcaaattcacaatacgttggcgatcggccaactttctctatggcagttgacaaggatggaaaagatgatattggaatcccatccatatttttgttccgtgctgaaggggaccacttgttacgttctttgaaaatgcattccgaaacggtcatttcgatatcatctcatcacctctcgattgaaaacacaattggtcggcttttgcgatatggcaaaatgttcaagtttcctgaatacccacaatgttcactcagagacggtgatattatattgcacaatttggattatcctgaagttattctcaatctgcgtttcaatggtattaatcaagatagtgatccaagactacatcaagaaattgttgagcgtcacgtcacagaactacaaaaatatctagagttcaaggatgctgactatgcgttccagttttatgagttcttccgtacggcagcatatggagcacttgatttgaatgtggaaaatagtaagctgctcacagtaatttctgcactgagtacgttaaaaacaaaaccaattccaccatcagtttttgcgagacttcccggagagattacaaaggtccgttgtattcccagaggagaagaaatgccgtgtgttcgactatctacataa

SEQ ID NO: 58536 - protein, 931 aa, Caenorhabditis elegans
MFNTRWKVFIFLALCYRISHGEELDKKKLQKEAYDMFMHGYNSYMNYAFPADELMPLSCKGRIRGVTPSRGDVDDVLGNFSVTLLDSLDTLVVMNELDEFEKAIDLVIKHVRFDSDHVVSVFETNIRVLGGLISAHVLAELVKEKYPNRLTTYDNQLLKMATEVGNRLLPAFNTTSGLPFSRINLKHGMQDHLKRQKDTCTACGGTMILEFAALTSLTGDPIYEKKARKAMDFLWQQRHRSSDLMGTVLNVHSGDWTRRESGIGAGIDSYYEYTLKAYILLGDESYLDRFNKHYEAIKRYINKGPIFVDVHMHRPTVATRGFMDSLLAFWPGLQVLKGDVKEAIEMHEMLFQVIQKHKFLPEAFTHDFQVHWAEHPIRPEFVESTYFLYRATKDPHYLHVAKQIMDSINKYVKVPCGFAALKDIRTMVKEDQMESFVLSETFKYLYMIFTDPEDLMFDPDHYVLTTEAHFLPLSIGHKEKIENKINPRRMILRADEPQQKNYVCANPIDFTKLPTEREEAQLIRERTKIMLGELRNGASAGGAAPGNMICESPADRIRAWAFSSSNQEHVKQLVMMGIELITLSDGRLHLSHKSVNAASPLYARWGMEFMEEMQHYVEQLDKSGGTPEHTQQFVQILNRPYYGKPYLRGSAAQFGRDIAATKALVGRAAKTIPFRACDKILNADQVVGKIAVVERSDCVFQDKARFVQQAGAIGMVVIDHESNSQYVGDRPTFSMAVDKDGKDDIGIPSIFLFRAEGDHLLRSLKMHSETVISISSHHLSIENTIGRLLRYGKMFKFPEYPQCSLRDGDIILHNLDYPEVILNLRFNGINQDSDPRLHQEIVERHVTELQKYLEFKDADYAFQFYEFFRTAAYGALDLNVENSKLLTVISALSTLKTKPIPPSVFARLPGEITKVRCIPRGEEMPCVRLST

SEQ ID NO: 58537 - DNA, 1725 bp, Arabidopsis thaliana
  CDS (1)..(1725)
atgtcttgtcctatccatcctaggcgtctcttcctctgcttgcttatttctctcactttcttcgtcgtcgacccttcatcgcagcatatcgaggtcaagaagaaacaaatgcgagagaaagtacgcgagatgttctatcatgcgtatgacaattacatgacttatgcatttccgcatgatgagctaaagcctctaactaaaagtttcacagactccctcagtgagcttggaaatcttaagcttgaacacctgccaacagattataatggatcagctgttactcttgttgaatcattatccagccttgctatattggggaacagtacagaatttgaaaagggggttctctggctctcagaaaatcttactttcgatattgatgcccgggtcaacctttttgagtgcaatataagagttcttggaggacttatctctgctcatcttcttgcaattgatccaaataataggttgattcagggttcctacaacaatcagcttcttcgattagctgaagaccttggaaaacgttttttacccgcgtttgaaacacctacaggattaccatatgcatggattaatttgaagaatggagtaatggagaatgagacaactgaaacaagcacttcaggatgtggttctctcgttcttgaaatgggagcattgtcacggctcactggtgacccgaggtttgaatcagctgcactacgtgcgcttcgtcagctatggaggatgcgaagttcgttagatctgcttgggacaacattggatgtggtaactggggaatggatagagtactcctctagcattggagctggggttgactctttctatgaatacctcttgaaggcttatattctttttggaaaagaagactactggcgaatgtttcattctgcttatctggcatctcagaagtacttcagacatgggccttggtaccatgaagctaatatgtggagtggaaaaccaacttactggcagctcacaagtcttcaggcgttttggcctggtctgcaggttcttgttggagatattgcagctgcaaattcatcgcatcgtgagtttttccatgtatgggaaaagtttggtgtattacctgagaggtatctactcgatcatcaaataatacatccgacaatgaagtactatccactacgtcctgaattagcagaatccacgttctacctttaccaagctacaaaagatccatggtatctagatgttggtgaatcaatggtaaaatctcttaatctctacacaaaggtgccagggggatttgcaagtgttagagatgtgacgaccatgcaattggaagatcatcagcacagtttctttctcgctgaaacgtgcaagtacctatatctcctcttcgatgactcatttgtggccaaaaggaattatatatttacaaccgagggccatcctatacaggttgtgagctcctggcatgagaaactaccagaaacttatttctcaggcaactggaccctttcaaagagtggagcatgggaaagtcgagctagcgcattgtcactacaagtctgtccactgatatctcttaactctagacatcctgagcaacaaagagagagtgcttgccatgttcttgacgagcaaatcaatcataagtgttggagcaacaaagagtgcggagttgatgccactacttgtagactaagaacctgcagcggggttggatactgcggcttatggaatcccttataa

SEQ ID NO: 58538 - protein, 574 aa, Arabidopsis thaliana
MSCPIHPRRLFLCLLISLTFFVVDPSSQHIEVKKKQMREKVREMFYHAYDNYMTYAFPHDELKPLTKSFTDSLSELGNLKLEHLPTDYNGSAVTLVESLSSLAILGNSTEFEKGVLWLSENLTFDIDARVNLFECNIRVLGGLISAHLLAIDPNNRLIQGSYNNQLLRLAEDLGKRFLPAFETPTGLPYAWINLKNGVMENETTETSTSGCGSLVLEMGALSRLTGDPRFESAALRALRQLWRMRSSLDLLGTTLDVVTGEWIEYSSSIGAGVDSFYEYLLKAYILFGKEDYWRMFHSAYLASQKYFRHGPWYHEANMWSGKPTYWQLTSLQAFWPGLQVLVGDIAAANSSHREFFHVWEKFGVLPERYLLDHQIIHPTMKYYPLRPELAESTFYLYQATKDPWYLDVGESMVKSLNLYTKVPGGFASVRDVTTMQLEDHQHSFFLAETCKYLYLLFDDSFVAKRNYIFTTEGHPIQVVSSWHEKLPETYFSGNWTLSKSGAWESRASALSLQVCPLISLNSRHPEQQRESACHVLDEQINHKCWSNKECGVDATTCRLRTCSGVGYCGLWNPL

SEQ ID NO: 58539 - DNA, 1875 bp, Arabidopsis thaliana
  CDS (1)..(1875)
atgtcgaaatctctaccatattcagttaaagatattcattacgacaatgccaagttcagacatcgatctcctttaaaggttttttctcaaagcttgcttactcttagtacaaaacgcaactacgctagctgtagcacggggaagttccttatattaatactgttctttggagtagcatgtctaatgctgatgagtaagagtccaaatgaatctggtcttaatgagaaaggaaaggtcacttttgttgggggacttaggctagggggacttttgagaaagccacctaggcttccacctcgtttatcacctgacgaaggacaattaagaggaagttccactaatggctcaactatttcaaattctgacccaaaatgggcagctaggcagcaaagtgtaaaagaggcttttgaccatgcatggtctggctatagaaagtacgccatgggttatgacgagctaatgcctattagccagaaaggtgtggatggtttaggaggattaggtgccactgttgtggatgctcttgatacagccatgataatgggtcttgataatatcgtctctgaagcaggatcatgggttgagactcatctcttggagagaatcagtcaaaaaggtcaagttaatttgtttgaaactacaatacgtgtcttaggtgggcttctaagtgcataccatttgagtggaggagagcagggtacggtgaacatgacccatgttggaccgaaaccagtcatctatctaaatattgctaaggatttggctgaccgtctactttcggcttttacctccagccctactccagttcccttttgtgatgtcatattgcatgaatcgactgctcatccagctccaggaggagcgagcagtacagcagaagttgcctctgtacagcttgaatttaactacctcagttctatttctggtgatccaaagtatagtacagaggccatgaaggtcttagctcatataaaaacacttccaaagacagaaggtcttgttccaatctatatcagccctcaaacaggtgactttgttggtgagaatatcaggttgggatctcgtggtgatagctactatgagtatttaattaaggtgtggcttcagcaaggagctaagttgaatagtaatttcacatatttgcatgatatgtacattgaggcaatgaaaggagtcaggcatttgcttgtgcaaaattcaattccaaaaggtctggtctttgtaggggagttaccttacgggtctaagggagaattcagtccaaaaatggatcatttggtatgcttcttgcctggtactcttgctctcggtgctaccaagggcctcacaaaggaacaagccctgaaggaaaatcttttgtcctttgaggacctagaaaatctgaaacttgcagaagatttagcgaaaacatgctttgagatgtatgaagtaactgccactggccttgctccagaaattgcttactttcacacaaaggattacactgaggatggtcttgatggtgggaataagagttctatgtatgcaaatgacataatcattaagcccgctgatcgacataatctactgcgccctgaaactgttgaatcactctttgtcctctatcgtatcacaaaagatacaaaataccgagatcaaggttggcaaatttttgaagcttttgaaaagtacacaaaggtgaaatcaggtggatacacatcattggatgatgtaacagaagtgcctcctcatagaagagataagatggagacatttttccttggtgaaacattgaagtacttatacttgctctttggagatgactcagtgataccattggataagtttgttttcaacactgaagctcatccattaccaataagaagaaacacctga

SEQ ID NO: 58540 - protein, 624 aa, Arabidopsis thaliana
MSKSLPYSVKDIHYDNAKFRHRSPLKVFSQSLLTLSTKRNYASCSTGKFLILILFFGVACLMLMSKSPNESGLNEKGKVTFVGGLRLGGLLRKPPRLPPRLSPDEGQLRGSSTNGSTISNSDPKWAARQQSVKEAFDHAWSGYRKYAMGYDELMPISQKGVDGLGGLGATVVDALDTAMIMGLDNIVSEAGSWVETHLLERISQKGQVNLFETTIRVLGGLLSAYHLSGGEQGTVNMTHVGPKPVIYLNIAKDLADRLLSAFTSSPTPVPFCDVILHESTAHPAPGGASSTAEVASVQLEFNYLSSISGDPKYSTEAMKVLAHIKTLPKTEGLVPIYISPQTGDFVGENIRLGSRGDSYYEYLIKVWLQQGAKLNSNFTYLHDMYIEAMKGVRHLLVQNSIPKGLVFVGELPYGSKGEFSPKMDHLVCFLPGTLALGATKGLTKEQALKENLLSFEDLENLKLAEDLAKTCFEMYEVTATGLAPEIAYFHTKDYTEDGLDGGNKSSMYANDIIIKPADRHNLLRPETVESLFVLYRITKDTKYRDQGWQIFEAFEKYTKVKSGGYTSLDDVTEVPPHRRDKMETFFLGETLKYLYLLFGDDSVIPLDKFVFNTEAHPLPIRRNT

SEQ ID NO: 58541 - DNA, 1719 bp, Arabidopsis thaliana
  CDS (1)..(1719)
atggcgaggaataaacttgtaagtggtagtcatgggatatggaaatatttcaacccagcgttttatctccgaagaccaagacgtcttgctttgctcatcatcctcttcgtctctgtttcaatggttgtttgggatcgtcaatctctttcccgagactaccagtttgaagtttccaagttaaatgaagaagttttgcggttgcagcagatgttggaagagataaagagcgtcactgaggatgtgtctgtcaatagtttgaaggatgttcaggaagatccagttgatgctcagcgaatgcagagagttaaagaggcaatggttcatgcttggagttcatatgaaaagtatgcctggggacaagatgagcttcagccccagacaaaggatggtgttgacagctttggtggcctgggtgcaactatgatagatgcattagacacactatatataatgggtctagatgagcagtttcagaaagccagagagtgggtagcaagctcattagatttcgacaaggattatgctgccagtatgtttgagacaaccataagagtggtaggagggcttctcagtgcgtatgatctttctggggataaaattttccttgaaaaggctatggatattgcagacagattattgcctgcatgggacactcaatcgggtataccatataatattatcaacttgaagcatggaaatgctcacaatcctacatgggcggggggagacagtattcttgcagattctggtactgagcagcttgaatttattgccctttcccagaggacaggggacccaaaatatcagcaaaaggtagaaaaggttatttcagtgctaaataagaacttccctgctgatggtttacttccgatatatataaatcccgatacagctaatccatcgcagtctacaataacatttggtgccatgggagacagcttttacgaatatttgctcaaagtttgggtgtttgggaacaaaacttcagcagtgaaacactatagagatatgtgggagaagtcaatgaatggtctgctaagcttggttaagaaatcaacacctttgtcgtttacatatatctgtgagaagagtggaaattctttgatcgataagatggatgaattggcatgctttgctcctggaatgttggctttaggagcatctgggtatagtgatcctgctgaaggaaagaagtttctcacactcgctgaagagcttgcgtggacatgttataacttttaccaatcaactccaacaaaactggctggggagaattatttcttcaactctgggagtgacatgagtgttggaacgtcgtggaacatcttgagaccagaaactgtcgaatcactgttttacctctggcggttaactggaaacaagacatatcaagagtggggatggaatatatttgaagcatttgagaagaactcgcgcatagagtctggatatgttggtttgaaggatgttaatacaggcgttaaggacaacaagatgcaaagtttcttccttgcagagacactcaagtatctctatctactcttctcgccgacaacagtcattcctttagacgagtgggtattcaacaccgaagctcatccacttaagattaagtctcgaaacgatcaggtaaatctcaaacaatccaacaaagtactgctacgaaaaccggcatttagaatacgccagaggcattatggtcggataacaaagaagtaa

SEQ ID NO: 58542 - protein, 572 aa, Arabidopsis thaliana
MARNKLVSGSHGIWKYFNPAFYLRRPRRLALLIILFVSVSMVVWDRQSLSRDYQFEVSKLNEEVLRLQQMLEEIKSVTEDVSVNSLKDVQEDPVDAQRMQRVKEAMVHAWSSYEKYAWGQDELQPQTKDGVDSFGGLGATMIDALDTLYIMGLDEQFQKAREWVASSLDFDKDYAASMFETTIRVVGGLLSAYDLSGDKIFLEKAMDIADRLLPAWDTQSGIPYNIINLKHGNAHNPTWAGGDSILADSGTEQLEFIALSQRTGDPKYQQKVEKVISVLNKNFPADGLLPIYINPDTANPSQSTITFGAMGDSFYEYLLKVWVFGNKTSAVKHYRDMWEKSMNGLLSLVKKSTPLSFTYICEKSGNSLIDKMDELACFAPGMLALGASGYSDPAEGKKFLTLAEELAWTCYNFYQSTPTKLAGENYFFNSGSDMSVGTSWNILRPETVESLFYLWRLTGNKTYQEWGWNIFEAFEKNSRIESGYVGLKDVNTGVKDNKMQSFFLAETLKYLYLLFSPTTVIPLDEWVFNTEAHPLKIKSRNDQVNLKQSNKVLLRKPAFRIRQRHYGRITKK

SEQ ID NO: 58543 - DNA, 2364 bp, Schizosaccharomyces pombe 972h-
  CDS (1)..(2364)
atgggtagcttgcactcgattttctgtgtttgtttgattttactatgcatttttaaagaaaactcaatcgttggggccataaactccgcgagaatggtagagctaagggaaacttctcggagactgttttatcatggatataacaattacatgcaatttgcctttcctaacgatgagctcgccccattgtcctgcgaagggttgggaccggactacgaaaatcctaacaacattggtgtcaacgatgttcgaggtgattatttgttgacattggtcgatgttttagataccttggtggttttgggagaccgagaagggtttcaggatgctgttgacaaagtcattcatcatattaattttgaacgagacacaaaagtacaagttttcgaagcaaccatccgaattcttggaggactactttcatctcatatttttgcctcagaagaaaaatatggatttcaaatcccattgtataagggtgaattattgacattggctacagaactagcagaacgtttacttcctgcatttcgaacacctactggaattccttttgcaagaatcaatctaatgaagggtgtcgcgtatcgtgaggtaaccgaaaactgtgctgctgcggcctccagcctggtattggaattttctatgcttactgctttgactgggaataataagtttaaagcttctgctgaaaacgcttttttctccgtatggaagcgaaggtcaggtattggtcttttgggcaatagtatcgacgttttgagtggcagatggatttatcctgtttcaggagtcggtgcaggcatcgatagcttttacgaatatgcttttaaatcttatatctttcttggagatcctcggtatttagaagtttggcaaaagtctttggaatcattacggcattataccgcttctcttaacgaatattactatcaaaacgtttattcagctaatggcatggtgatgtcgcgctgggttgattctttgagtgcttatttccctgggttattggtattggcgggcgaactggagcttgccaagaaaatgcatttgtactatttttctatttatttgaagtttgggcaattaccagagcgctacaacttgtatacaaagtccatcgaactaaacggttatcctttacgtcctgaatttgctgagtctacatattatttatacagggcaactaaagatgtattttatcttcatgtcggtgaattactgctaagtaatatcgaaaaccacctatggactccttgtggatttgcggcagtagagaatctagaaaagtatacactttcgaatcgaatggaaagtttctttttgagcgaaacccttaaatatttgtttctattatttgacgatgataatcccattcacagaagtcaccatgattttatttttacgacagaaggtcatttgtttcccgtgacaaatcaaacacgactgtctacctctcaaagaatttacgacggtggagaagtttgtgttgcagaagattacgacagatctaaatggccaatgttatattcgttgatagcatctagagacgattacgattatgtctctcatttagtaggaattgataacaaagcaataccctcgtatctaattgatccatcgggtgtttgcaagaggccagagtattccgatggttttgaactcctttatggaagtgcacttgttagtcctataaaatcagtggaacgtgtaaccaataatgtatacatatccgacattatcggtaataaacttaaattcgttcaaaaagaaggttctaattctctgtttttatacactgctggagctgaatctataaatgagaatgacacggtcttcctaaccgatccggattatgagaccttcacaagacctgatgcattgtactttgatcgaactattgctcagctagaaaatccgaacagtggtcaaaaaacgtttggaaaattccttcaatttgacaacgataattctttaccttcaaaggtttttaagacagtcttgttaaataacagtatgtgtcaaaaaccctccgatactctcgacaaagatacagcatatattgctccacttggcaactgctcatgggtgcagcaagcaaaaaataccaataaggcaggattgttaattctcatcacggatggtgaatttattaatccgttagaaaatattcattctcaaaacagtctattcaattgggttaaaccatacatccctccgactattctcttaaaaaatgaaaacaattttgtttctaaatgggccaacgtctctgtgcgtcaatcagactttgacgccccttcgtacttccaaggaactccagtttcaaacctatatttgtgtctgaaatgcataaacagctag

SEQ ID NO: 58544 - protein, 787 aa, Schizosaccharomyces pombe 972h-
MGSLHSIFCVCLILLCIFKENSIVGAINSARMVELRETSRRLFYHGYNNYMQFAFPNDELAPLSCEGLGPDYENPNNIGVNDVRGDYLLTLVDVLDTLVVLGDREGFQDAVDKVIHHINFERDTKVQVFEATIRILGGLLSSHIFASEEKYGFQIPLYKGELLTLATELAERLLPAFRTPTGIPFARINLMKGVAYREVTENCAAAASSLVLEFSMLTALTGNNKFKASAENAFFSVWKRRSGIGLLGNSIDVLSGRWIYPVSGVGAGIDSFYEYAFKSYIFLGDPRYLEVWQKSLESLRHYTASLNEYYYQNVYSANGMVMSRWVDSLSAYFPGLLVLAGELELAKKMHLYYFSIYLKFGQLPERYNLYTKSIELNGYPLRPEFAESTYYLYRATKDVFYLHVGELLLSNIENHLWTPCGFAAVENLEKYTLSNRMESFFLSETLKYLFLLFDDDNPIHRSHHDFIFTTEGHLFPVTNQTRLSTSQRIYDGGEVCVAEDYDRSKWPMLYSLIASRDDYDYVSHLVGIDNKAIPSYLIDPSGVCKRPEYSDGFELLYGSALVSPIKSVERVTNNVYISDIIGNKLKFVQKEGSNSLFLYTAGAESINENDTVFLTDPDYETFTRPDALYFDRTIAQLENPNSGQKTFGKFLQFDNDNSLPSKVFKTVLLNNSMCQKPSDTLDKDTAYIAPLGNCSWVQQAKNTNKAGLLILITDGEFINPLENIHSQNSLFNWVKPYIPPTILLKNENNFVSKWANVSVRQSDFDAPSYFQGTPVSNLYLCLKCINS

SEQ ID NO: 58545 - DNA, 2406 bp, Drosophila melanogaster
  CDS (1)..(2406)
atgtctaccacatcctccgaatcctttgtccgcggccagcggcttatgctcatcttcctggtggccatgtgcatcgtagttgcctgcgtccttagcaccgaaaccaccatgcccacgcagaacatgtccaataaggagcgggcggaactccgggaagaggctcgcgatatgttctatcatgcatacaacgcctacatgcagaacgcctatccagctgatgagcttatgccgctctcctgcaaaggacggtaccgaggagtgacgccatcacgtggcgacatggacgacatccttggaaatttctccatgactctggtggatactctggacactctggtgctcctgggcgatttcacagagtttgatcacgcggtgaagctagttatccgcgacgttcaattcgacagcgacattattgtgtcggtgtttgagacgaacattcgaatggtcggtggcttgctgtcggcgcacatcctggcggagtatctgcaaaagcatgcggacacgatgcattggtacaagggcgaactgctggagatgtctcgcgagctgggctaccgtttgctaccggcgttcaacacatccacgggcattccgcatgcgcgggttaatctccgcctgggcatgaaggacccgatgctcaagaagtcccgtgaaacgtgtacggcgtgtgctggtaccatccttctggaatttgctgctctgtcgcgtctcaccggcgatcccattttcgaggtgcgagctcacgccgccatggatgcactgtggaagctaaggcaccgtggctccgatctcatgggcacggtacttaatgtccattcgggcgattgggtgcgtcgcgattctggagtcggagctggcatcgacagttactatgagtacctgttcaagtcgtacgtcctactgggtgacgacaagtacctggcacgctttaatcgccactacaacgcagtgatgaagtacgtcagcgaaggacccatgctactcgacgtgctcatgcacaggccacatgctaagtccaaaaacttcatggactcgcttctggcattttggccgggcttgcaggtgctatcgggcgatctgaaaccagctgtgcagacacacgagatgctctatcaggtcatgcagatgcacaccttcattccagaagcatttaccgtcgacttccagatccattggggacagcatcccctgcgaccagaatttatagagtccacttacttcctgtaccgcgccactggcgatcatcattatctgcaggttggcaagaaggctctgaaaacactccagcagcatgctaaggtatcttgcggctatgcggccgtcaatgatgtacggactggcaagcatgaggatcgcatggactcgtttgtgctctccgagacgatcaagtacctcttcctactgttctccgatccccaggatctgatcataaacgtcgatgagttcgtcttcacgaccgaggctcatctgctaccgctctctattgcccaactagggaatgccacgtttagctttcgccagacggacgaacacaacgtactcgacttcatgcgcacctgccccagttcaaataggctttttcctgaaaaagtacgcaaaccactgcgcaacttcattacgggctcgtgccctcgcaccacagcgggaaagcgactcagcgccctggattttcaggcaagcaatgcagatcatcttcgagctgtttacgacatgggcattaccatggtttcggtaggcgaccgcagccaaggcaaggtgcgactgtttcatagtttctataatgccaaaagtcacgaggagggcgaaatgggactgcaatttatgcaggagatgcttgagctgaccaagatgcaaagcataaatcagctagcgcaactgcaggccgttgcctacgccactgacgagaactcacaggattggatcgcactgatggccgggccgtcgcactttagcccagagttaactggcgatcagttcgtcgaaggggacgtgattctggccaagccgctacgagcatgcgatgagagcctagagaacgccgaggaggcgaaaggaaaggtcctggtggccgagcgcggcgattgcacgttcgttagcaaagcgcgactggcccagaaggtgggggcggcggcgctgattgtctgtgataatgttccgggctcttccggtgagacgcagccgatgttcgcaatgtctggcgacggcaaggacgacgtgctcattccagtcgtattcatgtacagcatggagttcggcaaactgtcggcggtcatgcagcgacggaaacaacctctgcgtgttcgcgtcatgcagatggtggagtttaagcggtggcaactggccaaggagcagcgccagaaccaaacagcgtcggtagcacagaaaccggaaaaagaattgtag

SEQ ID NO: 58546 - protein, 801 aa, Drosophila melanogaster
MSTTSSESFVRGQRLMLIFLVAMCIVVACVLSTETTMPTQNMSNKERAELREEARDMFYHAYNAYMQNAYPADELMPLSCKGRYRGVTPSRGDMDDILGNFSMTLVDTLDTLVLLGDFTEFDHAVKLVIRDVQFDSDIIVSVFETNIRMVGGLLSAHILAEYLQKHADTMHWYKGELLEMSRELGYRLLPAFNTSTGIPHARVNLRLGMKDPMLKKSRETCTACAGTILLEFAALSRLTGDPIFEVRAHAAMDALWKLRHRGSDLMGTVLNVHSGDWVRRDSGVGAGIDSYYEYLFKSYVLLGDDKYLARFNRHYNAVMKYVSEGPMLLDVLMHRPHAKSKNFMDSLLAFWPGLQVLSGDLKPAVQTHEMLYQVMQMHTFIPEAFTVDFQIHWGQHPLRPEFIESTYFLYRATGDHHYLQVGKKALKTLQQHAKVSCGYAAVNDVRTGKHEDRMDSFVLSETIKYLFLLFSDPQDLIINVDEFVFTTEAHLLPLSIAQLGNATFSFRQTDEHNVLDFMRTCPSSNRLFPEKVRKPLRNFITGSCPRTTAGKRLSALDFQASNADHLRAVYDMGITMVSVGDRSQGKVRLFHSFYNAKSHEEGEMGLQFMQEMLELTKMQSINQLAQLQAVAYATDENSQDWIALMAGPSHFSPELTGDQFVEGDVILAKPLRACDESLENAEEAKGKVLVAERGDCTFVSKARLAQKVGAAALIVCDNVPGSSGETQPMFAMSGDGKDDVLIPVVFMYSMEFGKLSAVMQRRKQPLRVRVMQMVEFKRWQLAKEQRQNQTASVAQKPEKEL

SEQ ID NO: 58547 - DNA, 2058 bp, Drosophila melanogaster
  CDS (1)..(2058)
atgaaggacggcggtcacataacgctcacactcccgccgggatcagcggcgacgacggacgagcggggcaggaagagcctgcgtcgggcttggaatcagctaccgcgttgtcagcgcaatctcattattctgggcatcaccggattctgcgtgacagtgttgctctgcctaagtggcgatcagctgctggctgccagcttaaaggatgtggacaccaaggccgaggtggcagcatatcaaatgcccctgcccaatccgcaccatcatccgggggtggataaggatgtgcccaaagacactgctgcggtacctgttccggccgataagagagcaccccgggtggaggcggttagtgataagtttaatgagctagttgcctatggagaagcgaactcagcggagaacgtggcccgtctgccggagacggtggctgctgaaggacttccccaggcctcggccatggccgtggccttgcctccccccgatagtaacaaggagcaggacatcggtggaatcgacatcctaaacaatgtagaggagcccgtcgcccaggatccagcagagccgcttagcgagggcgagcagcttgagcaagccatcaagaacccactcactctgggcggcgttagcttcaaagagcatctcaaaaagatcaagcccattctggccaagggccagcacttccatggcgccaccaacgaaagacagtcggctgttgtagccgccttcaagcactcctgggctggctacaagaagtatgcctggggccacgacaacctgaagcccatctcccagtactcccacgagtggttcggtctgggactaaccattgttgactcattggataccatgtacataatgggactggatgatgaattcaaggaaggacgcgactgggtagagcaatcactgcgctttgataccaagcgcgatgtaaacctattcgaggtcaccatacgtgtcctaggcggactgctgtctgcatatcacctgagcggcgatacaatgtttctggccaaggctgcggaacttggcaaccgtttacttcccgcctttcaatcgccgtcaaatatcccctattctgatgtgaatctcggagatctttcggcgcactcgccgaagtggtctcctgatagctccaccagtgaggtcaccaccattcagctagagtttcgtgatttgagtcgctctacaaacatctccatttatgaacaggttgctcacaaagtaaacgagaaggtgcatgatctggagaagaaccatggtttggtgcccatattcattaacgccaacacaggaacattccgaaactacgccactatctcgcttggtgctcgtggggactcctactatgagtacttgctcaaacagtggattcagaccggccgcaaggataatgataaccttattttggactacatgcaagcagtcgatggtgttctaacacaactgatgcggcgcacgccacgcgagcactgggtttacattggcgagctgatcaatggcaaagactttaagccgaaaatggatcaccttacgtgttatctgccgggcactttgattctgggtcaccagaacggaatgccagactcgcaccttatacttgcgagggatttattggacacatgctatcagacctatatgatgaatcccacacatttggctgctgagatctcgtattttgcgctaaccgaaaaggacgatcaggacatttatgtgaagccaaacgatgcccacaacctgttgcgcccggagtttgtggagagtctctattacttctactcaataactggcaatcggacataccaggacatgggatggaaaatcttccaggcgtttgagactcacgctaaagtaaatgcaggctacacatcgatgggaaatgtaaagaacacacagagcacgcgtctgcgcgatctgatggaaagcttttggatgagcgagaccctgaagtacttctacctgctgtttagcgacgaccgcaaggaaatcgacctggagcaatgggtcttcaattcggagggccatccactgccggtctatccgctcaagacttaa

SEQ ID NO: 58548 - protein, 685 aa, Drosophila melanogaster
MKDGGHITLTLPPGSAATTDERGRKSLRRAWNQLPRCQRNLIILGITGFCVTVLLCLSGDQLLAASLKDVDTKAEVAAYQMPLPNPHHHPGVDKDVPKDTAAVPVPADKRAPRVEAVSDKFNELVAYGEANSAENVARLPETVAAEGLPQASAMAVALPPPDSNKEQDIGGIDILNNVEEPVAQDPAEPLSEGEQLEQAIKNPLTLGGVSFKEHLKKIKPILAKGQHFHGATNERQSAVVAAFKHSWAGYKKYAWGHDNLKPISQYSHEWFGLGLTIVDSLDTMYIMGLDDEFKEGRDWVEQSLRFDTKRDVNLFEVTIRVLGGLLSAYHLSGDTMFLAKAAELGNRLLPAFQSPSNIPYSDVNLGDLSAHSPKWSPDSSTSEVTTIQLEFRDLSRSTNISIYEQVAHKVNEKVHDLEKNHGLVPIFINANTGTFRNYATISLGARGDSYYEYLLKQWIQTGRKDNDNLILDYMQAVDGVLTQLMRRTPREHWVYIGELINGKDFKPKMDHLTCYLPGTLILGHQNGMPDSHLILARDLLDTCYQTYMMNPTHLAAEISYFALTEKDDQDIYVKPNDAHNLLRPEFVESLYYFYSITGNRTYQDMGWKIFQAFETHAKVNAGYTSMGNVKNTQSTRLRDLMESFWMSETLKYFYLLFSDDRKEIDLEQWVFNSEGHPLPVYPLKT

SEQ ID NO: 58549 - DNA, 1734 bp, Mus musculus
  CDS (1)..(1734)
atgcctttccggctactcatcccgctcggcctcgtgtgcgtgctgctacccctgcaccatggtgcgccaggccccgacggcaccgcgcccgaccccgcccactacagggagcgagtcaaggccatgttctaccacgcctacgacagttacctggaaaatgcctttccctacgatgagctgagacctctcacctgtgatgggcacgacacctggggcagtttttctctgacgctaattgatgccctggacaccttgctgattttggggaatacctctgaattccaaagagtagtggaggttcttcaggacaatgtggactttgatatcgacgtgaacgcctctgtgttcgaaaccaacatccgagtggtaggaggactcctttctgctcatctcttgtcaaagaaggccggtgtggaggtggaagccgggtggccttgttctgggcctctcctcaggatggcggaggaagcagcccggaaactcctcccagcatttcagacccccacgggcatgccctatggaactgtgaacctgcttcatggcgtgaaccctggagagacccctgttacctgtacagcagggattgggaccttcattgtggaatttgctaccctgagcagcctcaccggtgaccctgtgtttgaagatgtggccagagtggccctgatgcgtctctgggagagccggtcagatatcgggctggttggcaatcacatcgatgtgctcactggcaagtgggtggcccaggatgcaggcatcggggctggtgtggattcctattttgagtacctggtaaaaggagccatccttcttcaggataagaaactcatggccatgttcctagagtacaacaaagccatccggaattacacgcacttcgatgactggtacctctgggtgcagatgtacaaggggaccgtgtcaatgcctgtcttccagtccttggaggcctactggcctggccttcagagccttattggagacattgacaatgccatgaggacctttctcaactactacactgtatggaagcagtttggggggctgccagaattctacaacattcctcagggatacacagtggagaagcgagaaggctacccactccgaccggagctcatcgagagcgcaatgtacctctaccgcgccactggggatcccactctcttagaacttgggagagacgctgtggaatccattgagaaaatcagcaaggtggagtgtggatttgccacgatcaaggacctccgggaccacaagcttgacaaccgcatggagtctttcttcctggctgaaactgtgaaatacctctatcttctgttccacccaaacaacttcatccacaacaatggctccacctttgactctgtgatgactccccatggggagtgcatcctaggagccgggggctacatcttcaacacggaggctcaccccattgaccctgctgccttgcactgctgccggaggctcaaggaggagcagtgggaagtggaggacttgataaaggagttctactccctcaaacagagcaggccaaagagagctcagaggaagacagtgaggtcggggccctgggagccccagtcagggccagccacactcttctcacctgcaaaccagcccagggagaagcagcctgcccggcagcgaaccccgcttctcagctgccccagccagcccttcacctctaagctggcattgctaggccaggttttcctagactcctcatag

SEQ ID NO: 58550 - protein, 577 aa, Mus musculus
MPFRLLIPLGLVCVLLPLHHGAPGPDGTAPDPAHYRERVKAMFYHAYDSYLENAFPYDELRPLTCDGHDTWGSFSLTLIDALDTLLILGNTSEFQRVVEVLQDNVDFDIDVNASVFETNIRVVGGLLSAHLLSKKAGVEVEAGWPCSGPLLRMAEEAARKLLPAFQTPTGMPYGTVNLLHGVNPGETPVTCTAGIGTFIVEFATLSSLTGDPVFEDVARVALMRLWESRSDIGLVGNHIDVLTGKWVAQDAGIGAGVDSYFEYLVKGAILLQDKKLMAMFLEYNKAIRNYTHFDDWYLWVQMYKGTVSMPVFQSLEAYWPGLQSLIGDIDNAMRTFLNYYTVWKQFGGLPEFYNIPQGYTVEKREGYPLRPELIESAMYLYRATGDPTLLELGRDAVESIEKISKVECGFATIKDLRDHKLDNRMESFFLAETVKYLYLLFHPNNFIHNNGSTFDSVMTPHGECILGAGGYIFNTEAHPIDPAALHCCRRLKEEQWEVEDLIKEFYSLKQSRPKRAQRKTVRSGPWEPQSGPATLFSPANQPREKQPARQRTPLLSCPSQPFTSKLALLGQVFLDSS

SEQ ID NO: 58551 - DNA, 2949 bp, Drosophila melanogaster
  CDS (1)..(2949)
atgcagcaaaaaccccgaaacaacggctatccgggcaccctcatctgcgcggtcctcctcgtcctgctgtccaccggtgtcagcggccagaagcagtattccaaggcaagaaagttggaactgagggaggatgtgcggcgcatgttccagcacgcctacgatggttacctgcgccacgcctccaactacgatgaactgcgtccgctgacctgcgatggccacgacacctggggcagctactccttgacactgatcgacgctctggacacgctggccaccatgggcaacttcacggaattccgccgcgcggcaagactgctcgaggagaagatggattttgacagggacatcaacgtgtccgtgttcgagacaaacatccgcatcgtgggcgggctgctgtccgcgcatctgctctccaagcgtgctggcgtagagctagagccaggatggccctgcaagggacctctgctgcgactggcggaggatgtggcccgacgattattgccagccttcgtcacgaacacgggtatgccttatggcacggtgaacctgcgctatggcgtgcccaagggcgagacctctataacctgtacggcgggcgtggggacattcctcatcgaatttggtacccttagccggttgaccgggaaaaccatctacgaggatgttgctatgaaggcggtacatgctctatgggcatatcgctcgcccattggactttttggcaatcacatcgacgtgcagagcggtcgttggaccgccctcgactctggtatcggagcaggagtggattccctttttgaatacctagttaaggcatctgtcctgctcaatcgcccagaactcttggagttattccatgaggctcgcgcggccattgataagtacatgcggaaggaggactggtacgtgtgggtaggcatgaacaaaggccgcgtcacccttcccgtctttcagtccctggaggcgttttggcccggcatcctgagcattattggcgacacggagccggccttgcgcaccatatcacggtacattggggtctggaagaagtacggctttctgccagagttttataacattgctgctggagaggcatcgccgaatcgggaggtgtaccccctgcgaccggagctaatcgagtcagctatgtatctctatcgagccacaggaaacgagtatcttctggagtttggtgagcacatgctggagaccttggagttcagtgccaaaaccaaatgcggatatgcaacgattcgcaatgttgtcacccacgaaaaggagaatcgcatggagtcattcttcctggcggaaacaagcaagtacctttatctgctgtttgacgaggaaaacttcctgcacaacgatgggtccggaggcgagctgctgtcaaccgaggatgatgtatgcgtggtacaggccggtgcgtacatcttcaacacagaggctcatcccatggacatgtcagccctccactgttgccacgcccacaacgaggacatctacacctctctggatctacagcggtttagtccacgggcgatattagagaggagcaaaaagcggcaggtagctgttcaggaacagtgggtgccgcagtgtcacccagagaacaacgagttctttaataaagaggatgagagtgtgcaggcgcaggactctgaaaaagagcaggaacgcgagcaatccggcacaagcactaccatggccgtagatattgaggtgttcgacgaatttcaacagcccgccggcgatctgttagtaagcaacttcgagcagatacgcgaggagcgggagctaaacgagagcctgcacagaaacgtggtggcacgaaaccagttgacagtcagcgatttggatgaattctttgctcagcgacgggagagtttcgcaagcgcctccgaggctcttaactatgtaaagaccttcatgggcaactataccatggatgtagcctttatacggggcttgcaactgtacgatactaatatgagtagtgtattgggcacaggcgcccagaaagagtatgagtctcgaatgaggaccctttggcagctgtacgaactgcagcagcaatatgtggccaacatccgagtgattcaaggattaggtttgctaacctttccggcggacggtgaccggatacctagccatttgacagaggtgttggacagcctggataagtcggctcacttggagcatatggatctacaagatctcgaaacaagagtgtccaatacctcctcgccccagttggctcatataagagaagttattctaaaagcacgtaatgcctatgccatagccatggtcaatacttcggccatgcaggaatttgctatccgaatctacctcagtggcacttcggaggccggtgttcgcattcacccacttttggaagacggagaactaagtgaggaagcacgtaaaaggccattaaagttggcggaggagcgagccctcttcagctacgcccgtcgaatagtggactttcggaaacgaatggcggagacagttgatcgattgcagacgctcatgcaggacattccgccacccaaaaggaaagaggccactaccgactctcaggccgcagatgcgtccacagtctacactcaaaccaaagcccagatggcggcgcctgcacagcagccggagccgagccaggaagagaagcagtcgacacaaattcaaaaaggaaagcttgccgaaaacggctccggattgggtgaagaggagtccggctgcgtgtggtcgcagttggtgcagaccatccttcggaagaccacggtgcagcgggtcaaatttgacgaggccgtgctccaggaaaatacgcgcaaggcactggagaagtacgcccgcaaggagttaccccaccatctgttcgcctgccaccggccggagtacattgagggattcgcctatcgggacttttatccggaagcgctgtaa

SEQ ID NO: 58552 - protein, 982 aa, Drosophila melanogaster
MQQKPRNNGYPGTLICAVLLVLLSTGVSGQKQYSKARKLELREDVRRMFQHAYDGYLRHASNYDELRPLTCDGHDTWGSYSLTLIDALDTLATMGNFTEFRRAARLLEEKMDFDRDINVSVFETNIRIVGGLLSAHLLSKRAGVELEPGWPCKGPLLRLAEDVARRLLPAFVTNTGMPYGTVNLRYGVPKGETSITCTAGVGTFLIEFGTLSRLTGKTIYEDVAMKAVHALWAYRSPIGLFGNHIDVQSGRWTALDSGIGAGVDSLFEYLVKASVLLNRPELLELFHEARAAIDKYMRKEDWYVWVGMNKGRVTLPVFQSLEAFWPGILSIIGDTEPALRTISRYIGVWKKYGFLPEFYNIAAGEASPNREVYPLRPELIESAMYLYRATGNEYLLEFGEHMLETLEFSAKTKCGYATIRNVVTHEKENRMESFFLAETSKYLYLLFDEENFLHNDGSGGELLSTEDDVCVVQAGAYIFNTEAHPMDMSALHCCHAHNEDIYTSLDLQRFSPRAILERSKKRQVAVQEQWVPQCHPENNEFFNKEDESVQAQDSEKEQEREQSGTSTTMAVDIEVFDEFQQPAGDLLVSNFEQIREERELNESLHRNVVARNQLTVSDLDEFFAQRRESFASASEALNYVKTFMGNYTMDVAFIRGLQLYDTNMSSVLGTGAQKEYESRMRTLWQLYELQQQYVANIRVIQGLGLLTFPADGDRIPSHLTEVLDSLDKSAHLEHMDLQDLETRVSNTSSPQLAHIREVILKARNAYAIAMVNTSAMQEFAIRIYLSGTSEAGVRIHPLLEDGELSEEARKRPLKLAEERALFSYARRIVDFRKRMAETVDRLQTLMQDIPPPKRKEATTDSQAADASTVYTQTKAQMAAPAQQPEPSQEEKQSTQIQKGKLAENGSGLGEEESGCVWSQLVQTILRKTTVQRVKFDEAVLQENTRKALEKYARKELPHHLFACHRPEYIEGFAYRDFYPEAL

SEQ ID NO: 58553 - DNA, 1614 bp, Oryza sativa (japonica cultivar-group)
  CDS (1)..(1614)
atgcagccggcgctgcgacggcggcggcggcgccaaggcttcctcctccccttcgcctgcctctccgccgccctcatcgccgctgccctgctccccggcgccgctttcgccgatggcgtcacgccctccgaggcccgccggctccgcgacgaggtcaaagatatgttctatcatgcatttgatgggtacatgcaacatgcttttccacttgatgaattgcggcctttaagttgccaaggagaagattcacttggtggctatgcacttactcttatagactctttggataccttggctttactaggggataaggagagatttgatgctgccgtggagtgggttggtaagaatgtccgctttgatattggaatgagaattcaatcttatgatgatcagttgcttcatttagcggctgacttagctcaaagattgctacctgcatttgacactccaacagttttggttgtttatcctctgaacactaatttagttcttatcgccagtctgttattctttgttaaactcactgattgtcacgatgcagtttatgaacgagttacaaaaaactctgtgcgtggaatatgggcacgcaggtcgaaacttgaccttgttggtgcccatataaatgtatttactggtgaatggacacagaaggatgcaggaattggcacaagcattgactcattctatgagtatcttctaaaggtgttagctggagatgttgatcctgccattcgaactcatgctgccttcttcagtgtatggaaaaaatatggcttcaccccagaagggtttaatcttgctacatccactgttcagaatggacaaaggagctacccgctgcggcctgaattgattgaaagcacatattggctgttcaaggctactagagattataggtaccttgatgttggaagggatatattagcaagccttcaatatggtgctaaatgtccatgtggttactgccatatttcagatgtagaaacccaccagcaggatgaccacatggagagttttttccttgcagaaacaataaccttgttagatgagcattgcttgtatgctggagcattctgcaatggtactgcaggccatggatatggtaccggtgatagttctaataagcatcaaaatgcaaactctgttccgttcgatgatagtcgaacaccttccgatcaatctttatccaatattttgtctacgacaagagggtacatcaagggagtttgtccaggattaactcatgcccagaaacttggcatatcatactctgccgaggaggataactcaatacagcagaattctggaagtagtgagaatcttgatgaatcacacgtgatcaaatccagtgtccaagctcaatcaagttctgttatattgatatcgcatccagtcgcaagccaaactgaggagcctacgtcgggcagaagtcagtacaatgcaaacattgtggcaactgctgagtctgtagggactgatactgccggcgcctcatcccaccccgaggatcttgttaaggaaactgagagcgtctctgaacagaaagaaatcaatgacaaagagatcgcttctcagggtagtcaaccgaccgaaggaagatacctgacctaa

SEQ ID NO: 58554 - protein, 537 aa, Oryza sativa (japonica cultivar-group)
MQPALRRRRRRQGFLLPFACLSAALIAAALLPGAAFADGVTPSEARRLRDEVKDMFYHAFDGYMQHAFPLDELRPLSCQGEDSLGGYALTLIDSLDTLALLGDKERFDAAVEWVGKNVRFDIGMRIQSYDDQLLHLAADLAQRLLPAFDTPTVLVVYPLNTNLVLIASLLFFVKLTDCHDAVYERVTKNSVRGIWARRSKLDLVGAHINVFTGEWTQKDAGIGTSIDSFYEYLLKVLAGDVDPAIRTHAAFFSVWKKYGFTPEGFNLATSTVQNGQRSYPLRPELIESTYWLFKATRDYRYLDVGRDILASLQYGAKCPCGYCHISDVETHQQDDHMESFFLAETITLLDEHCLYAGAFCNGTAGHGYGTGDSSNKHQNANSVPFDDSRTPSDQSLSNILSTTRGYIKGVCPGLTHAQKLGISYSAEEDNSIQQNSGSSENLDESHVIKSSVQAQSSSVILISHPVASQTEEPTSGRSQYNANIVATAESVGTDTAGASSHPEDLVKETESVSEQKEINDKEIASQGSQPTEGRYLT

SEQ ID NO: 58555 - DNA, 1575 bp, Danio rerio
  CDS (1)..(1575)
atgcaatggaggtcaatagtcgtgggtctccttgttttaagagtgctgctcaattgcgcggtgtggctcgtgtttggactgggacccagctggggctttgacttccccattaaattcacgttcaactcgcataaaattgaacttttcaatgatggcgaaagagccaccgtgaaaactaacgcctggttgcggcacctttatgacagcagaaaccctcaagcgaagacctgctccaagatcagcgggaattcgccaaagaagtcctacctcagtttctttgaggagggcagagatgagtatgacagaaagtacagctctttcccggacgccctcaaagtcaagatgagggccatggcgcgggacatgttttatttcggatatgataactacatgaagtttgcctttccagaggatgaactgaaccctatagcatgtgaaggtcgagggcctgacgtgctcaatccgtcaaatatcaacatcaatgatgttcttggaaactactctttaactctcatcgatactcttgatacactgttggttctcggaaatgtgaccgaatttcatcgagctgttaaattggtgattgatacagtatcttttgacaaggactccactgttcaagtctttgaggccaacattagaatccttggcagtttgatctcagcccacattctgctgactgacccacggcacccgtttggagatgtaggactgaaagactatgacaatgagctgctacacctggcacatgatcttgccgttcgactactacctgctttcgagaacactagcacaggcatcccttatccaagggtgaatttaaagaatggtgttcctcctgacagcattaatgagacctgtacggcaggggcaggctctctgctcgtggagtttggtattcttagccgtctgattggtgactctacatttgaatgggtcgcccggcgggctgttaaagctctgtggagattaagaagcaatgaaactggactattggggaatgtggttaatattcagactggccagtgggtgggcaagcagagcggtctgggcgccggcatggactcattttatgagtacctcctcaagtcttacatcttgtttggagagaaagaagactttaggatgttcactgcagcctatgagagcattcagagccacctgagaagaggaagagaggcgtgtaatgaaggagaaggtgacccaccactctatgtgaatgtgaacatgttcaacggacagatcatgaacacatggattgactctctgcaggcattcttccctggactacaggttttaaacggagatgttgaaaatgccatttgccttcatgccttctactatgcaatctggaagcgtttcggtgctcttcctgagaggtacaactggcagcttcaggccccagatgtccttttctaccccttaagacctgaactagtggagtccacatacctgctctatcaggcaaccaagaatccattttatcttcatgttgggatggacattcttgaaagccttgaaaaaaaataccaaagtgaggtgtggttacgctactcttcatcatgtagtggataa

SEQ ID NO: 58556 - protein, 524 aa, Danio rerio
MQWRSIVVGLLVLRVLLNCAVWLVFGLGPSWGFDFPIKFTFNSHKIELFNDGERATVKTNAWLRHLYDSRNPQAKTCSKISGNSPKKSYLSFFEEGRDEYDRKYSSFPDALKVKMRAMARDMFYFGYDNYMKFAFPEDELNPIACEGRGPDVLNPSNININDVLGNYSLTLIDTLDTLLVLGNVTEFHRAVKLVIDTVSFDKDSTVQVFEANIRILGSLISAHILLTDPRHPFGDVGLKDYDNELLHLAHDLAVRLLPAFENTSTGIPYPRVNLKNGVPPDSINETCTAGAGSLLVEFGILSRLIGDSTFEWVARRAVKALWRLRSNETGLLGNVVNIQTGQWVGKQSGLGAGMDSFYEYLLKSYILFGEKEDFRMFTAAYESIQSHLRRGREACNEGEGDPPLYVNVNMFNGQIMNTWIDSLQAFFPGLQVLNGDVENAICLHAFYYAIWKRFGALPERYNWQLQAPDVLFYPLRPELVESTYLLYQATKNPFYLHVGMDILESLEKKYQSEVWLRYSSSCSG

SEQ ID NO: 58557 - DNA, 2451 bp, Eremothecium gossypii
  CDS (1)..(2451)
atgaattgggaagacatcttatgtgccatattttgctctttattctttgcagtagttgcagcctcggagctgttttcacccttctccttcaacaaatatgagctagagcattacaaaaacgagatccgctctctcttctatcatggatacgaccaatacctacagcatggatatccatttgatgaggtcaggcccatatcatgcgtccccaacaagcgaaactttcaagatccctacgacatcagtacgaatgatgtcctaggcaacttcacgaccacgcttattgactcattgactaccattgcagtcatgggagacgtagacaaattcctggagggagtagagctggtgaacaaggtaatacctgcagatttttcactaaatgtcacggtgcaggtgtttgagacgacgatcaggcttgttgccggcctcatgtcagcgcatttatatgctgtggaccccaccaagaaagtttacctcggctcgcaatatgatggccacctgctcgccaaggcaaagaagctagcggaccgactacttccggcctatttaacagaaactggtctacccgttccacgcgttaacctagctaacgggctggaaggagttccggaagagctactgcaagaaaacaatgctgctgcaagcgcctcaccgatgcttgagttcacaatgctttcgtatctgacgtttgatgaaaagtatcggctgatcgctcggtatgcctttaacaagacctggtcgcttcggagtgacctcaaccttctcccaatgtcttttaatccgcatacggaagatgtctatcatcctatgactggtgttggggcttcaattgactccttctacgaatatgccataaaaggctccattctttttgacgactctgatctccatagtgtatgggaaacggcatattatgctttatccgtctattcgaaatctgattggttctttcagaacgtccatactgcaaccggtgatattgtaacgccctggatcgattccctgagcatgtttttccctatgctgcaggttttacatggtgacattgcggatgccgaactaaagaaccttatgtctttgaaactctggaacacttacggcggaattcctgaacgctggctattcactactctctacaagaaacagcaagttaccgtaaatgataccgtgcagctcgagtggtatcctttacggccagagtttgtagaatcaacctattccctttacagggccactaaagacgcattttatctgaatatcggacgaagcatcctccaggctctatcaacgcgctttaaaacgaaatgtgggtttgcgggcatacaaaacgtcataacgggagagccacatgataggatggaatcgttcgttttgggcgagaccttaaaatatctctatctcctctttgacgtatccaatgaattgcatacacaaaaacgcactaaccaaatatttagcactgaggcgcatccactgtggttgactgcctcgatgaaggctcgctacgaaaagaacaagtactgtgaaaacgacgtgtatatacagaacttgcgtcgcctacaggagcttgaccagctgaaaagccgtgccaattcatccactgcagaggaagccatgataccagctccagatttcaaaacagaagactccgaggagtctttgaaggaccgcgttgcagcgccaatactagaggcctcacacgtagaatacgaccacgttcgtggaacatgcagacctctccgccgcaacaaatccgccttctatgactcgcacctgctgaaccatttccaccgcctctttgagatcgactaccgttacaatgtcacgctgctgcgtccgcactggatgcgaagccagcacgcgatagagctggcgagcgggtttcctcgccgctggagcacggctgccgcacagtcgcagctggccacgaatacggtctcgctagagctcattttggatggcgcaaaccgcccgctctttcccccgcagtcgacccgtgactgtttctaccgctactttccagccttgcgatgctcccgcctccgggtcgagcgcatcacccccaacgccacatcatcctacgggctgcaagtcgcgccggcagctttctgcggcctgtcctacgaaagcatcgccgggcccgcctgcgaccgtagccttcccgaatttctgctgcttaccgccgtggacggccaggccatcgcacaagaggaagtggttctcgtggactacgaagatcttttcgggcctcacgccctgcatctgaaacacgtactcggctacaatgcgcagcaccaactcctgctcaactgcgttcctgtcgtgaacgtctacgttcagtggagcggccacgccgccaaggcgcactttggcagctgccgaactgctgccttacataatccagcccaagattttcaatgcagccctttacataaccggatagattga

SEQ ID NO: 58558 - protein, 816 aa, Eremothecium gossypii
MNWEDILCAIFCSLFFAVVAASELFSPFSFNKYELEHYKNEIRSLFYHGYDQYLQHGYPFDEVRPISCVPNKRNFQDPYDISTNDVLGNFTTTLIDSLTTIAVMGDVDKFLEGVELVNKVIPADFSLNVTVQVFETTIRLVAGLMSAHLYAVDPTKKVYLGSQYDGHLLAKAKKLADRLLPAYLTETGLPVPRVNLANGLEGVPEELLQENNAAASASPMLEFTMLSYLTFDEKYRLIARYAFNKTWSLRSDLNLLPMSFNPHTEDVYHPMTGVGASIDSFYEYAIKGSILFDDSDLHSVWETAYYALSVYSKSDWFFQNVHTATGDIVTPWIDSLSMFFPMLQVLHGDIADAELKNLMSLKLWNTYGGIPERWLFTTLYKKQQVTVNDTVQLEWYPLRPEFVESTYSLYRATKDAFYLNIGRSILQALSTRFKTKCGFAGIQNVITGEPHDRMESFVLGETLKYLYLLFDVSNELHTQKRTNQIFSTEAHPLWLTASMKARYEKNKYCENDVYIQNLRRLQELDQLKSRANSSTAEEAMIPAPDFKTEDSEESLKDRVAAPILEASHVEYDHVRGTCRPLRRNKSAFYDSHLLNHFHRLFEIDYRYNVTLLRPHWMRSQHAIELASGFPRRWSTAAAQSQLATNTVSLELILDGANRPLFPPQSTRDCFYRYFPALRCSRLRVERITPNATSSYGLQVAPAAFCGLSYESIAGPACDRSLPEFLLLTAVDGQAIAQEEVVLVDYEDLFGPHALHLKHVLGYNAQHQLLLNCVPVVNVYVQWSGHAAKAHFGSCRTAALHNPAQDFQCSPLHNRID

SEQ ID NO: 58559 - DNA, 1785 bp, Xenopus tropicalis
  CDS (1)..(1785)
atgcggtggtgctctgtgctgctggggctgctgcttctgcggcttgggctacacgctctgcggggtcttatcctgcccggaacgtctcctgtagtggtgccgggagtccatgctgtgtgccgagcctcgtatggccgctttgtcctgggagccggggatgagtacggccgccgctacagctctttccctgaggggctgcggaaagaaatgcgggagatggcccgtgggatgttctcattcggctatgacagctacatgaagtacgcctttcccgaggatgagctcaaccccatcctgtgccggggacgcgggccagaccacggagacccttcaaatctaaacatcaatgatgtccttgggaattactccctaaccctgattgatgcactggacactttagcggtgatgggcaatgccactgagtttcacagagctgttcgcttggtgattgacacagtttcctttgataagaattcaacggtgcaagtgtttgaggctactattcggattctaggcagcttactgtcagcccacataatcctaacggacagcaagcagccttttggcaacatgacactaagtggttatgataatgaacttcttcatatggctcgtgacctcgcagttagacttctgcctgcgtttgagaacaccaagacaggcatgccttatcccagggttaatctgaagaagggggtccctccagatagcagaaatgagacctgcactgccggggccggttcactgcttgtggagtttggaatcctaagtcggcttttgggggactccacgtttgagtgggttgctcgccgggctgtcagagccctctggagtttacgaagcaatgataccggcctccttggaaacgtggtgaacatacagactgggcagtgggttggaaaacaaagcggcctgggagctgggttggactcattctttgaatatttgctcaagtctcacatcctgtttggagaggaagaggatttggaaatgtttaatgaggcttacaagagtatccagaaccacctacgcagggggcgtgaagcatgtaatgaaggagagggggacccgccattgtatgtgaatgttaatatgcttaatggtcagctcatgaacacttggattgactcgctgcaggctttcttccccgggctgcaggtcttaaagggagatattgaggatgccatttgcctgcatgctttttattatgccatttggaagcgatatggagctttacctgaacgatacaactggcaactacaggcccctgatgtctccttctaccctctcaggccagagttggtagagtccacatatcttttataccaggccaccaagaaccccttctatctgcatgtgggaatggatattctgttgagcctggagaagcatgctaaggccaagtgtggatatgcaactttacaccatgttgtggacaaatctcaggaggatcggatggagagcttcttcctgagtgaaacttgcaaatacctctacctgctgtttgatgaggataatccgctgcatcgggttgataataagtaccttttcaccactgagggccacctgatcccacttgacccgcgtttgagggacacttcatggcaggacatcttccataataaaaacaaagtgcagcaaacccaggagaaactgtcacagacaaagctcagaactgctaactccagcacaaattgttataaggttccggaagagcgcaggttttcactaccgctgaagagtgtctacatgcgccagattgaccagatggttgggctgttgtaa

SEQ ID NO: 58560 - protein, 594 aa, Xenopus tropicalis
MRWCSVLLGLLLLRLGLHALRGLILPGTSPVVVPGVHAVCRASYGRFVLGAGDEYGRRYSSFPEGLRKEMREMARGMFSFGYDSYMKYAFPEDELNPILCRGRGPDHGDPSNLNINDVLGNYSLTLIDALDTLAVMGNATEFHRAVRLVIDTVSFDKNSTVQVFEATIRILGSLLSAHIILTDSKQPFGNMTLSGYDNELLHMARDLAVRLLPAFENTKTGMPYPRVNLKKGVPPDSRNETCTAGAGSLLVEFGILSRLLGDSTFEWVARRAVRALWSLRSNDTGLLGNVVNIQTGQWVGKQSGLGAGLDSFFEYLLKSHILFGEEEDLEMFNEAYKSIQNHLRRGREACNEGEGDPPLYVNVNMLNGQLMNTWIDSLQAFFPGLQVLKGDIEDAICLHAFYYAIWKRYGALPERYNWQLQAPDVSFYPLRPELVESTYLLYQATKNPFYLHVGMDILLSLEKHAKAKCGYATLHHVVDKSQEDRMESFFLSETCKYLYLLFDEDNPLHRVDNKYLFTTEGHLIPLDPRLRDTSWQDIFHNKNKVQQTQEKLSQTKLRTANSSTNCYKVPEERRFSLPLKSVYMRQIDQMVGLL

SEQ ID NO: 58561 - DNA, 1878 bp, Mus musculus
  CDS (1)..(1878)
atgctggtgaggaaagtgccgggtttcgtcccggcctcgccgtgggggctgcggctgccgcagaagttccttttcctgctcttcctctcgggcctcgtcaccctgtgctttggcgccctgttccttctgccccattcctctcgcctcaagcgcctcttctcggcctcgcggacccaacagcccggcctggaggtgatggccgaaatcgccggtcaccactcggtgtcagagcaggagccgcctcccaaccctgcccctgcggctccggccccgggtgaggacgatcccagccgcctggtcggtgttctccgtaggaaagggtggctgcggcgaacccgccccaccgggccccgggaggaaggcaacagggttgcagccctcaggcctcaggaagagagcgtccggttcactttcgactacaatggtttccgcagccgccttcgacacccggtcttggggacaaggactgatgagagtaaggagtcccagagtctggtgcgagctcagcgagagaaaatcaaagagatgatgcggttttcctggcagaattaccgccgttatgcgatgggcaagaatgagctccggccactcacaaaggacggcttcgagggcagcatgtttggcggtctcagtggggctaccatcatcgattctcttgacaccctctacctcatggagctgaaagaggagttccaggaggccaaggcctgggtgcaagacagcttccacctgaacgtgagtggagaagcatctttgtttgaagtgaacatccggtatatcggaggactgctctcggccttctacctgactggagaagaggtgttccgagtgaaggccatcaagctgggtgagaaactgctgcctgccttcaacacacccacgggcatccccaagggcgtggtcaacttcaaaagcggtagctggggctgggccacggcaggcagcagcagcatcctggccgagtttgggtccctgcacttggaattcctgcatctcactgaactctctggcaatccagtctttgcagaaaaggtcaaacatatccgcaaggtcctcagggagattgacaaacccttcggtctctaccccaacttcctcagccccacgagtggaaactgggtgcagcatcatgtctcggtaggaggacttggggacagtttttatgaatatttgatcaagtcctggttgatgtcagccaaaacagatatggaggctaaaaatatgtactacgaagccttggaggccatagagacctatctcgtgaatgtctctcccgggggcctgacctacattgctgagtggcgtggaggaattctggaccacaagatgggacaccttgcctgcttctcagggggcatgatcgcccttggtgcagatgatgccaaggaagataaaagagcctactaccgagagcttgcagcccagatcaccaggacgtgccatgagtcctatgcccgctcagacaccaagctggggcctgaggccttctggttcaactctggccgagaggcggtggccacacaactgagcgagagctactacatcctgcgccccgaggtggtagagagctacatgtacctatggcggcagacgcatgaccccatctacagggagtggggctgggaggtggtcatggccctggagaaacactgtcggacggaagccggcttctcggggatccaggacgtgtacagcagtaaccccaaccatgacaacaggcaacagagcttcttcctggctgagacgctgaaatacctctatcttctgttctctgaagataacgtgctgtcactggaagactgggtgttcaacaccgaggctcatccgctgcccgtcaaccgctcggacagctttagcatagctggccaccctcactga

SEQ ID NO: 58562 - protein, 625 aa, Mus musculus
MLVRKVPGFVPASPWGLRLPQKFLFLLFLSGLVTLCFGALFLLPHSSRLKRLFSASRTQQPGLEVMAEIAGHHSVSEQEPPPNPAPAAPAPGEDDPSRLVGVLRRKGWLRRTRPTGPREEGNRVAALRPQEESVRFTFDYNGFRSRLRHPVLGTRTDESKESQSLVRAQREKIKEMMRFSWQNYRRYAMGKNELRPLTKDGFEGSMFGGLSGATIIDSLDTLYLMELKEEFQEAKAWVQDSFHLNVSGEASLFEVNIRYIGGLLSAFYLTGEEVFRVKAIKLGEKLLPAFNTPTGIPKGVVNFKSGSWGWATAGSSSILAEFGSLHLEFLHLTELSGNPVFAEKVKHIRKVLREIDKPFGLYPNFLSPTSGNWVQHHVSVGGLGDSFYEYLIKSWLMSAKTDMEAKNMYYEALEAIETYLVNVSPGGLTYIAEWRGGILDHKMGHLACFSGGMIALGADDAKEDKRAYYRELAAQITRTCHESYARSDTKLGPEAFWFNSGREAVATQLSESYYILRPEVVESYMYLWRQTHDPIYREWGWEVVMALEKHCRTEAGFSGIQDVYSSNPNHDNRQQSFFLAETLKYLYLLFSEDNVLSLEDWVFNTEAHPLPVNRSDSFSIAGHPH

SEQ ID NO: 58563 - DNA, 1716 bp, Rattus norvegicus
  CDS (1)..(1716)
atgactaccccagcgctgctgcccctgtctggtcgtaggataccacctctgaacctggggccgccctccttcccacatcacagggctaccttgagactctccgagaagtttatccttctcctcatccttagtgccttcatcaccctgtgttttggggcattcttcttccttccagactcttcaaaacacaaacgctttgatctgggcttagaagatgtgttaattcctcacgtagatgcgggcaaaggggctaaagaccccggagtcttcctgattcatggacccgacgaacacagacacaggttcgtttgtttctcaaattctggtactcccttttgggagagcaagatgatgaaacatgcctgggataattacagaacatacggatggggccataatgagctcagacctattgcaaggaaagggcattccactaacatattcggaagctcacagatgggggccaccatagtggatgctttggataccctttatatcatggggcttcatgatgaattcatggatgggcaaagatggattgaagacaaccttgatttcagtgtgaactcggaagtgtctgtgtttgaagttaacattcgctttattggagggctccttgcagcatattacctgtcaggagaggaaattttcaagactaaagcagtgcagttggctgagaagctccttcctgcctttaacactcctactgggattccttgggcaatggtgaacctgaaaagtggagtaggtcggaactggggctgggcatctgcaggcagcagcatcctggctgaatttggcaccctgcacatggagttcgtgcacctcagctacttgactggtgacctgacttactataataaggtcatgcacatccggaaactactacagaaaatggaacgcccaaatggtctttatccaaattatttaaacccgaggacagggcgctggggtcagtatcacacatcagttggtggcctaggtgacagtttttatgaatacttactaaaagcatggctgatgtcagataaaacagaccacgaggcaagaaggatgtacgacgacgctgttgaggctatagagaaacatcttattaagaagtcccgaggaggtctagtctttattggagaatggaaaaatggacacttggaaaggaagatgggtcatttggcctgctttgctgggggaatgtttgcacttggagcggatggttccagaaaggataaagctggccactatttagaactaggggcagaaattgcacgaacatgccatgagtcatatgacagaactgcattaaaactaggtcctgagtcattcaagtttgatggtgcagtggaagcagtggctgtgcggcaagctgagaagtattacatccttcgtccggaagtgatcgaaacctattggtatctatggcgattcacccacgacccaagatacaggcagtggggctgggaagccgcattggctattgagaagtcctgccgagtcagtggtgggttttctggtgtcaaggatgtctactccccgactcctgcgcacgacgacgtgcagcagagcttttttcttgccgagacgttaaaatacttgtacctgctgttctctggcgatgacctcctacctttagaccactgggtgtttaatacagaggctcatcctctgccggtgttgcgtttagccaacaccactctttcaggtaaccctgctgttcgatga

SEQ ID NO: 58564 - protein, 571 aa, Rattus norvegicus
MTTPALLPLSGRRIPPLNLGPPSFPHHRATLRLSEKFILLLILSAFITLCFGAFFFLPDSSKHKRFDLGLEDVLIPHVDAGKGAKDPGVFLIHGPDEHRHRFVCFSNSGTPFWESKMMKHAWDNYRTYGWGHNELRPIARKGHSTNIFGSSQMGATIVDALDTLYIMGLHDEFMDGQRWIEDNLDFSVNSEVSVFEVNIRFIGGLLAAYYLSGEEIFKTKAVQLAEKLLPAFNTPTGIPWAMVNLKSGVGRNWGWASAGSSILAEFGTLHMEFVHLSYLTGDLTYYNKVMHIRKLLQKMERPNGLYPNYLNPRTGRWGQYHTSVGGLGDSFYEYLLKAWLMSDKTDHEARRMYDDAVEAIEKHLIKKSRGGLVFIGEWKNGHLERKMGHLACFAGGMFALGADGSRKDKAGHYLELGAEIARTCHESYDRTALKLGPESFKFDGAVEAVAVRQAEKYYILRPEVIETYWYLWRFTHDPRYRQWGWEAALAIEKSCRVSGGFSGVKDVYSPTPAHDDVQQSFFLAETLKYLYLLFSGDDLLPLDHWVFNTEAHPLPVLRLANTTLSGNPAVR

SEQ ID NO: 58565 - DNA, 1968 bp, Rattus norvegicus
  CDS (1)..(1968)
atgcccgtggggggcctgttgccactcttcagtagccctgggggcggaggcctgggcggtggcctgggcgggggtcttggcggcgggaggaaggggtctggccccgccgccttccgcctcactgagaagttcgtgctgctgctggtgttcagcgccttcatcacgctctgcttcggggcaatcttcttcctgcctgactcctccaagctgctgagcggggtcctgttccactccaaccctgccttgcagccaccggcggagcacaagcccgggctcggggcgcgtgccgaggatgccgccgaagggagagtccggcaccgcgaggaaggcgtgcctggggaccctggagctggactggaggataacttagccagaatccgtgaaaaccacgagagggctctcagggaagccaaggaaaccctgcagaagctgccagaggagatccaaagagacattctgctggagaaggagaaggtggcccaggaccagctgcgtgacaaggatctgtttgggggcttgcccaaggtggacttcctgccccccatcggggtagagaaccgagagcctgctgacgccaccatccgtgagaagaggtcaaagatcaaagagatgatggcccatgcttggaataattataaacgctatgcgtggggcttgaacgaactgaaaccgatatcaaaagaaggccattcaagcagtttgtttggcaacatcaaaggagctacaatagtagatgccctagatacccttttcattatgggtatgaagactgaatttcaagaagctaaatcatggattaaaaaatacttagattttaatgtgaatgctgaagtttctgtttttgaagtaaacatacgtttcgttggtggattgctgtcagcctactatttgtccggagaggagatatttcgaaagaaagcagtggaacttggggtaaaattgctacctgcatttcatagtccctctggaataccttgggcattgctgaatatgaaaagtgggattggacgtaactggccctgggcctctggaggcagcagtattctggcagaatttggaactctccatttggagttcatgcacttggcccacttatcaggaaatcccgtctttgccgaaaaggtaatgaatattcgaacagtgctgaacaagctggacaaaccagaaggcctttatcctaactacctgaaccccagtagtggacagtggggtcaacatcatgtgtcagttggaggacttggagacagcttttatgaatatttgctcaaggcatggttaatgtctgacaagaccgatctcgaagccaagaagatgtattttgatgctgtccaggccatcgagactcacttgatccgcaagtcaagtgggggactaacgtacatcgcagagtggaaagggggcctcctggagcacaagatgggccacctgacgtgctttgcaggggggatgtttgcacttggggccgacggagctccagaagctcgggcccaacactaccttgaactcggagctgagatcgcccgcacctgtcacgagtcttacaaccgcacatatgtgaagttggggccagaagcgtttcgatttgatggcggcgtggaagccattgccacgaggcaaaatgagaagtattacattctacggccagaggttatcgagacatacatgtacatgtggcgtctgacccatgatcccaagtacaggacctgggcctgggaagccgtagaggccctagaaagccactgtagagtgaacggaggctactcaggcctacgggatgtttacattgcccatgagagttatgacgacgtccagcaaagcttcttcctggcagagacactgaagtatctgtacttgatattttccgacgatgaccttcttccactggaacactggatcttcaacaccgaggctcatcctttccctatactccgtgaccagaagaaagaagttgatgtccaggagaaatga

SEQ ID NO: 58566 - protein, 655 aa, Rattus norvegicus
MPVGGLLPLFSSPGGGGLGGGLGGGLGGGRKGSGPAAFRLTEKFVLLLVFSAFITLCFGAIFFLPDSSKLLSGVLFHSNPALQPPAEHKPGLGARAEDAAEGRVRHREEGVPGDPGAGLEDNLARIRENHERALREAKETLQKLPEEIQRDILLEKEKVAQDQLRDKDLFGGLPKVDFLPPIGVENREPADATIREKRSKIKEMMAHAWNNYKRYAWGLNELKPISKEGHSSSLFGNIKGATIVDALDTLFIMGMKTEFQEAKSWIKKYLDFNVNAEVSVFEVNIRFVGGLLSAYYLSGEEIFRKKAVELGVKLLPAFHSPSGIPWALLNMKSGIGRNWPWASGGSSILAEFGTLHLEFMHLAHLSGNPVFAEKVMNIRTVLNKLDKPEGLYPNYLNPSSGQWGQHHVSVGGLGDSFYEYLLKAWLMSDKTDLEAKKMYFDAVQAIETHLIRKSSGGLTYIAEWKGGLLEHKMGHLTCFAGGMFALGADGAPEARAQHYLELGAEIARTCHESYNRTYVKLGPEAFRFDGGVEAIATRQNEKYYILRPEVIETYMYMWRLTHDPKYRTWAWEAVEALESHCRVNGGYSGLRDVYIAHESYDDVQQSFFLAETLKYLYLIFSDDDLLPLEHWIFNTEAHPFPILRDQKKEVDVQEK

SEQ ID NO: 58567 - DNA, 2271 bp, Rattus norvegicus
  CDS (1)..(2271)
atgtactatggagaaattgacattaataaggactgtgagtctggaggggctggagaatacaaaagctggagggagtccccggccgcgcccctcgaggccgggcccgtgcgaggccaatccggggcgaccggcgggcgaacgcggggccaggcgggccgggcaggtccgcggggcgggggacaatggatcagttcctggtgcgtcacgagggagttccttaaaggggaagtgagcgggctcccggcggacgcgcggggaggccgtcggctggggacgcgcccggcgcttcaaaataatgcccgcggcggccgcgcgaccatgcaatggcgagcgctcgtcctggggctggtgctgctgcgcctcggcctccacgcagtgctctggttggtcttcgggctggggcccagcatgggcttctaccagcggtttccgctcagtttcggcttccagcgcttgagggaccccgacggctcggggccagttggtcctccgggaggcccgtcctggcttcatcggccaaggcgcgggacagaggggcggctcgagaccccgccgggaccagggccgggaccgggcgtgtgcggcccggcgcactggggctatgctttgggcggcggtggctgcggcctggacgagtacgagcggcgctacagcggcgccttcccgccgcagctgcgtgcccagatgcgcgacctggcgcggggcatgttcgtcttcggctatgacaactacatggcgcacgcctttccgcaggacgagctcaaccccatctactgccgcggccgggggcctgacctcggagacccttcaaatctgaacatcaacgatgtactaggaaattactctctgaccctggttgatgccttggatacactcgcaataatgggaaattcatccgagttccagaaagcagtcaagttagtgatcaacaccgtttcatttgacaaagattccaccgtccaagtctttgaggccacgataagggttctgggaagcctcctttctgctcatagaataataactgactccaaacagccctttggtgacatgacaattgaggattatgataacgaattgttgtacatggcccatgacctggctgtgcggcttcttccagcttttgaaaacaccaagacagggatcccctatcctcgggtgaatctgaagacgggtgtccctcctgacagcaataatgagacctgcacagcaggggctggttctctcctggtggaatttgggattctgagccgactgctgggggattccacttttgagtgggttgccagacgagctgtgaaagccctctggaaccttcggagcaacgatacaggattattaggcaatgttgtgaacatccagacaggccattgggttggaaagcagagtggcttgggtgctgggctggattccttctatgaatacctcttgaaatcttacattctttttggagaaaaagaagatctagagatgtttaatgcagcttatcagagcatccagagctacctgcgaagaggccgggaagcctgcaatgaaggagaaggagacccaccgctctacgtcaacgtgaacatgttcagtgggcagctcatgaacacctggattgactctctgcaggctttcttcccggggctgcaggttctgataggggatgtggaagacgccatctgcctacacgccttctactacgccatatggaaacgctatggggccctccctgagcgctataactggcaactgcaggcccctgatgttctcttctaccccctgagaccagagttagtggagtccacatatctcctctaccaggcgaccaagaatcccttctacctccatgtaggaatggacattctgcagagtctcgaaaaatacacaaaagtcaaatgtggatatgccacgctgcaccatgtcatagacaagtctaaagaagaccggatggagagcttcttcctcagcgagacttgcaaatacttgtatctgctgtttgatgaagagaatccagtacacaaatctggaaccagatacatgtttacaactgagggccatatcatatctgtggacaaacgtcttcgggaattgccttggaaggaattcttctctgaagatggggagcgggaccaagaggaaaagtttgtgcacaggcctaagtctcaggagcttagagtcattaactccagttctaattgcaatcgtgttcctgatgagaggagatactccctgcccttaaagagcatctacatgcgccagatcgaccagatggttggcttgatttga

SEQ ID NO: 58568 - protein, 756 aa, Rattus norvegicus
MYYGEIDINKDCESGGAGEYKSWRESPAAPLEAGPVRGQSGATGGRTRGQAGRAGPRGGGQWISSWCVTREFLKGEVSGLPADARGGRRLGTRPALQNNARGGRATMQWRALVLGLVLLRLGLHAVLWLVFGLGPSMGFYQRFPLSFGFQRLRDPDGSGPVGPPGGPSWLHRPRRGTEGRLETPPGPGPGPGVCGPAHWGYALGGGGCGLDEYERRYSGAFPPQLRAQMRDLARGMFVFGYDNYMAHAFPQDELNPIYCRGRGPDLGDPSNLNINDVLGNYSLTLVDALDTLAIMGNSSEFQKAVKLVINTVSFDKDSTVQVFEATIRVLGSLLSAHRIITDSKQPFGDMTIEDYDNELLYMAHDLAVRLLPAFENTKTGIPYPRVNLKTGVPPDSNNETCTAGAGSLLVEFGILSRLLGDSTFEWVARRAVKALWNLRSNDTGLLGNVVNIQTGHWVGKQSGLGAGLDSFYEYLLKSYILFGEKEDLEMFNAAYQSIQSYLRRGREACNEGEGDPPLYVNVNMFSGQLMNTWIDSLQAFFPGLQVLIGDVEDAICLHAFYYAIWKRYGALPERYNWQLQAPDVLFYPLRPELVESTYLLYQATKNPFYLHVGMDILQSLEKYTKVKCGYATLHHVIDKSKEDRMESFFLSETCKYLYLLFDEENPVHKSGTRYMFTTEGHIISVDKRLRELPWKEFFSEDGERDQEEKFVHRPKSQELRVINSSSNCNRVPDERRYSLPLKSIYMRQIDQMVGLI

SEQ ID NO: 58569 - DNA, 1365 bp, Anopheles gambiae str. PEST
  CDS (1)..(1365)
atgggcccaacaaacgacagacagcgggccgtggttgatgccgtactgcattcctggaaagggtacaaggagtacgcctgggggcacgataatttaaagcccatctcgatggggtactccgactggtttgggctcggccttactctggtcgattccctcgatacgctctacattatggatttgcaggacgagtacgatgaagcgcgagcgtgggtcgagaagtacttaaagtttgacattaaccgtgaagtcaacttgtttgaagtaaccatccgtgtcgttggtgggctgttgagtgcgtaccatctgagcggcgatcgtatgtttctcgacaaggccatcgatctcggcaatcggttgttgccgtgcttcgattcaccgtcgggcattccgttttcggacgtgaacattggatcgcttgccgcacatgcgcctaaatggtcgcccgacagttccacgagcgaggtaacgaccatccagctggaatttcgtgacttgtcccgtgcctcccagaatcccgtcttcgaaaaggtggcatcgagagtgaatcttaaaatacacgagctagataaaaacgaaggtttggtgcctatcttcatcaacgctaacacagggcagtttcgcaattttgcaacggtttcgttgggagcgcgcgccgactcgtactacgagtatctgctgaaacaatggcttcagacgggcaaaaaggccgatgactatcttatcgaagactatcaaaagtcgatgcgaggcgttctgaatcagctcgtgcgaacaactccgaacgaaaagcacgtctacatcggcgaattgctcaatgggaaggacttcaagcccaagatggaccatctaacgtgttaccttcccggcacgctgctgctcggctacaagaacggaatgccaaagacgcatctgcgactggcaaccgatctactggaaacgtgctatcaaacgtacatgaagcaaccgacccagctagcaccggaaatatcgtacttcaacgtgaacggcgaatccgagacggacatctacgtgaagacgaacgatgcgcacaatctgctgcgaccggagtttgtcgaaagtctgtactatttctacgccatcactggcaaccgaacgtatcaggacatgggttggacgatctttgaagcgttcaatcgctacaccaaggtaaagaacggctacacttcgatcggtaacgtgaaaaacccgctcaacacgcggccccgcgatatgatggaaagcttctggctgggcgaaacgctcaagtacttctacctgctgttcagcgacgatcggaacgagatcgatctcgacaagtacgtgttcaattccgaggctcatctgcttccgatacgggactag

SEQ ID NO: 58570 - protein, 454 aa, Anopheles gambiae str. PEST
MGPTNDRQRAVVDAVLHSWKGYKEYAWGHDNLKPISMGYSDWFGLGLTLVDSLDTLYIMDLQDEYDEARAWVEKYLKFDINREVNLFEVTIRVVGGLLSAYHLSGDRMFLDKAIDLGNRLLPCFDSPSGIPFSDVNIGSLAAHAPKWSPDSSTSEVTTIQLEFRDLSRASQNPVFEKVASRVNLKIHELDKNEGLVPIFINANTGQFRNFATVSLGARADSYYEYLLKQWLQTGKKADDYLIEDYQKSMRGVLNQLVRTTPNEKHVYIGELLNGKDFKPKMDHLTCYLPGTLLLGYKNGMPKTHLRLATDLLETCYQTYMKQPTQLAPEISYFNVNGESETDIYVKTNDAHNLLRPEFVESLYYFYAITGNRTYQDMGWTIFEAFNRYTKVKNGYTSIGNVKNPLNTRPRDMMESFWLGETLKYFYLLFSDDRNEIDLDKYVFNSEAHLLPIRD

SEQ ID NO: 58571 - DNA, 2019 bp, Anopheles gambiae str. PEST
  CDS (1)..(2019)
atggtctccgtgacgaacccgctgctcgggcggcggtcgttccggtcgcgcgagaagtgcctcatcctgctcgtcctctccacgttcgggttcgtctgcttcggcgggttcttcttcctgccggacaacttcagcgcggaccgggtgctgaaggcgtacaagcagttccagcgggcggggccggaaatcttcataccggcgccgccgcccgcccacggccgcaccggcgaggaggacatccaccggcaggacgaccgggtgaagctggcggaaaagatacggaaggagctgccggacgactttctcgagaagccggacacgggcggcggtggcgaggcgggcgttggcggtgaggaaacggagggcggagagcagcagcaggcgcgggacggtgccggagcgatcgatgagccggcgctgcagccgggtggcgccggtggtgtgggcgttgtggccggcccggccatcgagggcccggccggggtggtgcagccgccccaccagcagcacgccccggaacaggaggaaggccagctgcaggaggtggcgggcggggacaggcgcggcgagaaggcgcgcgccccggccgggctgcactttaacgcgtccgtcggcgaggacccggaccgggccgtgcgggagaagcgcaacaaagtgaaggagatgatggtgcacgcctggagcaactacaagctgtacgcgtggggcaagaacgagctgcggccgctgtcgaagcgcggccacagcaacagcatcttcgggtcgttcgatctcggcgcgacgatcgtggacgggctggacacgctctacctgatgggcctgcacaaggagttcgacgaggggcgggagtgggtcgagcgcaagttcaccctcgacaacgtggacgcggagctgtccgtgttcgagacgaacatacggttcatcgggggcttcctcacctgctacgccttcaccggcgaccggatgttcctggagaaggcgcgctacgtcgcggacaagctgctgcccgccttccagaccccgaccggcatcccgtacgcgctggttaacgtgcacaatggggtgagcaaaaactacggctgggcaagcggcggcagcagcatcctgtccgagttcggcacgctgcacatggagttcgcctacctgagcgacatcaccggcgactcggtgtaccgggagcgggtccagacgatccgggcggtgctgaaggacatcgagaagccgaagggcctgtacccgaactatctcaacccgaagacgggcaagtggggccagcagcacatgtcgctcggtgcgctcggcgacagcttctacgagtacctgctgaaggcgtggatccagtccgggcaggaggactgggaggcgcgcgaaatgtacgacgacgcgatgcaggccatcatcaagcacatggtgcggaacaccccgtccggtctgacgtacgtgtccgacatgaagttcgaccggctcgagcacaagatggaccatctggcgtgctttgcaggtggtctgttcgggctcggcggtacctcgctcaacaatcagtattcccagcagtacatggagatcggcgaggggctgaccaacacgtgccacgagagctacatccgcacgtacacccggctcgggccggaatcgttccgcttcaacgatggcgtcgaggcgaaggcactgaaagcgcaggagaagtactacatcctgcggccggaaacgttcgaaagctacttcatcatgtggcggctgacgcacgaccagaagtaccgcgactggggctgggatgcggtgcaggcactcgagaagcactgccgcacaccgaccggctacaccgggctgaagaacgtctacctcaccgagccggtgaaggacgacgtgcagcagagcttcttcctcgccgaaacgctcaagtacctctatctgctgttttccgacgactcgctgctgccgctggacgattgggtgttcaacacggaggcgcacccgctgccggtcaaggaccggaatccgctgtaccgtccggcgtag

SEQ ID NO: 58572 - protein, 672 aa, Anopheles gambiae str. PEST
MVSVTNPLLGRRSFRSREKCLILLVLSTFGFVCFGGFFFLPDNFSADRVLKAYKQFQRAGPEIFIPAPPPAHGRTGEEDIHRQDDRVKLAEKIRKELPDDFLEKPDTGGGGEAGVGGEETEGGEQQQARDGAGAIDEPALQPGGAGGVGVVAGPAIEGPAGVVQPPHQQHAPEQEEGQLQEVAGGDRRGEKARAPAGLHFNASVGEDPDRAVREKRNKVKEMMVHAWSNYKLYAWGKNELRPLSKRGHSNSIFGSFDLGATIVDGLDTLYLMGLHKEFDEGREWVERKFTLDNVDAELSVFETNIRFIGGFLTCYAFTGDRMFLEKARYVADKLLPAFQTPTGIPYALVNVHNGVSKNYGWASGGSSILSEFGTLHMEFAYLSDITGDSVYRERVQTIRAVLKDIEKPKGLYPNYLNPKTGKWGQQHMSLGALGDSFYEYLLKAWIQSGQEDWEAREMYDDAMQAIIKHMVRNTPSGLTYVSDMKFDRLEHKMDHLACFAGGLFGLGGTSLNNQYSQQYMEIGEGLTNTCHESYIRTYTRLGPESFRFNDGVEAKALKAQEKYYILRPETFESYFIMWRLTHDQKYRDWGWDAVQALEKHCRTPTGYTGLKNVYLTEPVKDDVQQSFFLAETLKYLYLLFSDDSLLPLDDWVFNTEAHPLPVKDRNPLYRPA

SEQ ID NO: 58573 - DNA, 1878 bp, Rattus norvegicus
  CDS (1)..(1878)
atgctggtgaggaaagtgccgggcttcgtcccggcctcgtcgtgggggctgcggttgccgcagaagttcctttttctgctcttcctctcgggcctcgttaccctgtgcttcggtgccctgttcctgctgccccactcctctcgcctcaagcgcctcttctcggcctcgcggacgcagcagcccggcctggaggtgatggccgaaatcgccggccaccactcggtgtcagagcaagagccgcctcccaaccctgcccctgcggctccggccccgggtgaggacgattccggccgcctggtgggtgtcctccgtaggaaagggtggctgcggcgaacccgccccaccgggccccgggaggagggcaacagggtttcagccctccggccgcaggaagagagcgtccggttcagtttcgactacaatagtttccgcagccgccttcgacacccggtcttggggacaaggactgatgagagtcaggagtcccagagtctagtgagagctcagagagagaaaatcaaagagatgatgcggttttcgtggcagagttaccgccgttatgcgatggggaagaacgagcttcggccactcacaaaggacggcttcgagggcagcatgtttggcggtctcagtggggcgaccatcatcgattctctcgacaccctctacctcatggagctgaaagaggagttccaggaggccaaggcctgggtgcaagacagtttccacctgaacgtgagtggagaagcatctttgtttgaagtgcacatccggtatatcggaggactgctctcggccttctacctgacaggagaagaggtgttccgagtgaaggccatcaagctgggtgagaaactgctgcccgccttcaacacacccacgggcatccccaagggcgtggtgaacttcaaaagcggtagctggggctgggccaccgcgggcagcagcagcatcctggcggagtttgggtccctgcacttggaattcttgcatctcactgaactctctggcaatccaatctttgcagaaaaggtcagaaatatccgcaaggtcttcagggagattgacaaacccttcggcctctaccccaacttcctcagcccagtgagcgggaactgggtacagcatcacgtctcagtcgggggacttggggacagtttttatgaatatttgatcaagtcctggttgatgtctgccaaaacagatatggaggctaaaaccatgtactacgaagccttagaggccatagagacctatctggtgaatgtctctccggggggcctgacctacattgctgagtggcgaggaggaattctggaccacaagatgggacaccttgcttgcttctcggggggcatgatcgcccttggtgctgaggatgccaaggaagataaaagggcctactaccgagagcttgcagcccagatcaccaggacctgccacgagtcctacgcccgctcagacaccaagctggggcctgaggccttctggttcaactctggccgagaggcggtggccacacagctgagcgagagctattacatcctgcgacctgaggtggtggagagctacatgtacctgtggcggcagacacacgaccccatctacagggagtggggctgggaggtggtgatggccttggagaaacactgccggacggaaggtggcttctcggggatccaggacgtgtatagcagtaaccccaaccacgacaacaggcaacagagcttcttcctggctgagacactgaaatatctctatcttctgttctctgaagatgatgtgctgtcgctggaagactgggtgttcaacaccgaggctcatccactgcccgtcaaccgctcggacagctccagcgtggctgggcaccgccactga

SEQ ID NO: 58574 - protein, 625 aa, Rattus norvegicus
MLVRKVPGFVPASSWGLRLPQKFLFLLFLSGLVTLCFGALFLLPHSSRLKRLFSASRTQQPGLEVMAEIAGHHSVSEQEPPPNPAPAAPAPGEDDSGRLVGVLRRKGWLRRTRPTGPREEGNRVSALRPQEESVRFSFDYNSFRSRLRHPVLGTRTDESQESQSLVRAQREKIKEMMRFSWQSYRRYAMGKNELRPLTKDGFEGSMFGGLSGATIIDSLDTLYLMELKEEFQEAKAWVQDSFHLNVSGEASLFEVHIRYIGGLLSAFYLTGEEVFRVKAIKLGEKLLPAFNTPTGIPKGVVNFKSGSWGWATAGSSSILAEFGSLHLEFLHLTELSGNPIFAEKVRNIRKVFREIDKPFGLYPNFLSPVSGNWVQHHVSVGGLGDSFYEYLIKSWLMSAKTDMEAKTMYYEALEAIETYLVNVSPGGLTYIAEWRGGILDHKMGHLACFSGGMIALGAEDAKEDKRAYYRELAAQITRTCHESYARSDTKLGPEAFWFNSGREAVATQLSESYYILRPEVVESYMYLWRQTHDPIYREWGWEVVMALEKHCRTEGGFSGIQDVYSSNPNHDNRQQSFFLAETLKYLYLLFSEDDVLSLEDWVFNTEAHPLPVNRSDSSSVAGHRH

SEQ ID NO: 58575 - DNA, 1776 bp, Magnaporthe grisea 70-15
  CDS (1)..(1776)
atggtggccttcttttcgcctcgccgcatgggcaagcgtctaattcttgtcttggcgcttgccctaaccggaaccttcttcctgtcccagatcctcattaccttctcgtcctcgacgccatcccccattggaacggagcagcaaacgtcatggacgtccggctggttccgtcaggactgggcgcgcaggaaggagaagttccccgtgaacaggtccttaatggtccgaccgccatcggggcctccacgacaactgccgcgggtgcagcacaagtttgcagcccctgacgcagaattccggaagctgcaggcaaccaggcaggcggccgtgaaacaagcctttgaaaagtcttggggcagctaccgtcaatacgcctggggatacgatgagctgcgccccgtgacgcttgaaggtcataatagctttgctggctggggagccacgctcgttgacagtctcgactcgctttggatcatgggaatgaaggatgattttgccgaggccgtaaaggctgtccaaaaaatcaactggttcaagtcgagcggtcccatgtgctcactctttgaaactaacattcgctaccttggcgggttactttcggcctatgatttgagccaggaaaaagtgctgcttgacaaggccgtagagctggcacatatgctttacgcagcgtttgacaaccagtacagactgccagtcaatgcattcttttttacagacgcatggaatggagaccttcagctctcgtacagggaagtggccgcagcagtcggttccatgtccctcgaatttaccagagtggctcagctcacgggtgatccaaagttctacgacgccattgacaggatcaaggttcacttgagcatttcccaaaacgagacacgtgtgcctgggctgtggcccatttcctttgatttgcacgacggcttctctgcacaggataccatgttcacacttggtgcgcaggcggactcgctgtatgaatatctgccaaagatgtacgcccttcttggtggactggaccaaacgtatgccactatgcacaaaactgcaatggatgcagccgaaaagcacatactattcagaccgatgatacccgacaaggacgtggacattttgttctccggaaaccttagagcctatgtctctgcaggcgatctccagatgacgcctgaagtccaacatcttggctgctttaccggcggtatgtacgcgctcggaggccgtctgctcaataatgacagccacgtcgagctggggaagcagctggctcgcggctgtgcctgggcatataaggctaccgtctcgggcatcatgcccgaggttgcatccatggtggcatgcgaggagcccaagctgggcaagtgtaaatggaacaagtccatcttcgaggccaagggtggcaagtaccgaaccgaaggaatgcccccggcgttcgcgagcatcacagactaccggtacatattgaggcccgaagccattgagagcgtctttgttctctatcgcatcacgggcgaccagaaatggctggactgggcctgggcaatgtttcagtcgatcaaaaaggccaccgagaccgagaaggcattttccgcaattgcaaatgtattggcgcctgacgctcgcgggaacaaggccaatggaatggagagtttttggttggcagagacgctcaaatacttttacctaatcttctctgacccggacctgataagtctggatgactatgtactcaacacggaagcacaccctttgaagattcccaagcccacatag

SEQ ID NO: 58576 - protein, 591 aa, Magnaporthe grisea 70-15
MVAFFSPRRMGKRLILVLALALTGTFFLSQILITFSSSTPSPIGTEQQTSWTSGWFRQDWARRKEKFPVNRSLMVRPPSGPPRQLPRVQHKFAAPDAEFRKLQATRQAAVKQAFEKSWGSYRQYAWGYDELRPVTLEGHNSFAGWGATLVDSLDSLWIMGMKDDFAEAVKAVQKINWFKSSGPMCSLFETNIRYLGGLLSAYDLSQEKVLLDKAVELAHMLYAAFDNQYRLPVNAFFFTDAWNGDLQLSYREVAAAVGSMSLEFTRVAQLTGDPKFYDAIDRIKVHLSISQNETRVPGLWPISFDLHDGFSAQDTMFTLGAQADSLYEYLPKMYALLGGLDQTYATMHKTAMDAAEKHILFRPMIPDKDVDILFSGNLRAYVSAGDLQMTPEVQHLGCFTGGMYALGGRLLNNDSHVELGKQLARGCAWAYKATVSGIMPEVASMVACEEPKLGKCKWNKSIFEAKGGKYRTEGMPPAFASITDYRYILRPEAIESVFVLYRITGDQKWLDWAWAMFQSIKKATETEKAFSAIANVLAPDARGNKANGMESFWLAETLKYFYLIFSDPDLISLDDYVLNTEAHPLKIPKPT

SEQ ID NO: 58577 - DNA, 3375 bp, Magnaporthe grisea 70-15
  CDS (1)..(3375)
atggaccaaggtcgcagcagcgccatgtccggatgcgtgattctcggcccccgcgccgcaccggtccccgccatccgcctggtgctattgccgctgctgctacttttatcatgttttagtttttgtgagggcatgcggcccgctcagattgcggacctgcgccgggagacggtcgaactgttttatcatggctttgacaactacatggaaattgcctttcccgaggatgagttgcggccagtaacatgcgcacccctcacccgcgatccaaaggatcccaccaatatctctctaaacgacgtcttgggaaactactccctgacccttgttgacagcttgtcaacacttgctatacttgcatctgcacccaaagaggacggcgatgttggcccaaaagcgcttcgtgactttcaggacggcgtcaaggcgttggtggagcaatatggagacggcacagacggcccctcgggccagggtctacgggcccggggctttgatgtcgacagtaaggtgcaagtctttgagactgtcattaggggcgtagggggcctgctcagcgcccatctgtttgctgccggagagctacccatccggggctacgaaccactgccggtttttgagggccaggagcccaaaccgtggcccaatggtatgacctacaatggccagcttttgaggcttgcgaacgacctggccgatcgcctactcccggcattctacacgcagactggtatgccgtatcctcgagtgaacctgcggcacggtattccgttctaccgcaactctcccctgcacgatacctctggtatcaatgacgaaccgaacggtcggggtggcgccccggagatcaccgagacatgtagtgccggagctggaagtctggtgttggagtttaccgtgctgagtcggcttactggcgaccctaaatatgaacaacttgcaaagcgggccttctgggctgtttggtatcggaggagcgacattggcctgataggcgcaggagtggatgccgaacatggcaagtggataggagcctattcggtgattggcgccggcgccgacagcttctttgaatatgcgatgaaaacgcacattcttctctcgggccatgcgcctcccaagaaggcgtcgagtacggattcgacaccaggaaaggggaacaccaacaactccaagaggggccttgatccgaacatactgttcccccctttgacagacgaggagaactcgcctgacagtttcctcgaggcatggcatcacgcgcacgctgcgaccaaacggcacctttacaatgaccgcggccatccacactatgtgagcgtgaacctttggactggctcacttgcatcacaatggatagatagcctgggtgcatactactctggtctcttgacgctcgccggtgagctggacgaagctattgagacaaatctcctctatgcggccgtgtggaccaagtacgccgcgcttcctgaacgctggaatgttagagacaagattgtcgagggaggcctgggctggtggccactacgtcccgagtttgtcgaatcgacctacttcctctatttggcaacaaaagacccttggtatctgcacgttggcgagatggttctgcgcgatgtcacccgtcgttgcaagacgtcttgcggctgggcgggactgcaaaatgtgatagacggggagatgagcgatcgtatggagagtttctttttgggagaaactgcaaagtacatgtacctgatgtacgatgagaaccaccccttgaacaaaatcgatgcgcccttcgtcttcactaccgaaggccatccacttataattcccaaggccaccgaacctggcaagtctcacccaaaagcctctgccacgcgcaagcacaaggcagctgcatcttattacgatccgggcttcaccaactcgtgccctgtgcccaaagcaccgatgccactgacgggttccctgaccgccgcgaggaaagacattttccacgctgcaaagatggtcaatcttcaccagactcctgtccactcgggaagaactgttgtcgaggacacgccaggtcgaaaacgggcgaccaaggagaaccacagtgtgttcccctggactttgccaagccgcctgatcccagaggatggcatttgttcaaaggtgcatgagcccacggagataacgctcgagtttgcgtccaacgcgcaacaagctgtcggtggaagctcgtttaactacatggtcggcacacaaaacctggagcgtctcaccgtcgacaagattcgtgtgctgagcatctcgggtctcaagttgactttacgactagaggatcgtgctgctggaagcagttcgcctacttcttattggcgcatcacaaaggtcaacggcttgcccctgggccgagacgagtcacttgtgctcaacagggctacgctaggtgacgtctcggatccgcgcttcaacatggtgcgggatccggtcgtcgtcaagctgcaccatctgcaccaggtcgaccttgtgtacaatgtcaccgcggcggcggaggcagcagaaggcgaaggcgacgtcgagatcaaggaacggattacgctacagcaaacccaaaccgaaagcggagttccgatggcctccgctgctgtaaatgcacccgatctcggaaacaggatgaagagcttcttccagcagatcatgagctcgctggaggaagccggtgcggaaccgacatacaccccacgatcaggcaatggagtgtccacaaccccaggcaccgccgcgcccccgtacaacgttctgatgaacctcacgggaattacccccacaggcctcggggcggcccccctgccctcggtggacatgccgccaggcgcgcacatcccgcacatgggacctttcaccgccagctacctcccctggtcgaccgtgttcgcggccggggacgcgtgcggcgggcctctgcccgagatggcgccgcgggaccaccacgtgatcgtgatccggaggggcggctgctccttctcgaccaagctggccaacatccccgcgcacaagcggtcttctgcgagcctgcagctcgtcgtggtggtgtcggacgacgacgaagacgacggcttcttccgcgacggtcgcgagggcggcggcatggccgcgcgcgactacgataggatcgtgcgcccgctgctcgacgtcatgcagaccaccccgtcgggcatggtgaggcacaacccgctgtccatgctgcttgtaggtggcggcgacgcggcctaccatcagatctcgcaggcggagaggttggggctgactaggaggtattacatcgagagccacggcgtcagggttagaaatattttgatagatgatggtgatagcggcgagctgacgttgaaggcatag

SEQ ID NO: 58578 - protein, 1124 aa, Magnaporthe grisea 70-15
MDQGRSSAMSGCVILGPRAAPVPAIRLVLLPLLLLLSCFSFCEGMRPAQIADLRRETVELFYHGFDNYMEIAFPEDELRPVTCAPLTRDPKDPTNISLNDVLGNYSLTLVDSLSTLAILASAPKEDGDVGPKALRDFQDGVKALVEQYGDGTDGPSGQGLRARGFDVDSKVQVFETVIRGVGGLLSAHLFAAGELPIRGYEPLPVFEGQEPKPWPNGMTYNGQLLRLANDLADRLLPAFYTQTGMPYPRVNLRHGIPFYRNSPLHDTSGINDEPNGRGGAPEITETCSAGAGSLVLEFTVLSRLTGDPKYEQLAKRAFWAVWYRRSDIGLIGAGVDAEHGKWIGAYSVIGAGADSFFEYAMKTHILLSGHAPPKKASSTDSTPGKGNTNNSKRGLDPNILFPPLTDEENSPDSFLEAWHHAHAATKRHLYNDRGHPHYVSVNLWTGSLASQWIDSLGAYYSGLLTLAGELDEAIETNLLYAAVWTKYAALPERWNVRDKIVEGGLGWWPLRPEFVESTYFLYLATKDPWYLHVGEMVLRDVTRRCKTSCGWAGLQNVIDGEMSDRMESFFLGETAKYMYLMYDENHPLNKIDAPFVFTTEGHPLIIPKATEPGKSHPKASATRKHKAAASYYDPGFTNSCPVPKAPMPLTGSLTAARKDIFHAAKMVNLHQTPVHSGRTVVEDTPGRKRATKENHSVFPWTLPSRLIPEDGICSKVHEPTEITLEFASNAQQAVGGSSFNYMVGTQNLERLTVDKIRVLSISGLKLTLRLEDRAAGSSSPTSYWRITKVNGLPLGRDESLVLNRATLGDVSDPRFNMVRDPVVVKLHHLHQVDLVYNVTAAAEAAEGEGDVEIKERITLQQTQTESGVPMASAAVNAPDLGNRMKSFFQQIMSSLEEAGAEPTYTPRSGNGVSTTPGTAAPPYNVLMNLTGITPTGLGAAPLPSVDMPPGAHIPHMGPFTASYLPWSTVFAAGDACGGPLPEMAPRDHHVIVIRRGGCSFSTKLANIPAHKRSSASLQLVVVVSDDDEDDGFFRDGREGGGMAARDYDRIVRPLLDVMQTTPSGMVRHNPLSMLLVGGGDAAYHQISQAERLGLTRRYYIESHGVRVRNILIDDGDSGELTLKA

SEQ ID NO: 58579 - DNA, 2064 bp, Gibberella zeae PH-1
  CDS (1)..(2064)
atgattcgagatccgttcaacctccaccgaaacataaacacttttaatcgaccgccaactcgaaatattccttcgccatcgcgggtcgaggctgatgaagtagctatggccttctctatgccccgaaccgctccggacttcaatagccgtcaaagagagctcgaagacaaattctggggttctggacagagatctggcaagtcagatcgattaccgatgtacaaagacaaaccctacgcgtcgccatacgacgacgaggaccggccatggtggaaacgtaagaaggtgctgggcatcattgccctcgtctttacgttactatactggttcggatcttcctccaagtcacctaagaagagaaccgtaacgaccgactggagctttgcaggcttgtccaaacatgataagaaggtggattgggatcacagaagagaccgcgtggtggaagcattcgagttgagctgggatgcttacaggcgtcatgcttggggatccgacgaatttcaccctatcaccaagacaggcgagaacatggcaccaaaagggctcggttggatcatcattgactcactggacaccatgatcctgatgaacttgacatctcgccttcaagacgcccgccaatggatctcggagtctttgacgtgggatcaagatcaagatgtgaacaccttcgaaaccaccattcgcatgatgggcggtcttctcagcgcacactacctatccaccgagtttccaggtcttgctccactcgcggaggatgacgagggagccattggggaggacttgtatctggagaaggccaaagatctagctgatcgtctcatgagcgctttcgaatccccttctggtatcccctatgcaagcgtcaatcttcaaaaattccagggtatcgaatcgcacgccgataacggggcgtcgtcgaccgccgaagctacaaccctccaactcgagttcaagtaccttgcaaaactcacgggagagaaggacttttgggatagagttgaaaaggtcatgaaggttgtcgatgaccagggggccgaagacggcttggttcccatcttcatctatgcgagcacaggaaagttcaaggacgaaaacatccgactcgggagccgtggcgactcatactacgaatatcttattaagcagtatctccaaacgaacaagaaggagcctatttatagagatatgtggtacgacgcccttgagggtgtccgcaagcaccttgtcacctacacgtcgaaacagaagttcaccatcatcggagagcgacctaatgggttgagcaatgcccttagccccaagatggatcatcttgtatgcttcatgcccggaacaatggcattggcggccacagagggtctcacggaggccgaggcacgcaagctccctacgtggtcaaagaagaacgaagaagacatgaaattggcgcgtgagttaacggagacatgctggggcatgtacaaatacatggcaactgggctggcagccgaaattacctattttgaaattgatgataaaccaccggcttatggcaaccctcgccaggggccagccaactttgaaccaagcccagaggcggaatggcgtaaagatttcactgtcaagtctggcgatgttcacaatctccaacgaccagagacagttgaaagtctgttctacatgtggagaattaccaacgataaccaataccgtgaatggggctgggaaatgttcaaatctttcatgaaccacacagctgtgaggaacggaggaggttttacgagcttgcgcaacgccaatgtcgtgccacccaaggtgcgcgacaatatggaaagcttttggttggccgaaacgctcaagtacttttacctcttgttctcacccccggatctcctgcctctggacaaggttgttatcaatactgaaggacacccgctgcctcggtttgatatgggacatctgtttacgactggatggcaaagacagccaagggatgccagtggtaagattgccaagatggtcaaaattgatggcgatgtgaaggaggcggtcatgcaggataccaaaaaggtgacttag

SEQ ID NO: 58580 - protein, 687 aa, Gibberella zeae PH-1
MIRDPFNLHRNINTFNRPPTRNIPSPSRVEADEVAMAFSMPRTAPDFNSRQRELEDKFWGSGQRSGKSDRLPMYKDKPYASPYDDEDRPWWKRKKVLGIIALVFTLLYWFGSSSKSPKKRTVTTDWSFAGLSKHDKKVDWDHRRDRVVEAFELSWDAYRRHAWGSDEFHPITKTGENMAPKGLGWIIIDSLDTMILMNLTSRLQDARQWISESLTWDQDQDVNTFETTIRMMGGLLSAHYLSTEFPGLAPLAEDDEGAIGEDLYLEKAKDLADRLMSAFESPSGIPYASVNLQKFQGIESHADNGASSTAEATTLQLEFKYLAKLTGEKDFWDRVEKVMKVVDDQGAEDGLVPIFIYASTGKFKDENIRLGSRGDSYYEYLIKQYLQTNKKEPIYRDMWYDALEGVRKHLVTYTSKQKFTIIGERPNGLSNALSPKMDHLVCFMPGTMALAATEGLTEAEARKLPTWSKKNEEDMKLARELTETCWGMYKYMATGLAAEITYFEIDDKPPAYGNPRQGPANFEPSPEAEWRKDFTVKSGDVHNLQRPETVESLFYMWRITNDNQYREWGWEMFKSFMNHTAVRNGGGFTSLRNANVVPPKVRDNMESFWLAETLKYFYLLFSPPDLLPLDKVVINTEGHPLPRFDMGHLFTTGWQRQPRDASGKIAKMVKIDGDVKEAVMQDTKKVT

SEQ ID NO: 58581 - DNA, 1761 bp, Gibberella zeae PH-1
  CDS (1)..(1761)
atgctggccactttccaagggcgacccggtcgtcgctatattagcctttttcttttcatcgccatcacatggttccttgtccacaactttcgtccctacgaacgttaccgtactgtgagaataggaacgtacaactaccttcctagtagttacgattggagcaagcagcagatcttccaccccgtcgaagacatcaggggccccccgaatggcacattcaagctgctgcccaagattcaaaaagaacgccccaacggttacacagaagacagcgagacgactgctagaaaagcggccatcaagcaggctttcaccaagacctgggaggcctataagaagcatgcgtggggttgggacgagctggcaccagtctccctcaagggaaagaccactttctctggctgggccgcccagattgtcgatgctctcgacactctctggattcttgacatgaaggatgagttcaaagaagctgtccagattgttgccatgatcgattgggcacgtactggtgatagctacctcaacctgtttgaggtagctattcgtcaccttggtggcctcctctctgcttacgagctctctgacgaagctgtcttgctcggtaaggccattgagctaggcgagatgctctacgctgcattcgacacccccaaccgcctgccatctcactggctttacttcaagtctgcgaaaaatggagaacagcaagccgatgaagaaatgtctggcgctgcaggtggttcaatgtgcctcgagttcactcgcctatcccagattactggcaaccccaagtactatgatgccaccgaacgcatcaagaagttcttttatcgtaaccaggacaatactaaaattcctggtttgtggccacatgtcatgaactatcgtgaggaaaacgttgacgacgatcgctttaccctcggagctggcgcggattccctctacgagtacctacccaagatgcacgccttgctaggcggtctagatcctgaatacgttgagatgaccaccaaagctctcgacaccgccactaagaacttgctcttcaaacctcgtaaccctagtgacctggacatactgatgtcaggcaacgcagtgccaggcgaggatggtgccaagcccaagcttactgctgaaatgcagcacttgacatgctttatcggtgggacttatgctctggctggcaagcttgtttcacgagctgatcttgtagacctcggttctcgtttaacagctggttgtgtctgggcatacgatgctttccccaccaatatcatgcctgagattgctgagcttgaagcatgcgagtctatcaccagcaagtgccgctggagtgataagcctgtggagaaaaaggacaagctgcctgagggtttcgtccgagtccgcaactcagaatacagactgcgccccgaggctattgagagtgtcttctacatgtggcgtatcacaggcgacgatgtctggcgcaccgctgcttggcgcatgtgggataacattgtcaagcagactgagactcaggaggcctttgctacaatcactgatgtcaacagaaagggtagcgataagcgcgataacatggagaccttttggatgtccgaaacaattaagtacttctacctcacctttgaggatcccaatgttatcaacctggatgattgggtgcttaataccgaggcacaccccctgaagcgtcccaagggcgaggagctcgagactcctcagaagaagacatcgtggtggaaattcggccattaa

SEQ ID NO: 58582 - protein, 586 aa, Gibberella zeae PH-1
MLATFQGRPGRRYISLFLFIAITWFLVHNFRPYERYRTVRIGTYNYLPSSYDWSKQQIFHPVEDIRGPPNGTFKLLPKIQKERPNGYTEDSETTARKAAIKQAFTKTWEAYKKHAWGWDELAPVSLKGKTTFSGWAAQIVDALDTLWILDMKDEFKEAVQIVAMIDWARTGDSYLNLFEVAIRHLGGLLSAYELSDEAVLLGKAIELGEMLYAAFDTPNRLPSHWLYFKSAKNGEQQADEEMSGAAGGSMCLEFTRLSQITGNPKYYDATERIKKFFYRNQDNTKIPGLWPHVMNYREENVDDDRFTLGAGADSLYEYLPKMHALLGGLDPEYVEMTTKALDTATKNLLFKPRNPSDLDILMSGNAVPGEDGAKPKLTAEMQHLTCFIGGTYALAGKLVSRADLVDLGSRLTAGCVWAYDAFPTNIMPEIAELEACESITSKCRWSDKPVEKKDKLPEGFVRVRNSEYRLRPEAIESVFYMWRITGDDVWRTAAWRMWDNIVKQTETQEAFATITDVNRKGSDKRDNMETFWMSETIKYFYLTFEDPNVINLDDWVLNTEAHPLKRPKGEELETPQKKTSWWKFGH

SEQ ID NO: 58583 - DNA, 1797 bp, Apis mellifera
  CDS (1)..(1797)
atgtttccaccgaaagacttggagaaatcagattatattagtttaaatattcaagaaagtgcaacatttacgcgaggatcatcacgtagtctttggagacaatggaaacaattgtcaaggtttcaaagaaatattctttatttcttagttattacaatcatattagttgtattttatcttttacctggtgataataaaaatggagttttagatgaaagtgactataataacatagaagtagtgcaagatacacttaaatatgaaaaggcagcagaagatattgtagtagatagtataaatcaagaacataaaggaggtggggaggtcattgaggaacctgaattccaaccagaaataaaccaggtggacgatgatcaaattggagaaccacctcaacctaaaccaaatacacttaaatttaatggaccacagaatagtagacaaaaagctatagttgcagcattcaaacattcatggaatggatataaagaatatgcttggggttatgataatataaaaccaatatcaagaaaatattatgaatggtttggtttaggtctcactatagttgattctcttggtactatgtatataatgggtttaaataatgaatttttagaagctaaaatgtgggttgaaaaaaatttagtattttcttcaaatagagatgttaatttatttgaagttacaattagagtattaggaggtctattatctgcatatcatctttcaggtgataagattttcttaaataaagctgtaaaattaggagatcgtttgatgccagcgttttctacttcatctggcgttccttattccgacgtaaatcttggaactaaaactgcacatggtcctaaatggggtcccgatagcagtacaagtgaagttacttcaattcaattagaatttcgtgatttaagtcgcagtacaggagatcctaaattcgaagaagcagtagcaaaagtatcagaacatgtacatcaattagaaaaatatgatggtttagtacccattttcattaatgctaatactggacaatttagagatcattcaacaattacactcggtgcacgcggtgatagttattatgaatatttattgaaacaatggcttcaaacaggaaagactattaattacttacgagatgattatctattaggtatttctggaactcaaaaacacttggtaaagcgtacagcaattaataaatatcttttcatagcagaattagttggagcaaacaaagaaataacaccaaaaatggatcatcttacatgttacttaggaggtactttagctttaggagtacatcatggtttaccacctgatcatatggatcttgctaatgaaattgttaaaacttgttatcaaacatatgcaattcaacccacgttccttgctccagaaattacttattttaatattcagaacacagatggagaaaaatcaatggatatgtatgtaaagatgaatgatgcacataatttactcagaccagaattcattgaaagtattttttatatgtggtattttactgggaataagacttaccaagattggggatggcaaatatttcaagcttttgaaaattatacgaaagtagaaaaaggatacaccagcattggaaacgtgagaattgtttataatacaccacaaaaggatatgacagaaagtttttggtttgctgaaactttaaagtatttgtacttgttatttgacgatacaagacaattaatagatttagatagatgggtatttaattctgaaggacatccattacctatatacgaatcgtaa

SEQ ID NO: 58584 - protein, 598 aa, Apis mellifera
MFPPKDLEKSDYISLNIQESATFTRGSSRSLWRQWKQLSRFQRNILYFLVITIILVVFYLLPGDNKNGVLDESDYNNIEVVQDTLKYEKAAEDIVVDSINQEHKGGGEVIEEPEFQPEINQVDDDQIGEPPQPKPNTLKFNGPQNSRQKAIVAAFKHSWNGYKEYAWGYDNIKPISRKYYEWFGLGLTIVDSLGTMYIMGLNNEFLEAKMWVEKNLVFSSNRDVNLFEVTIRVLGGLLSAYHLSGDKIFLNKAVKLGDRLMPAFSTSSGVPYSDVNLGTKTAHGPKWGPDSSTSEVTSIQLEFRDLSRSTGDPKFEEAVAKVSEHVHQLEKYDGLVPIFINANTGQFRDHSTITLGARGDSYYEYLLKQWLQTGKTINYLRDDYLLGISGTQKHLVKRTAINKYLFIAELVGANKEITPKMDHLTCYLGGTLALGVHHGLPPDHMDLANEIVKTCYQTYAIQPTFLAPEITYFNIQNTDGEKSMDMYVKMNDAHNLLRPEFIESIFYMWYFTGNKTYQDWGWQIFQAFENYTKVEKGYTSIGNVRIVYNTPQKDMTESFWFAETLKYLYLLFDDTRQLIDLDRWVFNSEGHPLPIYES

SEQ ID NO: 58585 - DNA, 2127 bp, Aspergillus nidulans FGSC A4
  CDS (1)..(2127)
atgtcttttccaaatactcacggcagtcccgcataccctacctcacggtccccttcagaaaaatactggcaggccagtcgcagcccgggagccaacgggctagggggttacggtttctcccaatcagccggtgtcacgaacaacctcaacaatttcttctccggtgaccgcaccctgcccatgtacaaggacaaaccgtactttgcgccgcgccgaactggccctaggctcaggcggaggagggttctccaaggcataatccttctgcttggtctttttagtttgtggtatattgttactgggtctagtgatacctaccggtctccctggactcctgatacagttaagggggaggagttatggaggtgggtgcagcgcttggactcagagcagccctatgacggtactccgctgaagggcattgactgggcagcacgacgagagaaggtccgggatgctttcattgtcagctgggatggttacgagcagtatgcctggggctttgacgagtatcatccggtcaccaaaaagggcaaacagatgatcgagggtggaatgggctggcagattgtggatgcactggacacgttgatgatcatgaacttgacatctcgtgtacaacatgcgcgcacatggattcataactcgctacaatatgaccaggatcacgatgtgagcacttttgaaacgacaatacgcatgctcggtggtctgctctctgctcattatctctctacggagtattccaaccttgcccccattcccgacgacgacgttggttccccaggggaggatctctatattgaaaaggcaaccgaccttgcggaaagactacttggggctttcgaatcggaaacaggtattccgtatgccagtgtgaacctcaatacatcgactggtatcccgtcgcattcagaccgcggcgcctcatctacggctgaggccacctccgtacaactggaattcaagtacctagccaaactgacgggcgaggctgagtactggcgcgttgtggagaaggtaatgcaagtggttgacgccaatcaagcccctgatggccttctcccgatctatatctatccagatacgggaacgttcaggggagcgaacattcgcctcggtagcagaggcgactcttattatgagtatcttgttaagcaataccttcagacgtcagaagaaatatacaaggacatgtgggacgaggccctcgtcggaattcgcaaacacctcatcacattttccaagaatgccaagttgactgtcctgggcgagcgacaggccggtcttgacggccctctaaccccgaaaatggaccacctcgcctgcttccttcctggaacaattgctctcggggctacagaaggaatccctctctctgaagccaaaaagtccgccgcatggactcgccgtaaggacgaagaaatcctcctcgccaaagaactcatgaaaacttgctgggcaacctatctagccacccgcaccggcctagcccccgaaattacctacttcgacatcgacaccccgcacgtctccgagctagaccggtatcccgactccacgctcgccgcaggcaacgcggacaagaagcccgcggacaaagatctaccgctgaaatcccaagcgctgtaccctctcgcagactcaaattcagaccctaactcctggcgtcgcgacattatcatccagcctcaggatagacataatctccagcgcccggaaaccatcgaatccctcttctacatgtaccgcatcacgggagacgaaacataccgccactggggatgggaaatgttcaagtcctttatcaagcataccgccgtcgtcgaaaggtcgtctcattatgagaccgagtccggagacgcaacggcataccgcattgtcggcttcacctccctctccaatgtgaactccgagccgcctatgcagcgcgataatatggaaagcttctggatggctgagacgctgaagtatttctatctgctcttttcggaccgcgacttcatctcgcttgaggagaacgtatttaataccgaggctcatccaatgcccagattcaagcctacaggggagttgagtacgggctgggtcaggagtgcgagggtgcctaagtctgtacctgtataa

SEQ ID NO: 58586 - protein, 708 aa, Aspergillus nidulans FGSC A4
MSFPNTHGSPAYPTSRSPSEKYWQASRSPGANGLGGYGFSQSAGVTNNLNNFFSGDRTLPMYKDKPYFAPRRTGPRLRRRRVLQGIILLLGLFSLWYIVTGSSDTYRSPWTPDTVKGEELWRWVQRLDSEQPYDGTPLKGIDWAARREKVRDAFIVSWDGYEQYAWGFDEYHPVTKKGKQMIEGGMGWQIVDALDTLMIMNLTSRVQHARTWIHNSLQYDQDHDVSTFETTIRMLGGLLSAHYLSTEYSNLAPIPDDDVGSPGEDLYIEKATDLAERLLGAFESETGIPYASVNLNTSTGIPSHSDRGASSTAEATSVQLEFKYLAKLTGEAEYWRVVEKVMQVVDANQAPDGLLPIYIYPDTGTFRGANIRLGSRGDSYYEYLVKQYLQTSEEIYKDMWDEALVGIRKHLITFSKNAKLTVLGERQAGLDGPLTPKMDHLACFLPGTIALGATEGIPLSEAKKSAAWTRRKDEEILLAKELMKTCWATYLATRTGLAPEITYFDIDTPHVSELDRYPDSTLAAGNADKKPADKDLPLKSQALYPLADSNSDPNSWRRDIIIQPQDRHNLQRPETIESLFYMYRITGDETYRHWGWEMFKSFIKHTAVVERSSHYETESGDATAYRIVGFTSLSNVNSEPPMQRDNMESFWMAETLKYFYLLFSDRDFISLEENVFNTEAHPMPRFKPTGELSTGWVRSARVPKSVPV

SEQ ID NO: 58587 - DNA, 2028 bp, Gallus gallus
  CDS (1)..(2028)
atgtacgctgccgccgccgccgccgtcgccgcctcgccgcccaggcgggatttcatctccgtcaccctcagcccggaggaggcggtgggcgccggcggctacaacaacagcaaggcctggagacggcgctcctgctggcggaaatggaagcagctgtctcgactacagcggagcataattctcttcctgtttgccttcttgacggtctgcggagtcatttcatatacaagcgtgagggaaccttggaaaagtttaacaagcaaatcatcggacgagcatggaacagaaccagatgcacctggattgaggctggcaaatccagctgtcctaccagcgccccagaaggcagatgccaacgctggagactacccagagctttcacctcagaagaagccaaaattaccacatggtcggcgtaatccttccaattttcagatcaagcccccttggggagatgtgaggctgcaaacccgacatgacaccaggaaggcagtagaagagccagcccaggctgataaacaagagaaaacagagaaatctgttatcagctggagaggagcagtgatagaacctgaccaaagcagtgaacctccatctagtagagtaaaggaaccagaaaaaccttcatctgtggaaggtgaaagccagaaagaaccagtgcccataaacgaacgtcagatggctgtgatagaagccttccgccacgcgtggaaaggatacaaagattttgcctggggccatgatgaactgaagccattatccaagtcttacagtgagtggtttggcctcgggcttaccttgattgatgccttggatactatgtggattttaggcctgagagaagagtttgaagaagcaagaaaatgggtagcaaacgatttagcctttgataaaaatgtggatgtgaacctgtttgagagcactattcgtattctgggtggcttactgagcacctaccatctctctggagatagcctcttcctggaaaaagctaaagacattgggaacaggctcatgccagcattcaagactccttccaaaattccgtactctgacgtcaacattggccggggcaccgcacacccaccccgctggacgtctgacagcactgtggcagaggtgaccagtatacagctggagttcagagagctctctcgtctcactggggatgaaaaataccagaaagctgttgatgaggtgatgaaacatgttcacaccctttcagggaaaaatgatggactggtgcctatgttcataaacaccaacagtgggcagttcactcacttaggtgtttatactatgggagccagagctgacagctactatgagtatttactcaagcagtggattcagggtgggaaaacagaaaatgaactgttggaggactatatgaaagccatagaaggcgtgaaaaagcatcttcttcagagatcacaacccaagaagcttacctttgtaggagagcttgctcatggccatttcagtgccaagatggatcacttggtttgttttctgcctgggactttggctctgggagctcacaatggattgactgctgatcatatgaagctggccgaagccctgatagaaacatgttaccagatgtatgcacaagtagagacaggcctgagtccagagattgtgcacttcaatctccatgcacaaaagggccacaaagatgtagaaatcaagcctgcagacaggcacaacttactgcgaccagaaactgtggaaagccttttttatatgtacagattcaccggagataagaaataccaagactggggctgggaaatcttgcagaacttcaataaatacacacgggttccaacaggtggttatacttctattaacaacgttcagaaccccagtaacccagagccacgagataagatggagagcttctttcttggggaaacactcaaatacatgtttctactgttttcagatgacatagacttaattaatcttgacaaatacgtatttaacacagaagctcatccactccccatctgggtgccagcatag

SEQ ID NO: 58588 - protein, 675 aa, Gallus gallus
MYAAAAAAVAASPPRRDFISVTLSPEEAVGAGGYNNSKAWRRRSCWRKWKQLSRLQRSIILFLFAFLTVCGVISYTSVREPWKSLTSKSSDEHGTEPDAPGLRLANPAVLPAPQKADANAGDYPELSPQKKPKLPHGRRNPSNFQIKPPWGDVRLQTRHDTRKAVEEPAQADKQEKTEKSVISWRGAVIEPDQSSEPPSSRVKEPEKPSSVEGESQKEPVPINERQMAVIEAFRHAWKGYKDFAWGHDELKPLSKSYSEWFGLGLTLIDALDTMWILGLREEFEEARKWVANDLAFDKNVDVNLFESTIRILGGLLSTYHLSGDSLFLEKAKDIGNRLMPAFKTPSKIPYSDVNIGRGTAHPPRWTSDSTVAEVTSIQLEFRELSRLTGDEKYQKAVDEVMKHVHTLSGKNDGLVPMFINTNSGQFTHLGVYTMGARADSYYEYLLKQWIQGGKTENELLEDYMKAIEGVKKHLLQRSQPKKLTFVGELAHGHFSAKMDHLVCFLPGTLALGAHNGLTADHMKLAEALIETCYQMYAQVETGLSPEIVHFNLHAQKGHKDVEIKPADRHNLLRPETVESLFYMYRFTGDKKYQDWGWEILQNFNKYTRVPTGGYTSINNVQNPSNPEPRDKMESFFLGETLKYMFLLFSDDIDLINLDKYVFNTEAHPLPIWVPA

SEQ ID NO: 58589 - DNA, 2430 bp, Candida glabrata CBS138
  CDS (1)..(2430)
atgctgatcactgtcttatggctatgcacattgtgtgtagtactggcgagaccggaattaaattataaagagcggacttttaccaaatgggaattggatgaatacaaagcggaagtcaaagagttaatttattttggactggatgagtatttaggcaaagggtttccttacgacgaaataaggccaataagttgcaaaccaaagacaaggaattttaaggacctttatgatactggaaccaatgatgtgttaggaaatttcacaacgactctaatagactctttgaccacagtggcagttcttggtgatagagacaggtttaagtccttagtcgatttagttgactcaacttacccaaatggatttgatatggattctactgttcaagtctttgaaacaacaattagaataataggtggtttactctcaagtcacttgtacgcaacagacccaagtaagaaggtatatttgggcaaaaaagattataatggttgccttctgaaattggcaaaagacatgggagatagattattgccgtcttacttaaccaagacaggtttgccagttccaagaataaatttgaaatacaaatttcatggaataacaccagacttagtcaacgaaaacaatgctgcagctctaagttgtcctatgtttgagtttacattactttcctatttaacacatgacgctaagtatgaagagatcacgaagtatgctttcaaaaaaacatgggatttaaggtccgaaataggcttagtaccgatgtctttcaatccccaatattcgtattcatttggaggcgtaactggtataggtgcctcaattgattcgttttatgaatacgcactgaaaggttcaatcctatttgatgataattatcttcttgatgtttggcatagttcatacgatgcaataagaactcacgccaaggaagattggtattttaatacaatcggaacgagagacggccataaagccaccaattgggtggattccttgagtgcttttttccccggattgcaagttctggctggaaacattgaggactcggtttaccagcatatgctgtttttgaaattatgggatacttttggtggtattcctgaaagatggatgatggatggaatatatagttttagaccgctagaactgccctggtatccactgcgtccagagtttgttgaatccacttatttcttatatagagccaccaaggatcctttttatctaaatgttggatatcgaatcctccaagatttcaaatttagatttaagaaagagtgtggatttggtggtatgcaggatttaattagtggtgagccacaagatagaatggagacatttgttttgagtgaaacactaaagtacttatacttattatttgatgaagaaaatgaaatacatgccgatagaggtaatatcatttttagtacagaggcccatccgatgtggattacctatgaaatgaaaagagactataatgaaaagaagttcttcactgataaaacctatttggaacacttagaagaggttcaactttttgattgggataaaaaactgagggataataacgaaaagaataaggaattgttgaacaaatatgcagatgtattgaaaagaattaacaagtttagaaataaaaccaaagaggaactttctggcctgatgaaagaaaaaaaggaagaactggaagagaatggcatagttgagtctcacaacgctgaaattggacatagtcaatttaaggacgtgtgtaaggtaagcaaatatcgtcaaaatgatgctgggttttcattttctaatatcatgtcatcatttaaaagaatatcagagccggagaggatattcaacacaacactcataaagcctaattatctagatgattatgcaccatttgagtttgataaacagttctacgataggtggtgtccacgcaatgcatcatcatctcttgctgctacaacattaccatttgatattgttttagaacttccaggacaatatgaattatatcaatacccaaatgggactgttaatgcgatgaagcttggaaacaaaaggaagttacgtcttgaaagaataactcgtggcgatattgacgtgtatggagaatttgttagcgatgcagatttctctggagttaactgggacttagttcgacaaggaaatgctaagtatgaaaatggcactgcactaaagaataataaaagcctctatagagtagtgaagattgatggtgttgttatacctaggaaacaaatgctattcgttaattccacattgttcaaagaggtagtaagtttcgaggaactttatgaagatcctgaaatattgcataagagagacatcttacgtgcatttggtgtcaataaggatggctacttaattttcaatgacaccgttgtaagcaactgtaaaattatttaa

SEQ ID NO: 58590 - protein, 809 aa, Candida glabrata CBS138
MLITVLWLCTLCVVLARPELNYKERTFTKWELDEYKAEVKELIYFGLDEYLGKGFPYDEIRPISCKPKTRNFKDLYDTGTNDVLGNFTTTLIDSLTTVAVLGDRDRFKSLVDLVDSTYPNGFDMDSTVQVFETTIRIIGGLLSSHLYATDPSKKVYLGKKDYNGCLLKLAKDMGDRLLPSYLTKTGLPVPRINLKYKFHGITPDLVNENNAAALSCPMFEFTLLSYLTHDAKYEEITKYAFKKTWDLRSEIGLVPMSFNPQYSYSFGGVTGIGASIDSFYEYALKGSILFDDNYLLDVWHSSYDAIRTHAKEDWYFNTIGTRDGHKATNWVDSLSAFFPGLQVLAGNIEDSVYQHMLFLKLWDTFGGIPERWMMDGIYSFRPLELPWYPLRPEFVESTYFLYRATKDPFYLNVGYRILQDFKFRFKKECGFGGMQDLISGEPQDRMETFVLSETLKYLYLLFDEENEIHADRGNIIFSTEAHPMWITYEMKRDYNEKKFFTDKTYLEHLEEVQLFDWDKKLRDNNEKNKELLNKYADVLKRINKFRNKTKEELSGLMKEKKEELEENGIVESHNAEIGHSQFKDVCKVSKYRQNDAGFSFSNIMSSFKRISEPERIFNTTLIKPNYLDDYAPFEFDKQFYDRWCPRNASSSLAATTLPFDIVLELPGQYELYQYPNGTVNAMKLGNKRKLRLERITRGDIDVYGEFVSDADFSGVNWDLVRQGNAKYENGTALKNNKSLYRVVKIDGVVIPRKQMLFVNSTLFKEVVSFEELYEDPEILHKRDILRAFGVNKDGYLIFNDTVVSNCKII

SEQ ID NO: 58591 - DNA, 2295 bp, Kluyveromyces lactis NRRL Y-1140
  CDS (1)..(2295)
atggaactgaatctcatttctttatggtttttcatatgggtcattctggtaagaactgttgactgttttaaagccgagccgtactctttcaccaagaacgaattgaaccaatataaggaccaagtcaaggagttattctatcatggattcaattcttatttagaatatggatacccgtatgatgaggtactacccatcgcgtgcgttcctatgaaacggagattcgatgatccttacgataccaataccaacgatgtcttgggtaatttcacgaccactttagtcgattcatttacgacactcgctgtattgggcgataagaagggattcgctgatgcaatcaatttatttcataaaacggtgcccgaaacttttgatattgactctacggtgcaattgtttgaaactacaattcgattactcggtgggatgatgtctgcgcatatatatgcaacagacccacgcaccaaggtttacttgggtaaagataactatgatggatttttgctacgaagatgtattgccctaggtgataagttgcttatggcatacctatctcccacaggtttacctgtacccaggataaatctccgttacggtactcggattgatcccaaacttattgaggagaataatgctgctgcgacagcatctccattgtttgaattcaggctgctttcgatgttgacgttgaatgatacttaccgcgaagtctctgaattttcattcaacagaacctgggatcttagatcagaattgaatctcgttccaatgtcgttcagtccatacgataccacgatatacaacgaggttacaggtattggtgcatcgattgattcattttacgaaactgctcttaagggttccatcttattcgatgattcgtggctctatagtgtgtgggaaactgcaatatccgcccttaactcttactcaaagacagattggttctacagtaacgttggagtatctcatggtaaaactgtcgttctttggatagattcgttaagtgctttctttcctggtctactgactttagatggaaggctggaagatgcaaggaagaaacacataatgttttccaaactatggtctacatacggtggtatcccagaaagatggaactttgtgcaatcgccaccgaccaccgaagaattagactcaccctcattgtcgatagatttagaatggtatccattgagaccggagttcattgaatcgacgtattacctttacagagccactaaagacgtttattatttgaatatcggtattcgaattctaaaagatctacagcatcgcttcaagactaggtgtggatttgcggggctacaggatgtgactactggagaagttcaagaccgaatggaatcatttgtcctaggggagacgttgaagtatctgtatttattgttcgatgaggataacgaattgcatacaacgctatggaatcatattttcagtacagaagcgcatccattctggatcgatgtgggtttaaagagacgttacgaatcatacaggagggaagcagacccacctcatgttactacagaaatgtaccagttccatttgctaaaggcgaaaaactggatgagaaggaccaaatctcctaacaggagaattaaccatgctaagaagaaactagatggccaatgtatttctcctgaactggcgtacaccaagagacaatcgaatagacaaggtttccaagattccgacgtgctatccgatccaaaactgtttgaaatagatttcagatatcaggctaccttggaacaacctgcatggaacaaaggatacatacctttcgagctaacaccagaactatactctcattggtctttctcccaacagaaaatttgtctggtcccattgacaaaagcattcgaaggaaccataggaagcagagacccggactcaacactgatatcgacacaccaatggtcttctgacgctcgaatgtaccggttccaatcaatctacggtatcaagatcgctttcctcgattttacatggcacccgaactctattgaagtgcaggaccctaactcgaaattcgatctatatgatgtcttgaacaagcaaaactgtaaacccaaagacgatacaagcatacatacctacacagtaaccgcaatagatggcattgaccttggtgacaacgacgtagtcgttgtcaataaatcaagcctcttcttcgatgactcgagcaaagagagctacatctcgataaatcgcaaatctcaactgctcatcaactgcataccaataactaatatcttcgttttgtaa

SEQ ID NO: 58592 - protein, 764 aa, Kluyveromyces lactis NRRL Y-1140
MELNLISLWFFIWVILVRTVDCFKAEPYSFTKNELNQYKDQVKELFYHGFNSYLEYGYPYDEVLPIACVPMKRRFDDPYDTNTNDVLGNFTTTLVDSFTTLAVLGDKKGFADAINLFHKTVPETFDIDSTVQLFETTIRLLGGMMSAHIYATDPRTKVYLGKDNYDGFLLRRCIALGDKLLMAYLSPTGLPVPRINLRYGTRIDPKLIEENNAAATASPLFEFRLLSMLTLNDTYREVSEFSFNRTWDLRSELNLVPMSFSPYDTTIYNEVTGIGASIDSFYETALKGSILFDDSWLYSVWETAISALNSYSKTDWFYSNVGVSHGKTVVLWIDSLSAFFPGLLTLDGRLEDARKKHIMFSKLWSTYGGIPERWNFVQSPPTTEELDSPSLSIDLEWYPLRPEFIESTYYLYRATKDVYYLNIGIRILKDLQHRFKTRCGFAGLQDVTTGEVQDRMESFVLGETLKYLYLLFDEDNELHTTLWNHIFSTEAHPFWIDVGLKRRYESYRREADPPHVTTEMYQFHLLKAKNWMRRTKSPNRRINHAKKKLDGQCISPELAYTKRQSNRQGFQDSDVLSDPKLFEIDFRYQATLEQPAWNKGYIPFELTPELYSHWSFSQQKICLVPLTKAFEGTIGSRDPDSTLISTHQWSSDARMYRFQSIYGIKIAFLDFTWHPNSIEVQDPNSKFDLYDVLNKQNCKPKDDTSIHTYTVTAIDGIDLGDNDVVVVNKSSLFFDDSSKESYISINRKSQLLINCIPITNIFVL

SEQ ID NO: 58593 - DNA, 2541 bp, Debaryomyces hansenii CBS767
  CDS (1)..(2541)
atgttctatacttcaataaacaatcgaattgcacttgtgacatgtatacttgcgtgtttctgttgcgtgcaatcattgaaataccaatacgaatcatccttcactccaaatcatatacaatatttgaaaaatgagacgagacttctattcaaacatgcatggtcgtcatacatgcaatatggatttccagcagatgaggtattaccggatacgtgtgagccttatggcccagattacaataatgtcgataacgtggtaagaaatgatgctttgggcaatacttctctgacgattctagacaatttggatactttaatgataatggaagaatgggaagagttagagagggctttagaataccttaaatcagaagagaagaccttatttaataaagatacaatagtgcaagtttttgaaactaccattcggtcgttaggtgggcttttatcgacacatctacttttgacagatgttactaaaggcaataaaatattgccatcaagataccaaaaattcaaggaaatatctgataactatgatgggtccttatcaaatatggcatatgatttgggacttaagttacttccagccttcaagacatccacagaaatacccgttcctcggattaatttggcaaaaggggtcttaaaagtaccatcaaatcttcaaaaagaaacttgtacatctggtgctgcgtcgccggttcttgaatttactcttctctcaaagctctcaggagacccgcaatttgaatactattcacaattgacgttttggaaactttggtcttccagactggcgcttgatttaatgccaatgtcaatagatccaattgcaaataaatggaaggatcaaattacaggaataggagcttccgttgattcattttatgagtatgcggctaaggcatctatactatttaatgatgattatatgtggcatgtatttaaaacctcgtataaagcattactagcccacctggtccaaggaggtggagataatgaaggagtgatgatatttggaaatgtaggggttaatgatggctcattggcttctatatggatagatctgctcggtgcattttggtcgggtctacaagtcttgactgggcaattgcaagatgcaattaaaacgcacttgatgtacttaaaattatgggatcattttgacctgattcctgaaagatggaactttttactaaataaatctcaattagagaacgatgattctgaagcgataatgcttgagtggtatccactaaggcccgagtttatcgagtctacatattacttatatagagcgactcgagacccaatgtacctacagatcggagctagagtacttgaattattacaaactaagtacaagacaatttgcggattccatggattacaggacataagaacaggaaattttcagaatagaatggagaccttcgttatgagtgaaacattgaagtatttaatgttattatttgatgctgataatgagatatttcttcatacaagcatgatgagcaataagaactggattttttcaaccgaagcgcatcctatgtggtttgataaacgattagatccatacaacttcacacattccagatctgccgataaacaaaacatgggtacgttgaaaaacctgctttttgctaagatgaagtcaaagtttagtagaagcaagcggaaattgaccactgctgatgaaaagacattctaccgaaacattactacaccacgagtgatcacatacgagatgcccggaataatagaaaatggggatatacacaagatcgatccattggaaagtaagtttgacaaatgtgaagtaaacgtatttaataataagccatcgatgttaacagtatccgggtattaccaattgagctctttcttctatccagatcatgcattcaaatactccctaataaagccacgttatcttctgaaatcggctcttgatggaagctgtgtagaattgacgccgtctttcctcagaatttttgcaatgtcaggacctgataatactaccaaataccatcaccagtgtcctagaacatcgaccactacataccttgaactagttttaggaaatatcgaaaaagcccaaagtgtcgagatttcaagattaaagtataagagaaagcaaccaactgagtatatttctcttcaagaagatgatttatgggttcctgacttttcctcgattagactaaagattgagaaattatcgtctggcttgatcgattccgaaaatatgttaatcactgactcattcatacaatccattagagttgacgattataatgccgagataggaatgtctgccgcgaatcaatctgtttctactacaaaggatatcctgttggtactcagaatcaagaaaatcaacggtatatctgttaagcccggccaggttgtatggacattaccatttgaaattaatacatcaatcataggtgactcatcaattggggttgcaagtgacaatagagtagtattacaaggcaatgtagttgaaaacttgaaggtatggtatggttaa

SEQ ID NO: 58594 - protein, 846 aa, Debaryomyces hansenii CBS767
MFYTSINNRIALVTCILACFCCVQSLKYQYESSFTPNHIQYLKNETRLLFKHAWSSYMQYGFPADEVLPDTCEPYGPDYNNVDNVVRNDALGNTSLTILDNLDTLMIMEEWEELERALEYLKSEEKTLFNKDTIVQVFETTIRSLGGLLSTHLLLTDVTKGNKILPSRYQKFKEISDNYDGSLSNMAYDLGLKLLPAFKTSTEIPVPRINLAKGVLKVPSNLQKETCTSGAASPVLEFTLLSKLSGDPQFEYYSQLTFWKLWSSRLALDLMPMSIDPIANKWKDQITGIGASVDSFYEYAAKASILFNDDYMWHVFKTSYKALLAHLVQGGGDNEGVMIFGNVGVNDGSLASIWIDLLGAFWSGLQVLTGQLQDAIKTHLMYLKLWDHFDLIPERWNFLLNKSQLENDDSEAIMLEWYPLRPEFIESTYYLYRATRDPMYLQIGARVLELLQTKYKTICGFHGLQDIRTGNFQNRMETFVMSETLKYLMLLFDADNEIFLHTSMMSNKNWIFSTEAHPMWFDKRLDPYNFTHSRSADKQNMGTLKNLLFAKMKSKFSRSKRKLTTADEKTFYRNITTPRVITYEMPGIIENGDIHKIDPLESKFDKCEVNVFNNKPSMLTVSGYYQLSSFFYPDHAFKYSLIKPRYLLKSALDGSCVELTPSFLRIFAMSGPDNTTKYHHQCPRTSTTTYLELVLGNIEKAQSVEISRLKYKRKQPTEYISLQEDDLWVPDFSSIRLKIEKLSSGLIDSENMLITDSFIQSIRVDDYNAEIGMSAANQSVSTTKDILLVLRIKKINGISVKPGQVVWTLPFEINTSIIGDSSIGVASDNRVVLQGNVVENLKVWYG

SEQ ID NO: 58595 - DNA, 1773 bp, Debaryomyces hansenii CBS767
  CDS (1)..(1773)
atgctatttaaaggattcatagcgtctttggtattctacgtaatctattactatgcgtctacaggggcacttgactttgaatttggaggaagtagcaaaacttgggctgacaagcaacaggaagtgaaagatgtgtttttggaaagttggagttcatacgagaatcatgcctggggtaaggatgtatatcaccctataaaagaaacgggaagcaacatgggacccaagcctttgggatggatgattgttgattcgttggatacattgatgattatggattgtcctgaacaattggcccgtgccaggaagttcgtcaaggatgacctcgactatcattttgattacaatgtcaatgtatttgaaacgacaattcggatgcttggggggttactctcggcccatcacatttctgaggatgatatgtacttggacaaggccatggacttggcaaatgggttaatgggtggtttcgacagcaacagtgggttgccttatgcttccgtgaacttgatgacgggcgaaggtatcaagaatcatgttgataatggtgcgtcatctacagcagaagtggcaacattgcaattggagttcaaatacttatcgaagttaacaggagagaccttattctgggaaaaagttgaaaaagtgatgaaagttctcgatgaaaataagccgcaagatgggttggtacctatttacgtccaacctgataccgggaaatatcagggtaagttaatcagattgggctccagaggtgattcatactacgaatacttattgaagcagtacttacaaacgaacaaccaggaacctatctattgggacatgtaccgtgaatctgtagatggagtcaaaaagcacttggtaagaaaatcatcgccaaatggattgacctacattggtgaattagagcatggaattggaggtggattatcgccaaaaatggaccacttggtgtgtttctatggtggattattggccgttggggccaccaacgggttgccatacaaagaggctaagaagttaccaaattgggatgctgataaagaatctgacttcaagttgggtgaagaattgacttactcctgctacaagatgtaccacgatgtaccatcgggattatcgcctgaaattgcagtatttaacgaaaaccctcaggttaaaagtgacttctacatcaagccactcgatagacataacttgcaacgtcctgaaaccgtcgaatctttattctacttatatagacttacaggtgacgtcaagtaccgtgaatacggatatgagatcttccagaatttcctcaagcacactaaggtcaccaacgcaaaaggggaggtgtcttacacctctttggatgatgtcacgcaggtccccccaccaaagagagacaatatggaatcgttctggtttgctgagaccttgaaatacttgtacttattattcgacgatactaacaagttccccttggacaaatatgttttcaacacagaagcgcatccatttccaagattcgatttgggtcttttacacaagactgactggaccagagataagccgtatctcaagtctcctcaagccaacttcaagcttcctgaccaaaaaatacaggacactcctaagaatgatccgaaaaatattcctgaagctgcaccagctgataagcccgctatcgaggaggctatgaaggaggctcaaaagaatccagaaatcctaaaagatgcaaaggcagagaagaaggagaagctaaacaaaatgttacaagatcttgattag

SEQ ID NO: 58596 - protein, 590 aa, Debaryomyces hansenii CBS767
MLFKGFIASLVFYVIYYYASTGALDFEFGGSSKTWADKQQEVKDVFLESWSSYENHAWGKDVYHPIKETGSNMGPKPLGWMIVDSLDTLMIMDCPEQLARARKFVKDDLDYHFDYNVNVFETTIRMLGGLLSAHHISEDDMYLDKAMDLANGLMGGFDSNSGLPYASVNLMTGEGIKNHVDNGASSTAEVATLQLEFKYLSKLTGETLFWEKVEKVMKVLDENKPQDGLVPIYVQPDTGKYQGKLIRLGSRGDSYYEYLLKQYLQTNNQEPIYWDMYRESVDGVKKHLVRKSSPNGLTYIGELEHGIGGGLSPKMDHLVCFYGGLLAVGATNGLPYKEAKKLPNWDADKESDFKLGEELTYSCYKMYHDVPSGLSPEIAVFNENPQVKSDFYIKPLDRHNLQRPETVESLFYLYRLTGDVKYREYGYEIFQNFLKHTKVTNAKGEVSYTSLDDVTQVPPPKRDNMESFWFAETLKYLYLLFDDTNKFPLDKYVFNTEAHPFPRFDLGLLHKTDWTRDKPYLKSPQANFKLPDQKIQDTPKNDPKNIPEAAPADKPAIEEAMKEAQKNPEILKDAKAEKKEKLNKMLQDLD

SEQ ID NO: 58597 - DNA, 1719 bp, Oryza sativa (japonica cultivar-group)
  CDS (1)..(1719)
atggctcgtcggtcctcctcctcctcgtcgtcgtcgggggcgtggcggtacctcaacccggcgtattacctcaagcggccgaagcgcctcgccctcctcttcttcgtcttcgtcgccgccaccttcgccttctgggatcgacagtcgctcgtccgcgagtacgagtcagaaatttctcgattggatgataaagtaaatcagttgcgtgaccagttaagaaaggctggagttcatctggatgaaaatccaacaggtgacaaagtatccagagaaaagcttgtagaaattgatcctattaataatgaaaggagagaaaaggttaaggaggctatggcccatgcttggaattcctatgtgaagtatgcctggggaatggatgaacttcagccacaatcaaagaatggtgtcaatagctttggtggtctcggggcaactcttgtggactcacttgatacactgtatataatgggcctaaaggatgaatttcagagggccagagactgggtggccgattcactaagctttgacaaggattacgatgcaagtgtctttgaaacgaccataagagttgttggaggcctcctcagtgcatatgatctatctggtgacaaagtatttcttgagaaggccaaagatattactgaccgtctactacctgcttgggatacaccatctggtatcccttataatagaatcaacctagctcatggacgagcccataatcctggatggaccaatggtgatagtatccttgctgattctggcacggagcaacttgaatttatagctttgtcacagaggactggtgatcccaagtatcaacaaaaggcagagaatgtcatcagacagcttcagaagatatacccaagcgatggcttactccctatatacataaaccctcattcaggaactgcgtcgtactcaacaattacatttggtgcaatgggagatagcttctacgagtacttgctcaaggtttgggtccaggggaataaaactgagcatgtaaagcattacagacaaatgtgggagacatcaatggaaggcctactaagcttgaccaaaaaaactacaccctctaattactactacatttgcgagaagaatggtggttcattgtctgacaagatggatgagcttgcatgttttgcccctggtatgctggcactgggggcctctggctatgaggagactgaaaaggctgaagaaattatgaatcttgcgaaagagcttgctcggacctgttataacttctaccaaacaactcctacaaagttggctggggagaattattttttccatactggacaggatatgaacgtgggcacatcatggaatatcctgagacctgagactgtcgaatcacttatgtacttgtggcgtcttacggggaacaaaacataccaagactgggggtgggacatattccaggcatttgaaaagaactcccgcatagaatctggttacgttgggctgagagatgtgaatactggcgagaaggataacatgatgcaaagcttcttcctagcagagactctcaagtacctatacctcctgttctctcctccatcagtcatatccttcgatgagtgggtcttcaataccgaagcccacccattgcgaattgttcctttaaatgacaatagcaaagcccactcagtaggcattgcaacaccgacggtacgaccgttcgggaggaagcaggggaaacaagagtag

SEQ ID NO: 58598 - protein, 572 aa, Oryza sativa (japonica cultivar-group)
MARRSSSSSSSSGAWRYLNPAYYLKRPKRLALLFFVFVAATFAFWDRQSLVREYESEISRLDDKVNQLRDQLRKAGVHLDENPTGDKVSREKLVEIDPINNERREKVKEAMAHAWNSYVKYAWGMDELQPQSKNGVNSFGGLGATLVDSLDTLYIMGLKDEFQRARDWVADSLSFDKDYDASVFETTIRVVGGLLSAYDLSGDKVFLEKAKDITDRLLPAWDTPSGIPYNRINLAHGRAHNPGWTNGDSILADSGTEQLEFIALSQRTGDPKYQQKAENVIRQLQKIYPSDGLLPIYINPHSGTASYSTITFGAMGDSFYEYLLKVWVQGNKTEHVKHYRQMWETSMEGLLSLTKKTTPSNYYYICEKNGGSLSDKMDELACFAPGMLALGASGYEETEKAEEIMNLAKELARTCYNFYQTTPTKLAGENYFFHTGQDMNVGTSWNILRPETVESLMYLWRLTGNKTYQDWGWDIFQAFEKNSRIESGYVGLRDVNTGEKDNMMQSFFLAETLKYLYLLFSPPSVISFDEWVFNTEAHPLRIVPLNDNSKAHSVGIATPTVRPFGRKQGKQE

SEQ ID NO: 58599 - DNA, 2106 bp, Oryza sativa (japonica cultivar-group)
  CDS (1)..(2106)
atgagcggcggcggcggcggctcgggccccctcccctactcgatgcgcgatgtggacggccgcggcgcctacaacaacgccaagttccgccaccgatctcgcctcaaggttttgctccctcccgatccccttccacccctcccatttctttccccgcgaggagatgtagaaggtgtggaatctggttggcttgagggattcatggctccccgatctgtgggtttagctgctgccgaattagttcttggtcatgtccgtgggcgtctgcgccttaggatggcctctcaggctctgtttaccaatagcagcaagtaccaatgtggaaagttcactgttggaaaatttttgagtcttttaatggtttctggcgtaatatacttacttgtgcacaaaagttcggatggttttgtatccggtgagctccatgaaaaagtagggaatacacataccaagaaagattttcccaaaattcgtacattttggagaaagccaccaaggctgccgccacgtcttcctccaaatgaaatctatagaaacaattcattgcttctacagtctcctcaatctgaatggacactcagacagaagaaagttaaagaagcatttgaacatgcatggtctggctatcgaaattatgcaatgggttatgatgagcttatgcctttaacccgccgaggtatagatggactaggaggtctaggcgctactgttgtagattctttagacactgcaataataatgggtgctgatgatgttgtttccgaagcatcaaaatggattgaagataatctcatgaaaaagttaagtgagaaagggcaggtcaatctatttgaaactactatccgtgtcttgggagggcttcttagtgcctatcacttgagtggtggtgacaaagcaagaggtgactctgggataccaatgacatctaaaagggctaatccggagcgtcttttggaagtttcaaaggacttggcagacagattattgttagcctttacatcaagcccaactgctatacctttaagtgatgttgttcttcgagatcgaactgcacatgcagcccctgatggtttaagcagtacctctgaggctacaacattgcagctggagtacagttaccttagcacaatatcaggagatccaaagtatgacttagaggcaatgaaagtgttagagcatatgcgaacactcccaacagtggagggtttggttcctatttacatcaatccctcctctggtcaatttagtggagaaaatattcgattaggatctcgtggtgacagttactatgaatacctattgaaagtatgggttcagcaagaaagatatcgtgacactagtttgaagtatctatttgaaatgtatacagaagcaatgaaaggggtcaagcatcttcttgttcgaaaaactattccaaatgggctggtcttcgttggggagctcccctatggacgaaatagtggttttagccctaaaatggatcacctggtgtgttttcttcctggtacccttgctctgggtgcaacgaagggtataaccaagaaaaaagctcttgaaaatcatttattgactgcggaagacatagacaatctgcagcttgctgaagatttggccaaaacttgtgttgaaatgtactttgtgacatctactggacttgctcctgaaattgcttattttcacattgagggtaattctgagggaggacctgatggtgggaacaaaagttctcaatatgttaatgatatcataatcaaacctctggatcgtcacaatcttttacgcccagagactgtagaatcactatttgttttatatagaatcacagaggatccgaagtatagggaatggggttggcagatttttcaggcttttgagaagtatacaagagttgattctggtggctatacttcattggatgatgtcacaagcttgcccccacctaggagagacaaaatggaaactttcttccttggagaaacactgaaatacttgtatttgctgtttggtgaaagcaatattcttccattagataagtatgtattcaacacagaggcccatccacttccaatcattcagtctgcacaacagatctctcattcggtatag

SEQ ID NO: 58600 - protein, 701 aa, Oryza sativa (japonica cultivar-group)
MSGGGGGSGPLPYSMRDVDGRGAYNNAKFRHRSRLKVLLPPDPLPPLPFLSPRGDVEGVESGWLEGFMAPRSVGLAAAELVLGHVRGRLRLRMASQALFTNSSKYQCGKFTVGKFLSLLMVSGVIYLLVHKSSDGFVSGELHEKVGNTHTKKDFPKIRTFWRKPPRLPPRLPPNEIYRNNSLLLQSPQSEWTLRQKKVKEAFEHAWSGYRNYAMGYDELMPLTRRGIDGLGGLGATVVDSLDTAIIMGADDVVSEASKWIEDNLMKKLSEKGQVNLFETTIRVLGGLLSAYHLSGGDKARGDSGIPMTSKRANPERLLEVSKDLADRLLLAFTSSPTAIPLSDVVLRDRTAHAAPDGLSSTSEATTLQLEYSYLSTISGDPKYDLEAMKVLEHMRTLPTVEGLVPIYINPSSGQFSGENIRLGSRGDSYYEYLLKVWVQQERYRDTSLKYLFEMYTEAMKGVKHLLVRKTIPNGLVFVGELPYGRNSGFSPKMDHLVCFLPGTLALGATKGITKKKALENHLLTAEDIDNLQLAEDLAKTCVEMYFVTSTGLAPEIAYFHIEGNSEGGPDGGNKSSQYVNDIIIKPLDRHNLLRPETVESLFVLYRITEDPKYREWGWQIFQAFEKYTRVDSGGYTSLDDVTSLPPPRRDKMETFFLGETLKYLYLLFGESNILPLDKYVFNTEAHPLPIIQSAQQISHSV

SEQ ID NO: 58601 - DNA, 2067 bp, Yarrowia lipolytica CLIB99
  CDS (1)..(2067)
atgaaatggtggcttctgacgccggttctggcgtttgatttcagccgtgggtcgctccatgcgctgcgcaacgagagcgagacgctcttcgaccacgcctacaattcctacatgctccatgggttcccgcatgacgaggttcgaccaattgcatgcgagggggtcacgcgagacaaggacgagacgaatctgggtcgcaacgatcttatgggcgggtggccggtgactcttatcgacacgctggacacgctggcggtgatgggccgcaaagccgagttcgaacagggcgtttcgcaggttctgcaacacgtcaagaactttgactacgacgccacggtgcaggtgtttgaaacgaccatcagaacattgggaggtcttctggcggctcatacgtacgcctcatcaccggacctgggcatgcagatacaaaactacggcggagaactgctaactctggcgacagatctgggagatcgactgctgttggcgttcgaaggggtcgatcatggaatcccgcaccctcgagtcaacttgcgacgaggtatcagaccggtgggaggcaagtacatcaccgacgcctgtgcagccggaggagggtctttgctgctcgagtttggactactgtcaaagctgactcgagacccaaaatacattgatgcggcggagaaatccttcttcgccatctgggaactgcgatcggacagagacctgcttcctatgggcatagaccaggacacactgcgcattacctcggccatgagcggggtcggcgcctcggcagactcctactacgagtatgccctcaagtggtacctcatgtctggagacgagcggttctgggaggtgtactcgcgatcaagacgggccatcgatacctggaacacccatccggacacatggcatcattacaatgtgcactatgtgactggcgaaggcgtggcgccctggatcgattctctcagtgccttcttccctactctggacgtgcttaccggcaatctcaagcgggccatcaggacccatctcacccatatgaagctgtggaacacttatgccggcattcctgaacgctggcggttcacagacgcccaggtcgatctggagtggtaccctctacggcccgagctcatagagtcgacttactacctctaccgagctacccgagacgtcttctatctgcaatgtggacgtaagatcatgtccgatctcaatctgcgtaacaaggtggaatgtgggtatgcaggcacccagaacgtcaagaccggcgaactggcggaccggatggagtcgtttttcatgtctgaaactgcaaagtatctctacctgctgtttgacaccgacaacggcctcaacaacgactcgcgacagttcatctggagcaccgagggccatcctctttactttgacgatagggtgctttccaattcgtactctgagaagctccctcgtgagccctccaagggtctggaagacgtgaatggtacggctctcatctgtcccaaattcaaccatcccacaggccccttttctctcataggcgcatggccacacatgtacgatctcaatgctcggtataagtacgagaagccctggtatctgcgtcccattctaaaccggccgtggtcgactctgctgcgaaagctccgaaacgacggcacgtcagtcgtcaaaaagggcatgatggcagatgctgaaatggagcctgggttctacgagcgctatgtggctggcaccagacccacatgcgccgccattctcgacggagacatgcatgacgtgtcgtttggaagcgacaccaccagtgtttatcccccgctgtaccaggagcccgattccaagacgggctatctggagtttgagtctctggatggagtcaagttgacgcttgtggcgcgcgacaatcacttttggctgctcaacatcaatggagtgggctgttccggagccaacgtggactggtattacaatgtgcccaacaacgtgatcaacatcaacaaggctaccggcctgttgaactttcggggtcgcgatgtgcccaacatcaaaatcggcaagatcatttcgtga

SEQ ID NO: 58602 - protein, 688 aa, Yarrowia lipolytica CLIB99
MKWWLLTPVLAFDFSRGSLHALRNESETLFDHAYNSYMLHGFPHDEVRPIACEGVTRDKDETNLGRNDLMGGWPVTLIDTLDTLAVMGRKAEFEQGVSQVLQHVKNFDYDATVQVFETTIRTLGGLLAAHTYASSPDLGMQIQNYGGELLTLATDLGDRLLLAFEGVDHGIPHPRVNLRRGIRPVGGKYITDACAAGGGSLLLEFGLLSKLTRDPKYIDAAEKSFFAIWELRSDRDLLPMGIDQDTLRITSAMSGVGASADSYYEYALKWYLMSGDERFWEVYSRSRRAIDTWNTHPDTWHHYNVHYVTGEGVAPWIDSLSAFFPTLDVLTGNLKRAIRTHLTHMKLWNTYAGIPERWRFTDAQVDLEWYPLRPELIESTYYLYRATRDVFYLQCGRKIMSDLNLRNKVECGYAGTQNVKTGELADRMESFFMSETAKYLYLLFDTDNGLNNDSRQFIWSTEGHPLYFDDRVLSNSYSEKLPREPSKGLEDVNGTALICPKFNHPTGPFSLIGAWPHMYDLNARYKYEKPWYLRPILNRPWSTLLRKLRNDGTSVVKKGMMADAEMEPGFYERYVAGTRPTCAAILDGDMHDVSFGSDTTSVYPPLYQEPDSKTGYLEFESLDGVKLTLVARDNHFWLLNINGVGCSGANVDWYYNVPNNVININKATGLLNFRGRDVPNIKIGKIIS

SEQ ID NO: 58603 - DNA, 1890 bp, Yarrowia lipolytica CLIB99
  CDS (1)..(1890)
atgagcttcaacattcccaaaaccacgccgaatttctcagccaaagcgcggaaactcgaagatcaactgtggcaagctagtgggctcgaaaaatctaaggactccacgttgccgctatacaaagacaagccgtatggagaggggtttgtggcccggaccacctctggccgccgaagacgcaacatcatctacggagtggtggtaggtcttctgttctgggcgatctacaccttctcgcgctccctggacggaaatgtgtctctgaaggacggaatcaaggactatgagttcaagggatggaagggacgaggcaagcccaaaaccaattgggtagcggaacagaatgccgtgaagcaggcctttgtcgacagttggaacggctatcacaagtacgcctggggcaaggatgtgtacaagccccagaccaagactggcaagaacatgggacccaagcctctgggctggttcattgtggactctctggactctctgatgctcatggggctggagaaggaactggctgaagctcgatactgggtcgacaaggatctggactacaacatagactacgaagtcaacacttttgagacgacaattcggatgctgggaggtctgctttcggcacactacctctccaaggacgacttgtaccttgacaaggctgtgaatcttggaaaccgacttctaggtgcctttgacagcgaatctggagtgccttatgcttctgtcaacctcaagacccgaaagggagtcaaaagtcacgcagatggaggagcttccagtaccgccgaggcggccactgtccaactggagttcaagtacctctccaaactcaccggagaggctctgtactgggagactgctgagaaggtgatgaaggttatggaggctaacaaggctgaggagggtctggttcccattttcatccagccggatactggcaagttccagggcaaccagattcggctcggctcgcgcggcgactcgtactacgagtatctcatcaagcaatatctgcagaccgaaaagcgggaggaaatctaccgagacatgtacgaggaggctgtggacggaatcaagcaccatatggtgaaacagagcgtccctggcgatctggcgttcattggcgagcttgaccggggtattagtggccccttctccaccaaaatggaccatctggtctgttttgcaggcggtatgtttgctctgggtgccaccgaaggatacactcaaaaggaggtggagcgatctgagtcgtggactcagacccgacaggtgaacctgagacttggagttgagctcactcgaacctgttacgaaatgtaccaccagactgtcaccggtctgtctcctgaaatcgttttcttcaacgaccacaacactctcagcaaggacttttctgtcaagccccaggacgcccataacctgcagcgtcccgagacagttgagtcgctcttctacctctggcgaatcacccgaaaccccatctatcgagaatggggctgggagattttccaggcgttccaaaagtacaccaaggttcctggagacgccggttacgactccatcaacaacgtcgagtcgacagagccatcttggagaaacaatatggagtccttctggctgtccgaaaccctcaagtacctgtacctgctgtttgacgactccaaggaggaggtgctgcctcttaccgatattgtcttcaacaccgaggctcatcccttccccaagtttgatatggagcctctgtttaccactggttggactcgagctcctgtgcaggctgccaagaaggagccccaggtggagcagaaagtggagaagattcctgacgagcctgccgcggagtttaagcctgcgcaggttcctgctgatcctattaggggttga

SEQ ID NO: 58604 - protein, 629 aa, Yarrowia lipolytica CLIB99
MSFNIPKTTPNFSAKARKLEDQLWQASGLEKSKDSTLPLYKDKPYGEGFVARTTSGRRRRNIIYGVVVGLLFWAIYTFSRSLDGNVSLKDGIKDYEFKGWKGRGKPKTNWVAEQNAVKQAFVDSWNGYHKYAWGKDVYKPQTKTGKNMGPKPLGWFIVDSLDSLMLMGLEKELAEARYWVDKDLDYNIDYEVNTFETTIRMLGGLLSAHYLSKDDLYLDKAVNLGNRLLGAFDSESGVPYASVNLKTRKGVKSHADGGASSTAEAATVQLEFKYLSKLTGEALYWETAEKVMKVMEANKAEEGLVPIFIQPDTGKFQGNQIRLGSRGDSYYEYLIKQYLQTEKREEIYRDMYEEAVDGIKHHMVKQSVPGDLAFIGELDRGISGPFSTKMDHLVCFAGGMFALGATEGYTQKEVERSESWTQTRQVNLRLGVELTRTCYEMYHQTVTGLSPEIVFFNDHNTLSKDFSVKPQDAHNLQRPETVESLFYLWRITRNPIYREWGWEIFQAFQKYTKVPGDAGYDSINNVESTEPSWRNNMESFWLSETLKYLYLLFDDSKEEVLPLTDIVFNTEAHPFPKFDMEPLFTTGWTRAPVQAAKKEPQVEQKVEKIPDEPAAEFKPAQVPADPIRG

SEQ ID NO: 58605 - DNA, 1884 bp, Canis familiaris
  CDS (1)..(1884)
atgtcagcccggagagctcagatgctctcgcctcgcagcttctcgacgggggacttttgctcggaccgctgccgggcccccggggaacccccgccctgggtaacaggcgggaaggcgcgggagaagacacccgttgggagctaccccgcgcccgggagggccccgaccttccgcccgccgccgaccgcaagcccgggcccggggcgcgctccgaggaacgcggaggcggagggccgatcccggcgcggcgacggggaccccgcggccgccctggaggacaacttggcccggatccgcgagagccacgagcgggctctccgggaagccaaggagaccctgcagaagctgcccgaggagatccagagggacatcctgctggagaaggagaaggtggcccaggaccagctgcgcgacaaggcgctggcgaggcggctgccgccgctggacttcgtgcccccggtcggcgcggtggcccgggagccggccgacgccgccgtccgcgacaagagggcaaagatccgggagatgatgaaacatgcttggaataattataagcgttatgcctggggattaaatgaactgaaacctatatcaaaagaaggccattctagcagtttgtttggtagtattaaaggagcaacaatagtagatgccctggatactctttttataatggaaatgaaagatgaatttgaagaggcaaaatcatgggttgaagaaaatctagattttaatgtgaatgctgaagtttctgtctttgaagtaaacatacgctttgttggtggactactctcagcctactatctatctggagaagagatatttcgaaagaaagcagtggaacttggggtgaaattgttacctgcatttcatactccatctggaataccttgggcattgctgaatataaaaagtggaattggaaggaactggccctgggcctcaggaggcagcagtattttggcagaatttggaactctgcatttggagtttctccacctgagccacttatcaggaaaccccatctttgccgaaaaggtaatgaatattcgaacagtactgaacaacctggaaaaaccacaaggcctttatcctaactatctgaatcccagtagtggacagtggggtcaatatcatgtatcagttggagggctcggagacagcttttatgaatatttgctaaaggcgtggttaatgtctgacaagacagatctagaagctaagaagatgtattttgatgctgttcaggcaatcgagactcacttgatccgcaagtctagtacgggcctgacttacatcgcagagtggaaggggggcctcttggaacacaagatgggccacctgacctgctttgctggaggcatgtttgcactaggggctgatgacgctcctgcaggcctaacccaacactaccttcagctcggggctgaaattgcccggacctgttacgaatcttacaatcgcacatatatgaaactgggaccagaagctttcagattcgatggcggtgttgaagccattgctacaaggcaaaatgaaaaatactacatcctacggccagaggttgttgagacgtacatgtacatgtggcgactgactcatgatccaaagtacaggaaatgggcctgggaagccgtagaggccctggaaaatcactgccgcgtgaacggaggctattcaggcctaagggatgtttacctccgacacgagagttatgacgatgtacaacagagtttcttcttggcagagacactgaaatatttgtacttaatattttctgatgatgatctgcttccactggaacactggatcttcaataccgaggcacatcttctccctgtactctgtacgaataaaaaggaagtcgaagtcaatgcaaaataa

SEQ ID NO: 58606 - protein, 627 aa, Canis familiaris
MSARRAQMLSPRSFSTGDFCSDRCRAPGEPPPWVTGGKAREKTPVGSYPAPGRAPTFRPPPTASPGPGRAPRNAEAEGRSRRGDGDPAAALEDNLARIRESHERALREAKETLQKLPEEIQRDILLEKEKVAQDQLRDKALARRLPPLDFVPPVGAVAREPADAAVRDKRAKIREMMKHAWNNYKRYAWGLNELKPISKEGHSSSLFGSIKGATIVDALDTLFIMEMKDEFEEAKSWVEENLDFNVNAEVSVFEVNIRFVGGLLSAYYLSGEEIFRKKAVELGVKLLPAFHTPSGIPWALLNIKSGIGRNWPWASGGSSILAEFGTLHLEFLHLSHLSGNPIFAEKVMNIRTVLNNLEKPQGLYPNYLNPSSGQWGQYHVSVGGLGDSFYEYLLKAWLMSDKTDLEAKKMYFDAVQAIETHLIRKSSTGLTYIAEWKGGLLEHKMGHLTCFAGGMFALGADDAPAGLTQHYLQLGAEIARTCYESYNRTYMKLGPEAFRFDGGVEAIATRQNEKYYILRPEVVETYMYMWRLTHDPKYRKWAWEAVEALENHCRVNGGYSGLRDVYLRHESYDDVQQSFFLAETLKYLYLIFSDDDLLPLEHWIFNTEAHLLPVLCTNKKEVEVNAK

SEQ ID NO: 58607 - DNA, 2013 bp, Canis familiaris
  CDS (1)..(2013)
atgggtcttacaagcacagtgagcgatgcttacagattagggtgttctggtaaaaagagtagggttcaggatacctttttgcgccatccggaaccacaagctggcagcatccctaacccggggctggaggcgctctctccggccccggctaggcgggagacgcgcgctccccagggcccggcggcgagggggccgcgtcgcggtcgggtgtctgccggtgctcccgtgccgcgctcccattggctgcaagtttcctcgccagtagccggagcggcccctggtcgccacgccagcccacgggggcggccggggccggcggtgtgcggcccggcgcactggggctacgtgctgggcagccgcggccgcggcccggacgagtacgagcggcgctacagcggcgccttccctccgcagctgcgcgcccagatgcgcgacctggcgcggggcatgttcgtcttcggatacgacaactacatggcgcacgccttcccccaggacgagctcaaccccatccactgccgcggccgcgggcctgaccgcgtggacccttcaaatctgaacatcaatgatgtcctagggaattattcattgactcttgttgatgcgttggatactcttgcaataatgggaaattcatctgagttccagaaagcagtcaagttagtgatcaacacagtttcatttgacaaagattccaccgtccaagtctttgaggccacaataagggtcctaggaagcctcctttctgcccacagaataataactgactccaagcagccctttggtgacatgacaattaaggattatgataacgaattgttgcacatggctcacgatctggctgtgcgcctcctccctgcctttgaaaacaccaagacagggatcccctatcctcgggtgaatctaaagacaggtgttcctcctgacagcaataatgagacgtgcacagcaggagctggttccctcctggtggaatttgggattctgagccgactcctaggggactctacatttgagtgggtggccagacgtgctgtgaaagccctttggaacctgcggagcaatgatacgggattattaggcaacgtggtgaacattcagacaggccgctgggttggcaagcagagcggcttgggcgccggcctggactccttctatgaatacctcttgaaatcttacattctctttggagaaaaggaagacctagaaatgtttaatgcagcataccgaagtattcagaactacctgagaagaggtcgggaagcctgtaatgaaggagaaggagaccccccgctgtatgtcaatgtgaacatgttcagtgggcagctgatgaacacttggatcgactctctgcaggccttcttccccgggctgcaggttctgataggagatgtggaagatgccatctgcctccatgctttttactacgccatctggaaacgctacggggccctccctgagaggtataactggcagctccaggcccccgatgtgctcttctacccgctgagaccagagctagtggagtctacatatctcctctaccaggcaaccaagaatcccttctacctccatgtaggaatggatattctgcagagtctggaaaagtacacaaaagtcaagtgtgggtatgctacattgcatcatgtcatagacaaatccaaagaggaccggatggagagcttctttctcagtgagacctgtaaatacttgtatctgctatttgatgaggagaatccagtccacaaatctggaaccaaatacatgtttacaaccgagggacacattgtatctgtggacaaacatcttcgggaatctccttggaaggaattcttttctgaagagggagggcaggacccagaggggaagtctgtgcacgggcctaaatcacccgagataaaagtcatcaactccagctccaattgcaatcgtgttcctgacgagaggagatactccctgcccttaaagagcatctatatgcggcagattgaccagatggttggcttgatttga

SEQ ID NO: 58608 - protein, 670 aa, Canis familiaris
MGLTSTVSDAYRLGCSGKKSRVQDTFLRHPEPQAGSIPNPGLEALSPAPARRETRAPQGPAARGPRRGRVSAGAPVPRSHWLQVSSPVAGAAPGRHASPRGRPGPAVCGPAHWGYVLGSRGRGPDEYERRYSGAFPPQLRAQMRDLARGMFVFGYDNYMAHAFPQDELNPIHCRGRGPDRVDPSNLNINDVLGNYSLTLVDALDTLAIMGNSSEFQKAVKLVINTVSFDKDSTVQVFEATIRVLGSLLSAHRIITDSKQPFGDMTIKDYDNELLHMAHDLAVRLLPAFENTKTGIPYPRVNLKTGVPPDSNNETCTAGAGSLLVEFGILSRLLGDSTFEWVARRAVKALWNLRSNDTGLLGNVVNIQTGRWVGKQSGLGAGLDSFYEYLLKSYILFGEKEDLEMFNAAYRSIQNYLRRGREACNEGEGDPPLYVNVNMFSGQLMNTWIDSLQAFFPGLQVLIGDVEDAICLHAFYYAIWKRYGALPERYNWQLQAPDVLFYPLRPELVESTYLLYQATKNPFYLHVGMDILQSLEKYTKVKCGYATLHHVIDKSKEDRMESFFLSETCKYLYLLFDEENPVHKSGTKYMFTTEGHIVSVDKHLRESPWKEFFSEEGGQDPEGKSVHGPKSPEIKVINSSSNCNRVPDERRYSLPLKSIYMRQIDQMVGLI

SEQ ID NO: 58609 - DNA, 1794 bp, Canis familiaris
  CDS (1)..(1794)
atgctcgtcaggaaagtgcctgtcttcgtcccggcctccccgtgggggctgcggctgccgcagaagttcgtcttccttctcttcctctcgggcctctttccctgtgcttcggggccctcttcctgctgcccaactcctcccgcctcaagcgcctcttcctggccccccggacccagcagcccggcctggagccaggccagtccccgccgccggaaagcgtggccgcggcgcacccaccccaccggggctcgggaggaggccacggcggcccggagcggcggcagcgcggccctcgggccccaggaggggggcgtcccgtttagctttgacttcagcgcgttccggagccgcctgcgccacccggtcctggggacgagggtggacgagagcaaggagccccagagcctggttcgggcccggcgggagaaaatcaaggagatgatgcagttcgcctggcagagctacaagctttacgcaatggggaaaaatgagctccggccactcacaagagacggctacgagggcaacatgtttggaggcctcagtggggcaaccatcattgactcccttgacaccctctacctcatggagctgcaggaggagttccaggaggccaaggcctgggttgaagagaacttccacctgaatgtgagtggagaagcatccttgtttgaggtgaacatccggtacatcggaggactcctctcagccttctacctgactggagaagaggtgttccgagtaaaggccatcaagctgggagagaaactcctaccagccttcaacacccccacgggaatcccaaaaggtgttgtaaacttcaaaagtggctccaacaggagctggggctgggccatggcagggagcagcagcatcctggctgagtttggatccctgcacttggagttcttacacctcaccgagctctctggcaaccaggtcttcgcagaaaaggtcaggaacatccgaaaggtcctcaggaagatcaacaagcccttcggcctctaccccaacttcctcagcccagtgagcgggaactggatgcaacaccacgtctcagttggaggacttggggacagtttttatgaatatttgatcaaatcctggttgatgtcagccaagacagatgtggaagctaaagagatgtactacgaagccttggaggcaatagagacctacttgctgaatgtctctcctggggggctgacctacattgctgagtggcgaggggggattctggaccacaagatggggcacctggcctgtttctctgggggcatgatcgccctcggcgctgaggatgccaaggaagaaaagagggcccactaccgagagctcgcagcccagatcaccaagacgtgccacgagtcgtacgcccgctcagataccaaactggggcccgaggccttctggtttaactccggcagagaggcagtggccacacagctgagcgagagctactatatcctgcggcccgaggtggtggagagctacatgtacctgtggcgacagacccacaaccccatctacagggagtggggctgggaagtggtgatggccttggagaaatactgtcgaacggaagctggtttctctggaatccaagacgtgtacagtagcatccccaaccacgacaacaagcagcagactttctttctcgcggagacactaaagtatctctatcttctgttctctgaagatgacatgctctccctggaagactgggtgttcaacacagaggcccaccccctccccgtgaaccactcggacagctccagcagggctgggggctga

SEQ ID NO: 58610 - protein, 597 aa, Canis familiaris
MLVRKVPVFVPASPWGLRLPQKFVFLLFLSGLFPCASGPSSCCPTPPASSASSWPPGPSSPAWSQASPRRRKAWPRRTHPTGAREEATAARSGGSAALGPQEGGVPFSFDFSAFRSRLRHPVLGTRVDESKEPQSLVRARREKIKEMMQFAWQSYKLYAMGKNELRPLTRDGYEGNMFGGLSGATIIDSLDTLYLMELQEEFQEAKAWVEENFHLNVSGEASLFEVNIRYIGGLLSAFYLTGEEVFRVKAIKLGEKLLPAFNTPTGIPKGVVNFKSGSNRSWGWAMAGSSSILAEFGSLHLEFLHLTELSGNQVFAEKVRNIRKVLRKINKPFGLYPNFLSPVSGNWMQHHVSVGGLGDSFYEYLIKSWLMSAKTDVEAKEMYYEALEAIETYLLNVSPGGLTYIAEWRGGILDHKMGHLACFSGGMIALGAEDAKEEKRAHYRELAAQITKTCHESYARSDTKLGPEAFWFNSGREAVATQLSESYYILRPEVVESYMYLWRQTHNPIYREWGWEVVMALEKYCRTEAGFSGIQDVYSSIPNHDNKQQTFFLAETLKYLYLLFSEDDMLSLEDWVFNTEAHPLPVNHSDSSSRAGG

SEQ ID NO: 58611 - DNA, 1983 bp, Canis familiaris
  CDS (1)..(1983)
atgtatccgccgctgccgccgccggcgccgcatcgggacttcatctcggtgacgctgagcctcggccagagctacgacggaagcaaaagctggcggcggcgctcgtgctggaggaaatggaagcagctgtcgaggttgcagcggaacgtgatactcttctcgctcacgttcctgatgctctgtggcttcctgtcctacatcagcgtggctgaccagtggacagccgtggacggcaggtcagcggaagagcagaaaacgagaccagcagatccacccgtcttgccagctcctcagaaagcagatgcacatccagaaaacatgcagggggccttacctcagaagcctcagaggcatttccgacggggaccacccaacctgcatcttagagcccccggtaaagactccgaggacccgaggcagggagacaccaagcggagggatgaggcggtgggcgatgctcatcaggaggaaagcacgcagagaacggtggtcagctggaggggagcggtgattgagccgcagcccggcaccgaacttccttcgaggaaggcagaggcccccgccaggccttcctcccaggcccccaggattcagaacccagcagcctccccaaacgagcgtcagagagctgtgattgacgccttccgccacgcgtgggccggataccgcaaattcgcctggggccatgatgagctgaaacctgtgtccaggtccttcagtgagtggtttggcctgggcctgaccctgattgacgctctggacaccatgtggattttgggtctgaaaaaagagtttgaagaggccaggaagtgggtgtcgaagaagctacggtttcagaaagatgtggacgtcaacctgtttgagagcacaatccggatccttggtgggcttctgagcgcctaccacctgtcgggggacgagctcttcctgaggaaggctgaagattttgggaatcggctcatgcctgcgttccagacgccttccaagatcccgtactccgacgtcaacatcggcactggggccgcccacccgccccgctggacctcggacagcacggtggccgaggtcacgagcattcagctggagttccgggagctctcgcgcctcacgggaagtaagaagtttcaggaggctgcggaggaggtgacgcggcatgtccactccctgtcgggcaagaaggacgggctggtgcccatgttcatcaatacgcacagcggcctcttcacgcacatgggcgtgttcactctgggagccagggccgacagctactacgagtacctgctgaagcagtggatccagggtggaaagcaggagacgcagttgctagaagactacctggaagccatcgagggaatcagaaggcacctgctgcgcaggtctgagcccagaaagctcaccttcgtgggggagctggcccacggccgcttcagcgccaagatggaccacctggtatgcttcctgccagggacgctggctctgggcgcccaccacggcctgcccgccgaccacatggagctggcccgggcgctcatggacacctgctaccagatgaaccgtcagatggagacggggctgagccccgaaatcgtgcacttcaacctgtacccccagaacgaccacaaagacgtgcaagtcaagccggccgacaggcacaacctgctgcggcccgagacggtggagagcctgttctacttgtaccgcctcacgggggaccgcaagtaccaggactggggctgggaaattctgcagagcttcaacacgtacacgcgggtcccctcgggtggctactcctccatcagcaacgtccaggatcccctcaatccccagcccagggacaagatggagagcttttttctgggggagacgcttaagtacctgtatctgctcttctctgatgacccagacctgctcagcctggacacctatgtgttcaacacggaggctcaccccttgcccatctgggccccgcctagggaggtgtga

SEQ ID NO: 58612 - protein, 660 aa, Canis familiaris
MYPPLPPPAPHRDFISVTLSLGQSYDGSKSWRRRSCWRKWKQLSRLQRNVILFSLTFLMLCGFLSYISVADQWTAVDGRSAEEQKTRPADPPVLPAPQKADAHPENMQGALPQKPQRHFRRGPPNLHLRAPGKDSEDPRQGDTKRRDEAVGDAHQEESTQRTVVSWRGAVIEPQPGTELPSRKAEAPARPSSQAPRIQNPAASPNERQRAVIDAFRHAWAGYRKFAWGHDELKPVSRSFSEWFGLGLTLIDALDTMWILGLKKEFEEARKWVSKKLRFQKDVDVNLFESTIRILGGLLSAYHLSGDELFLRKAEDFGNRLMPAFQTPSKIPYSDVNIGTGAAHPPRWTSDSTVAEVTSIQLEFRELSRLTGSKKFQEAAEEVTRHVHSLSGKKDGLVPMFINTHSGLFTHMGVFTLGARADSYYEYLLKQWIQGGKQETQLLEDYLEAIEGIRRHLLRRSEPRKLTFVGELAHGRFSAKMDHLVCFLPGTLALGAHHGLPADHMELARALMDTCYQMNRQMETGLSPEIVHFNLYPQNDHKDVQVKPADRHNLLRPETVESLFYLYRLTGDRKYQDWGWEILQSFNTYTRVPSGGYSSISNVQDPLNPQPRDKMESFFLGETLKYLYLLFSDDPDLLSLDTYVFNTEAHPLPIWAPPREV

SEQ ID NO: 58613 - DNA, 1926 bp, Canis familiaris
  CDS (1)..(1926)
atgactaccccggccctgctgcccttatctggacgaaggataccacctctgaacctgggaccgccttccttcccgcaccacagggctaccttgagactttccgagaagtttatcctcctccttatcctaagtgccttcatcaccctgtgttttggagcattcttcttccttccagactcttcaaaacacaaacgctttgatctgggtttggaagatgtgttaattcctcacgtagatgccagcaaaggggctaaaaaccctggagtctttctgatccacggacccgatgaacacagacacagggaagaagaggaacgtttaagaaataaaattcgagctgatcacgagaaggccctggaggaagcaaaagaaaaattaaaaaagtcgagagaggaaattcgagcggaaattcagacagagaaaaataaggtagtccaagagatgaagacaaaagagaagaagccactgccaccagtccctataccaaatctaataggaataaatggtggagacccagaagataatgacatacgaaagaaaagggaaaaaattaaagagatgatgaaacatgcctgggataattataggatgtatggttggggacataatgaactcagacctattgcaaagaaaggacactccactaatatatttggaagttcacaaatgggtgctaccatagtagatgctttggataccctttatatcatgggacttcatgatgaatttggagatgggcaaaaatggattgaagagaaccttgatttcagtgtgaactcagaggtgtctgtgtttgaagtcaacattcgatttattggaggcctgcttgcagcttattacctttcaggagaagagatattcaagattaaagcagtccaactggctgagaaactccttccggcctttaacacacctactgggattccttgggcaatggtgaatctgaaaagtggagtagggcgaaactggggctgggcatctgcaggtagcagcattcttgctgaatttggtacactgcatatggagtttgtccacctcagctacttgacaggggacccagtttactacaaaaaggtaatgcacattcggaaactgcttcagaagatggatcgtccaaatggtctttatccaaattatttgaacccaagaacaggtcgctggggtcagtatcatacatcagttggcgggctgggagacagtttttacgaatacttactaaaagcatggttgatgtcagataaaacagaccatgaggcgagaaaaatgtatgatgatgctattgaggctatagagaaacatcttattaagaagtcccgaggaggtctcacctttattggagaatggaaaaatgggcacttggaaaagaagatggggcacttggcctgttttgctgggggaatgtttgcactgggagcagatggttccagaatggataaagctggtcattatttagagctaggggcagaaattgcacgtacatgtcatgagtcatatgacagaactgcattaaagctgggtcctgaatcattcaagtttgatggtgcagtagaggctgtggcagtccggcaggctgaaaagtattacatcctccgtccagaagtaattgaaacctattggtacctatggagattcactcatgatccaagatataggcaatggggctgggaagcagcactggctattgaaaagtattgccgagtaagtggtggattttctggggtgaaggatgtgtattcctctactcctacacatgatgatgtacagcagagcttctttcttgctgaaacattaaaatatttgtatctgctgttctccagtgatgatcttttacctttagaccactgggtattcaacacagaggctcatcctctgcctgtgttacatttagccaacaccacactttcaggaaatcctgctgttcgatga

SEQ ID NO: 58614 - protein, 641 aa, Canis familiaris
MTTPALLPLSGRRIPPLNLGPPSFPHHRATLRLSEKFILLLILSAFITLCFGAFFFLPDSSKHKRFDLGLEDVLIPHVDASKGAKNPGVFLIHGPDEHRHREEEERLRNKIRADHEKALEEAKEKLKKSREEIRAEIQTEKNKVVQEMKTKEKKPLPPVPIPNLIGINGGDPEDNDIRKKREKIKEMMKHAWDNYRMYGWGHNELRPIAKKGHSTNIFGSSQMGATIVDALDTLYIMGLHDEFGDGQKWIEENLDFSVNSEVSVFEVNIRFIGGLLAAYYLSGEEIFKIKAVQLAEKLLPAFNTPTGIPWAMVNLKSGVGRNWGWASAGSSILAEFGTLHMEFVHLSYLTGDPVYYKKVMHIRKLLQKMDRPNGLYPNYLNPRTGRWGQYHTSVGGLGDSFYEYLLKAWLMSDKTDHEARKMYDDAIEAIEKHLIKKSRGGLTFIGEWKNGHLEKKMGHLACFAGGMFALGADGSRMDKAGHYLELGAEIARTCHESYDRTALKLGPESFKFDGAVEAVAVRQAEKYYILRPEVIETYWYLWRFTHDPRYRQWGWEAALAIEKYCRVSGGFSGVKDVYSSTPTHDDVQQSFFLAETLKYLYLLFSSDDLLPLDHWVFNTEAHPLPVLHLANTTLSGNPAVR

SEQ ID NO: 58615 - DNA, 1812 bp, Cryptococcus neoformans var. neoformans JEC21
  CDS (1)..(1812)
atgtcgcaagtacgctcaagagcctcccagggtgggaaaggcaaggatgagccccagaaaaggctggataagaaggacattgacagaaaagtcgagcaaatacaagcccttggcgtattaaggacgattctttcatgcttgggtcttgtagctgtcttgtggtttggctggaagaccgtggcacccatcttggagaaaaagacaagccctcctgtgattccgcaagcaaagcttcctggaagcaaattcggcaccatcaagccttcggatcttcctaaaatcaacctaagcaccaagcttgaagcagacattgaaaagagggaggcagtcaaggaagcttttgagtggagttggcatgcgtatgagaagcacgcttggggagccgacgaataccaacccttgacccagacaggctccaacttgacttctgccggtggcgttgggtacacaatcgtggattctattgattctttgctcatcatggacttgatcccagagtaccaaagggctcgagactgggtccgcgatcatcttaactttgacaaggatgcccagttcaacacatttgaaactaccattcgtctcctcggtggccttctctctgcgcactatctcagctctacccactcgtcccctgccatccaggccgatgctcctctttacctcgatctcgccatcgacctcggtgaacgtcttctcggcgccttcacctcccctaccggcatcccttggtcaggaatcaaccttgctactcgtcagggtattcctgatagagacaaccagggcgttgccagtttggctgaagccgctagtttgcaattggaactcaaatatcttagtcatttaacaggagactatgtgtactggaagaaggcagagaaggtgaccgagatcattcgagcgcaggcaatccatgatggtattgctcccatcttcatctctcccgtgaatgggcagtttgtggcttctgagatccgacttgggtccagaggtgattcttactacgaatacttgctcaagcaatggcttcaaactaaccgacaagagcccgtttaccgcgatatgtatgacgaagctatggtcggtattaagaggcacctcattggacaaactagcaaatccaacctcatcttcacccaggaactccatcctgctcgacacccgcgagatcaaagtgccacatggcaagtcgtccccaagcaagaccacctagtctgcttcttgggcggatcgttcctgctcggtatcacagaaggcggaaagagagatttagattgggagaatatggaagaaaaggacagggaggatttcctcgttggtcaggggatcatcgaaagttgtatgaagacccatgacactgcaaccggattggctcctgagattgccatgtttgtgcaatggagcgatgatcgagctaatgaggaggattggtacatcaaacctaaccacaacggcatcctcatcgatgggcgcaatatccttcgacccgagactgtcgagtctctctttctcgcctaccgagccaccggtgatgagaagtaccgccgatggggatggcaaatattcgaggctttccagaagtggtgtagggtcgaagacggcggttatgcgggtattgaggatgtgcaatctatgccgcccaagcagttggacagaatggagacgttttggctcggagaaacactgaagtatctgtacttgctcttcgatgatgcagatcacatcccacttgacaaaaacatcttcaacaccgaagcccatatccttcccgttttcacgcccgaatacgtctcttctttcgccctttcatag

SEQ ID NO: 58616 - protein, 603 aa, Cryptococcus neoformans var. neoformans JEC21
MSQVRSRASQGGKGKDEPQKRLDKKDIDRKVEQIQALGVLRTILSCLGLVAVLWFGWKTVAPILEKKTSPPVIPQAKLPGSKFGTIKPSDLPKINLSTKLEADIEKREAVKEAFEWSWHAYEKHAWGADEYQPLTQTGSNLTSAGGVGYTIVDSIDSLLIMDLIPEYQRARDWVRDHLNFDKDAQFNTFETTIRLLGGLLSAHYLSSTHSSPAIQADAPLYLDLAIDLGERLLGAFTSPTGIPWSGINLATRQGIPDRDNQGVASLAEAASLQLELKYLSHLTGDYVYWKKAEKVTEIIRAQAIHDGIAPIFISPVNGQFVASEIRLGSRGDSYYEYLLKQWLQTNRQEPVYRDMYDEAMVGIKRHLIGQTSKSNLIFTQELHPARHPRDQSATWQVVPKQDHLVCFLGGSFLLGITEGGKRDLDWENMEEKDREDFLVGQGIIESCMKTHDTATGLAPEIAMFVQWSDDRANEEDWYIKPNHNGILIDGRNILRPETVESLFLAYRATGDEKYRRWGWQIFEAFQKWCRVEDGGYAGIEDVQSMPPKQLDRMETFWLGETLKYLYLLFDDADHIPLDKNIFNTEAHILPVFTPEYVSSFALS

SEQ ID NO: 58617 - DNA, 2406 bp, Rattus norvegicus
  CDS (1)..(2406)
atggtcggggaaagggtcgttcccaggccggagcgactagaaagggcaggccgcggcctcagagcgcagagccaacccaggactcagcctcagcagggccgtcccttcttccggtcaggagttttgcgtttcaccttcaggcacgctagggtgacgcccgacctagctccccgagaccgagcgcagaattccggcaagggagatggtccgcaactcaaagcagacgttactgcaactaaggacacgtcttcaaaccgtagccagcccgcccccgtcagggagtctgcaggatgcctgcaagggtgccggtgcgcgcgattcagtgacaaatggaagcagctttcgaggttacagcggaatgtgattctcttcgtcctgggctttctgattctctgtggatttctgtattctcttcaggtgtctgaccagtggaaagctctgagtggcagccgtgcagaagtagagaagatgaagctagaagtcctgcctgtcttaccagctcctcagaaggaaagtgctgaaccagaagggtttgcagacatactctctcagaagcggcaaaggcatttgcggcggggccctccgcacctgcagatcagaccccccaacaccgtctccaaagatgggatgcaggatgatgctaaggagagggaagcagccctggggaaggctcagcaggaagaaaacacccagagaaccgtcatcagctggcggggagcagtaattgagcctgaacaggccactgaacctccttccaaaagagctgaagcctccatcaagcctctgtttttggcgtccaggatatggaaagagccagcatctgtactctgtccacatacctcacacaactttgtgactatcagtgacttctcagctgctctgatcttgtgcctgagcactgagcagccagaggatgctctgttggagaaggctggttcccattgctcatcagtgccaggttccccattcattatctgcagtgtagtggtagaccctcccccaaatgagcgccagaagggagtgattgaggcctttctccatgcttggaaaggttaccaaaagttcgcttggggccatgatgaactgaagcctgtgtccaaaaccttcagtgagtggtttggcctgggcctcaccctgatcgatgccttggataccatgtggattttgggtctgaagcaagaatttaaggaagccaggaagtgggtgtcggagaacttagactttcagaagaatgtcgatgtcaacctgtttgagagtactatccgaatcttagggggcctgctgagtgcctaccacctgtctggggacagcctcttcctgagcaaggccgaggattttggaaaccggttaatgcctgccttcaccacaccctccaagattccatactctgatgtgaacattggcactgggtttgcccactcgccccagtggacttcagacagcacggtggcagaagtgacgagcattcagttggagttccgagagctctcccgtcttaccgggattaagaaattccaggaggccgtggaggaagtgacaaagcacatccactccctgtctgggaagaaagacgggctggtgcctatgttcatcaacacgaacagcggcctcttcacccacccgggagtgttcaccttgggtgccagggctgacagctactacgaatacctgctgaaacagtggatccagggtggcaagaaggagacacagttgctggaagactatgttagagccatcgaggggatcaaagctcatctgcttcgacagtctcagcccagaaagctcaccttcgtgggagagcttgcccatggccgcttcagtgccaagatgcatgagtctaggcccgaatgtgaggagataatttgtttccaggaccacttggtgtgcttcctgccagggacgctggccttgggcgtccaccatggcctaccggctgaccacatggatctggctcgggcactcatggagacctgctaccagatgaaccaacagatggagacaggtctgagccctgagattgcacatttcaacatgtaccctcgagcagatcataaagacgtggaggtcaagccggctgataggcacaacctgctgcggccggagaccgtggaaagcctgttctatctgtaccgcgtcacaaaagaccgcaagtaccaagactggggctgggaaatcctgcagagcttcaataagtacacacgggttccctcgggtggctattcttctatcaacaacgtccagaattcccacaagcctgagcccagggacaagatggagagcttctttgtgggagaaacactgaagtacctctacctgctgttttctgatgacctggagctgctcggcctggacacctgtgtgtttaacacagaagctcatcccctgcccatctggtctcctgcctag

SEQ ID NO: 58618 - protein, 801 aa, Rattus norvegicus
MVGERVVPRPERLERAGRGLRAQSQPRTQPQQGRPFFRSGVLRFTFRHARVTPDLAPRDRAQNSGKGDGPQLKADVTATKDTSSNRSQPAPVRESAGCLQGCRCARFSDKWKQLSRLQRNVILFVLGFLILCGFLYSLQVSDQWKALSGSRAEVEKMKLEVLPVLPAPQKESAEPEGFADILSQKRQRHLRRGPPHLQIRPPNTVSKDGMQDDAKEREAALGKAQQEENTQRTVISWRGAVIEPEQATEPPSKRAEASIKPLFLASRIWKEPASVLCPHTSHNFVTISDFSAALILCLSTEQPEDALLEKAGSHCSSVPGSPFIICSVVVDPPPNERQKGVIEAFLHAWKGYQKFAWGHDELKPVSKTFSEWFGLGLTLIDALDTMWILGLKQEFKEARKWVSENLDFQKNVDVNLFESTIRILGGLLSAYHLSGDSLFLSKAEDFGNRLMPAFTTPSKIPYSDVNIGTGFAHSPQWTSDSTVAEVTSIQLEFRELSRLTGIKKFQEAVEEVTKHIHSLSGKKDGLVPMFINTNSGLFTHPGVFTLGARADSYYEYLLKQWIQGGKKETQLLEDYVRAIEGIKAHLLRQSQPRKLTFVGELAHGRFSAKMHESRPECEEIICFQDHLVCFLPGTLALGVHHGLPADHMDLARALMETCYQMNQQMETGLSPEIAHFNMYPRADHKDVEVKPADRHNLLRPETVESLFYLYRVTKDRKYQDWGWEILQSFNKYTRVPSGGYSSINNVQNSHKPEPRDKMESFFVGETLKYLYLLFSDDLELLGLDTCVFNTEAHPLPIWSPA

SEQ ID NO: 58619 - DNA, 1761 bp, Aspergillus nidulans FGSC A4
  CDS (1)..(1761)
atgccgagacggtggtcctccctcatcagcatcacagccatcttcttggtcctcttcttcctccttcataggaatacagacacaccacgcgccgccaatagggctacaaacggccctgccaacggctttgctaggcagcaaagcatatgtccatcaacaccccctcagcctccatataaccgaaccagcacgggagggttcaactggggtgaaatcccagtcagataccctgtatccgacttcatcccgctgtcaaccaactctcctgcaacacttccgcgcatccaacgctcttccttcccacttcaatcctcaatcactaaatcccgccaggcagcagtcaaaggtgcctttcagcgcgcatggacctcctacacaacccacgcctggaaggcggacgaggtacggcccatcacggccggatctcgaaacaactttggcggatggggagcgaccctagtcgacaatctcgacacactgctaatcatggggctggacgaggagttcgcagcggcagtcgacgcgctcgcagatatagaattcagcccgcactcgtccccatcctcctcccagagcacaatcaacatattcgaaacgacaatccggtatctgggcggcttgctcgcggcgtatgatctcactggctgtcgagagactcggctgctggacaaagcaatccagcttggggagatgatctacacctccttcgacacagagaaccgcatgcccgtaccacggtggaatctgcacaaagcaggcaacggagagcctcagcgcgcggcagtgcagggcgtgctcgctgaactcgccagcagcagtctcgagttcacgcggctgtcgcagctgacgggggatatgcggtatttcgatgcggcatcccgcattaccgatctgcttgactcccaagccggccatacccggatcccggggttgtggccagtcagcgtgaacctgcagaaaggcgatctgacccgtgggtcgacattcagttttggcgggatggccgatagcgcctacgagtatctcggcaagacgtatcggctcctcggtggtgtggggaaagggccacagtacgagcgtctggcgcgaaacgcactagatgccgggattcgacatctcctcttccgaccgatgacgcctgatcatgcagatatcctcctacccggggtcgcgcacgcaaccagctcttccgtgggactcgagccccggacagagcatctcgcctgttttgtgggtgggatgtacgcgctcgccgggaagcttttctcaaaccagacgtacctcgacaccggccggaagctgacagacggttgtatctggtactacgataattcaccgctaggtatcatgccggagatgttcaccgtgccggcttgtccgtcagtggctgaatgtccttgggacgaaacaaggggtggtatctacacctacgtgcgtgatgggcactactttctgcgtcctgaggcaatggagagtatcttctatatgtggcgcattacaggggacgaaaagtaccgcgaggctgcatggagaatgttcacggctatcgaagcggttacaaagacggagtttgggaatgcggcggtgcgggatgttatggttgaggaaggaaatgtaaagagagaagatagcatggagagtttctggatggcagagacgttgaagtatctgtatctgatatttggggagaccgatttggtcagcttggacgactgggtgttcaatacggaggcgcaccctttgaggggtgcagggagttga

SEQ ID NO: 58620 - protein, 586 aa, Aspergillus nidulans FGSC A4
MPRRWSSLISITAIFLVLFFLLHRNTDTPRAANRATNGPANGFARQQSICPSTPPQPPYNRTSTGGFNWGEIPVRYPVSDFIPLSTNSPATLPRIQRSSFPLQSSITKSRQAAVKGAFQRAWTSYTTHAWKADEVRPITAGSRNNFGGWGATLVDNLDTLLIMGLDEEFAAAVDALADIEFSPHSSPSSSQSTINIFETTIRYLGGLLAAYDLTGCRETRLLDKAIQLGEMIYTSFDTENRMPVPRWNLHKAGNGEPQRAAVQGVLAELASSSLEFTRLSQLTGDMRYFDAASRITDLLDSQAGHTRIPGLWPVSVNLQKGDLTRGSTFSFGGMADSAYEYLGKTYRLLGGVGKGPQYERLARNALDAGIRHLLFRPMTPDHADILLPGVAHATSSSVGLEPRTEHLACFVGGMYALAGKLFSNQTYLDTGRKLTDGCIWYYDNSPLGIMPEMFTVPACPSVAECPWDETRGGIYTYVRDGHYFLRPEAMESIFYMWRITGDEKYREAAWRMFTAIEAVTKTEFGNAAVRDVMVEEGNVKREDSMESFWMAETLKYLYLIFGETDLVSLDDWVFNTEAHPLRGAGS

SEQ ID NO: 58621 - DNA, 1899 bp, Danio rerio
  CDS (1)..(1899)
atgctgccatcaacaagaaaggattttgtatctctgactctcagtgaaagcggcagctacagtaacagcaagcagtggagacggcagtcttgctggaggaaatggaaacagctgtccagattgcagcgcagcctgattctgcttacgttgatgctgttgctggtttgtggaatcgccacatctcccaccctcataggacactggagaggaatgaatggggatgatgtaaaaaactcatttgttgttgacctgaaaaatgagtacaggtccattcttcccgagccgccctctgagagaaaagatttcgatagacgtggagcttttggtttggagaaacttttgcaaggcaaagtgaatgtttcgggtgtgttgggagaccaaaatcatggactggacctcaaaaatgcagataaaggatctgagggacaaaagcctataattagttggcgtggagctgtgatcgaagaagaacaagcctctgatactgacaccaaagacacagaaaaccaaggagacccagcttcattagcacttgccgagagtagactggaggctgtgagagaagcttttagacatgcctggaaaggttacaaggacttcgcttggggtcacgatgaactcaaaccaatctctaaatcatacggagagtggtttggacttgggctgaccctaattgatgctctagataccatgtggatcttgggtctacaagaagagtttgcagaggccagggagtgggtggccaaagagctctctttcgataagaatgtggatgttaatctgttcgagagcaccattcgtatcctgggtggcctactgagtacctaccatctcacaggagacaaccttttcctggataaagctaaagagattggcttcagactgatgcccgccttcagcactccctccaaaatcccctattctgatgtgaatattgggaagggcacagctcatcctccgcgatggacttcagacagcaccgtagccgaggtcactagcattcagctggagttcagagagctcagccgactcactggagaccccaaatacaagctggctgtgatggaggtgatgaagcaggtgcacaaactggatggaaagcaagatgggcttgtgccgatgtttatcaataccaacaatggactgttcacccatcagggcatttacacgctaggcgccagggctgacagctactatgagtatctgcttaagcagtggatacagggaggcagaatcgagcaggaattgctggaggactatctgcaggctgtggaaggagtgaagaagaacctgctgaagaaatcgacacctcttggccttacatttgtaggagagttgtcccatggacacttcagtcccaaaatggaccatttggtatgtttcctgcctggcacgttggcactgggggtgcattacggccttcccgctgatcatatggagcttgcgaaacagctgatagagacctgctaccagatgtatgcacagatggagaccggtctgagtccagaaatagcccatttcaacatgcacgatggtagcacacaggatgtagatgtgaagattgcggaccgccacaatcttctgcgtccagaaaccgtggagagcctcttctacctgtacagattgaccagggataagaagtaccagcagtggggctgggagatcctgcagaactttaacaagtacacaagggttccaaccggaggttacacatcaataaacaacgtccgtgacccttcctacaccagtcctcgagacaagatggagagcttcttcctgggggaaacgctcaaatacttctacctgctgttttcagaagaccccacccttatcagcttagacaagtacgtgttcaacactgaggctcatcctctgcctgtatggccacaagcagagtga

SEQ ID NO: 58622 - protein, 632 aa, Danio rerio
MLPSTRKDFVSLTLSESGSYSNSKQWRRQSCWRKWKQLSRLQRSLILLTLMLLLVCGIATSPTLIGHWRGMNGDDVKNSFVVDLKNEYRSILPEPPSERKDFDRRGAFGLEKLLQGKVNVSGVLGDQNHGLDLKNADKGSEGQKPIISWRGAVIEEEQASDTDTKDTENQGDPASLALAESRLEAVREAFRHAWKGYKDFAWGHDELKPISKSYGEWFGLGLTLIDALDTMWILGLQEEFAEAREWVAKELSFDKNVDVNLFESTIRILGGLLSTYHLTGDNLFLDKAKEIGFRLMPAFSTPSKIPYSDVNIGKGTAHPPRWTSDSTVAEVTSIQLEFRELSRLTGDPKYKLAVMEVMKQVHKLDGKQDGLVPMFINTNNGLFTHQGIYTLGARADSYYEYLLKQWIQGGRIEQELLEDYLQAVEGVKKNLLKKSTPLGLTFVGELSHGHFSPKMDHLVCFLPGTLALGVHYGLPADHMELAKQLIETCYQMYAQMETGLSPEIAHFNMHDGSTQDVDVKIADRHNLLRPETVESLFYLYRLTRDKKYQQWGWEILQNFNKYTRVPTGGYTSINNVRDPSYTSPRDKMESFFLGETLKYFYLLFSEDPTLISLDKYVFNTEAHPLPVWPQAE

SEQ ID NO: 58623 - DNA, 2304 bp, Danio rerio
  CDS (1)..(2304)
atgtccaccttcccaagccatgactggtgcgcgcaagaatccctcgtcatctcatggtcaatgtgtgtaaggaggcctgtggtgtgtgtcactgtaatgctgctgttcacagtggcccacagtaaacgctcctgtgattattcagtgatcatcagcacctacaaggcgctcatcctggtcgagctccaagccctgaatctgactggttcgtttgatatatcaaaagaaaaggaccactgtcctgagaaggtacagcctgagaaggttcgctgcctcctgcggtatatctatggcaggactcagatcttcaactgcttgagtgacagtcggatgcagcagcagtcagaccgcatgactgaggtggtgaaacaaatgcagaggctcctcacacaagactgcctcaaaccgcaaaaaatgaaaaaagcatcttgtaaaccggtgaagaagcgcagaggacggctgcggcagagactgaagctgatgaggatgatcattaacacattcgctcgcacgcacgcgcagtgtgtgcacttcctattattattattgtatagtatttgtgcacctccatgtagccgggaattattgtattatttacctctgttcacatctcgttacttcatgcttactttccttttctccgccattttctgcgccgcgtacctgtctccgatcatcagtcatgttaaaggcagagactttactgagcaggaaatgtctcattacagggacagagtaaagtccatgttttatcatgcatataacagctatctggacaatgcatatccatatgatgagctgaggccgctgacctgtgatggacaggacacctggggcagttctcccctcacactcatagatgctctggacacattgttgattctaggaaaccacacagagtttcagcgtgtggcctctctgcttcaggacactgttgacttcgacatcgacgtcaatgcgtctgtgtttgagacaaatatacgagtggtcggtgggcttctctcggctcatctgctctccaagcgtgctgggatgaaggtggaggagggctggccctgctctggaccccttctgcgcatggcagaggacgcagctcgaaaactgcttcctgctttccagacgcccacagggatgccgtatggaacagtaaacctgctgcggggagtgaaccccggcgaaacccctgtcttctgcaccgccggagtgggcaccttcatcctagagttttccaccctcagtcgactcaccggtgaccctgtgttcgagaatgttgcccgcaaagctctcagggccttatggagaacgcgctctgacatcggcctggtgggcaatcacatagatgtcataacctcgaagtgggtcgctcaggatgcaggcattggagcaggagttgattcatatttcgaatatcttgttaagggtgccatcatgcttcaagatgagaagctgttgacaatgttttatgaatttgataagtccataaagaactacactaagtttgatgattggtatctgtgggtgcagatgcacaaaggaacagtatcaatgcctgtgtttcagtctttggaggcgttctggcctggaatgcagagtttaataggtgatatttccagtgctacaaagagcttccacaactactacagcgtgtggcggcagtttggaggtctcccagaattctacagcattcctcaaggttacacagtggacaagcgagagggatatccactgcggccagagttaatagagagcgcaatgtatctgtataaggccactggagacccttcattcatccaacttggccgagatgcagtggagtccattgacagaatcagccgggtcaactgtggctttgccactgtaaaggatgtaagggaccacaagttggacaaccgcatggaatccttcttcctagccgagaccattaaatacctctacctcctcttcgatcctgacaacttccttcacaacacgggcacagagtttgagctggggggtctgcggggtgactgtattctcagcgcggggggctatgtgttcaacacagaggctcatcccctggaccccgccgcactccactgctgcagccgagagcagcaggaccgcagggagattcaggacatcctcctcagcttctcgcagccgcaaacagaggagccaccacgggaccagaacgcaggtggctctccggagagcattgcactgaagccgggagagcagaggaaagcgccggtgctctcctgccctacgcagccctttagtgccaaactggccgtcatgggtcaggtcttctctgacaactcttga

SEQ ID NO: 58624 - protein, 767 aa, Danio rerio
MSTFPSHDWCAQESLVISWSMCVRRPVVCVTVMLLFTVAHSKRSCDYSVIISTYKALILVELQALNLTGSFDISKEKDHCPEKVQPEKVRCLLRYIYGRTQIFNCLSDSRMQQQSDRMTEVVKQMQRLLTQDCLKPQKMKKASCKPVKKRRGRLRQRLKLMRMIINTFARTHAQCVHFLLLLLYSICAPPCSRELLYYLPLFTSRYFMLTFLFSAIFCAAYLSPIISHVKGRDFTEQEMSHYRDRVKSMFYHAYNSYLDNAYPYDELRPLTCDGQDTWGSSPLTLIDALDTLLILGNHTEFQRVASLLQDTVDFDIDVNASVFETNIRVVGGLLSAHLLSKRAGMKVEEGWPCSGPLLRMAEDAARKLLPAFQTPTGMPYGTVNLLRGVNPGETPVFCTAGVGTFILEFSTLSRLTGDPVFENVARKALRALWRTRSDIGLVGNHIDVITSKWVAQDAGIGAGVDSYFEYLVKGAIMLQDEKLLTMFYEFDKSIKNYTKFDDWYLWVQMHKGTVSMPVFQSLEAFWPGMQSLIGDISSATKSFHNYYSVWRQFGGLPEFYSIPQGYTVDKREGYPLRPELIESAMYLYKATGDPSFIQLGRDAVESIDRISRVNCGFATVKDVRDHKLDNRMESFFLAETIKYLYLLFDPDNFLHNTGTEFELGGLRGDCILSAGGYVFNTEAHPLDPAALHCCSREQQDRREIQDILLSFSQPQTEEPPRDQNAGGSPESIALKPGEQRKAPVLSCPTQPFSAKLAVMGQVFSDNS

SEQ ID NO: 58625 - DNA, 1848 bp, Candida albicans SC5314
  CDS (1)..(1848): transl_table=12
atgtctttttcatttggtataaataatatatcgaaaggcaataatacatataaagacaaaccagcaggaggagcattaccattattctacaaagacaaagtaccagcattccacccagcccacacttcaaaaaataaaaaacgtattctcatgctattaaaaggttttatgttgtctttagtattatatgctgtgtaccatttagcatcaaatggtgggcaatttatgtttgatttctcgggtcaatcaaaatgggaaagagctcaactggaagttcgtcaagccatgttagattcatggcatacctatgaaaagtatggttggggttatgatgtctatcatccaattaagcaagaaggggaaaatatgggtccaaaaccgttggggtggatgattgtggattcattagatactttgatgattatggattgtccagaagaagtcagtcgagccagagattggatcaagaatgatttggattacacttttgattataatgtcaacacatttgaaaccactattagaatgcttggtggtttattatcagcttatcatttcagcaatgacgatgtctatttggataaagcggtacaattggccaatgcattacacggggcctatgatagtccatcaggaataccatatctgtctgtcaatttgaaatcaggtaaaggtataaagaatcatgttgataatggtgcctcatccactgctgaagctgctactgttcaattagaaatgaaatatttatcgaaattgactggagaaattttgtggtggaacttggcagagaaagtaatgcaagtgttagaaagtaataaacctcaagatggtttggtgccaatttatgtcaacccagatactggtaaatatcaaggccatttgattagattggggtcacgtggagattcttattacgaatatttgttgaagcaatacttgcaaacaaataagcaagaacttgtctattgggatatgtatcgtgaatcggttgaaggtgtcaagaaacatcttgtgagtgattcttatccttcaggattgacgtttattggggaattggataatggtattggtggcaaattgtcaaccaagatggaccatttagtttgcttttacggtggattgttagcccttggtgctactggaggattgacattgaacgaggctcaaagtttaaaatcatggaatgaagaaagagaagctgactttaaacttggtgaagagttgacttatacttgttataagatgtaccacgatgttagtccaactggattgtcaccagaaattgttgttttcaatgaagatacttcaaaatccaaagattttattattaaacctttggatagacataacttacaacgtccagaaacagttgaatcattgttttatctttatagattaactggtgatgtcaaatatcgtgaaatgggatatgaaattttccaaaattttatcaagtacactaaagttgttaattcggaaggtgaagtttcattttcctcgctttccgatgtcacttctttcgattctaatggcttaccgaaattcaaagataacactgaatcattctggtgggcagaaactttgaaatatttgtatcttttgtttgatgacaccaataagattccattgacagattatgtctttaatactgaagcccatccattccctagatttgatactaatgattatttcaaaactggttggagaagaaaaattgatgagaatgaaaaggcacaaatgagagaatccaaagttattgataaaagtaatcttccggaagctcaaccagttgataaatcagctgatcaagaagctaaagaaattattgaagaaattgctgggtaa

SEQ ID NO: 58626 - protein, 615 aa, Candida albicans SC5314
MSFSFGINNISKGNNTYKDKPAGGALPLFYKDKVPAFHPAHTSKNKKRILMLLKGFMLSLVLYAVYHLASNGGQFMFDFSGQSKWERAQSEVRQAMLDSWHTYEKYGWGYDVYHPIKQEGENMGPKPLGWMIVDSLDTLMIMDCPEEVSRARDWIKNDLDYTFDYNVNTFETTIRMLGGLLSAYHFSNDDVYLDKAVQLANALHGAYDSPSGIPYSSVNLKSGKGIKNHVDNGASSTAEAATVQLEMKYLSKLTGEILWWNLAEKVMQVLESNKPQDGLVPIYVNPDTGKYQGHLIRLGSRGDSYYEYLLKQYLQTNKQELVYWDMYRESVEGVKKHLVSDSYPSGLTFIGELDNGIGGKLSTKMDHLVCFYGGLLALGATGGLTLNEAQSLKSWNEEREADFKLGEELTYTCYKMYHDVSPTGLSPEIVVFNEDTSKSKDFIIKPLDRHNLQRPETVESLFYLYRLTGDVKYREMGYEIFQNFIKYTKVVNSEGEVSFSSLSDVTSFDSNGLPKFKDNTESFWWAETLKYLYLLFDDTNKIPLTDYVFNTEAHPFPRFDTNDYFKTGWRRKIDENEKAQMRESKVIDKSNLPEAQPVDKSADQEAKEIIEEIAG

SEQ ID NO: 58627 - DNA, 2529 bp, Candida albicans SC5314
  CDS (1)..(2529): transl_table=12
atgtttttggggctatttcataattacatattcttggtaatactaagtctaaaaataatccccataaatgcatattctccatataattcatcattcacatctgaacatatacgatatttacaaaatgaaacacaagcattatttgatcattcatggaaatcatatatgaaatatggtttcccatttgatgaaataaccccaatcagttgtgaacctttaggacctgattttgatgactatgaaaataccgttagaaatgatgctagagggaatatatcactgatggtattagataatatcgatacattaataatatttgaacgatgggatgaattagaatatattttgaaatatcttctggataataaacaagattttttcaatcaagatactgtggtacaagtgtttgaaacttgtattcgtcatttaggtggattattatcggctcatttattattaaccgacattaccaataaaccaatcacattatcaacaaaatatcaaccattacgtgaaatttcaaacaaatataatgggtttttattggacatggctcatgatttaggattaagattaattccttcttatcaaacatcaacgacaaatatcccattaccaagaattaatttagcttatggtttgaaaaaagtcccacccaaattacaacgtgatgcatgtacttcaggggtaatgactccagttttagaattcactctattatcaagattaactggagatcgacaatttgaatattattcacaattatcattttggaaactttggtcactgaaactggcattaaatctattacctatgacaattgatcctattgctaatcaatggaaagatagtattaccggaataggtgctagtattgattcattttatgaatatgctgctaaactggcaattttatttaatgatgattatatgtggacagttttcaaaacttcatatcgagcattattgagtcatctggctcaaggtggtaaaggtacgatgattttccctaatgtggggatttatgatggggttgttttcagtccttggatagatctgttaggagcattttggtcaggattacaagttttaactgggcaattacaagacgccataaagactcatgtggtttatttaaaaatatgggactttttcgatctgattccagaaagatggatatataaccatcagcaccatcatcaaggtaataagaaagttaaacgtaataagaaaaaattcaaagcagaagattccattgatttggaatggtacccgttgagaccagaatttattgaatcaacttattatttatatcgtgccactaaagatccaatgtatttacaaataggggaaagagtattaaatttattaggtgatagatataaagcaccatgtggattaagtggattacaagatgttagaactgcagaaagacaagatcgaatggaatcatttgttgttggtgaaactttgaaatatttatatttattatttgatactaaagatgaaattttcttacacaattccactataatgcaaaataaaaattggattttctccactgaagcacatccattatggttaaataaaaaaatcgatcttattggtgattctttgacacaatcatcaaatgaaatatcatcggcaataatgggtgaaaaaccttatcataaaaatagtttaaaacccaataaagatttactcaaaataccaaattcagcgtttataagaaatattacattacctcaaccagaattggttgatattgaaggtataacggaggatgtatcccatattgccaaaaaactgccctttgcgggtcgatttgatacatgtcaattaaatccttggaataaatctgttgattcatttcttgaatcaagttattataaatggccctatttgtttaatgctgattatgcatttgaaaattcatttagaaaaccaagatatttgagtcaaactaatttagatggcagttatattgaattaacaaaagaattttacaataaatttactatgttcaatggagccaacttgatttgtcctcgtacttcaactacagcagtttatgaagtgttttggggagatatcaaacaatgcgaatacattgaagtttcagaaatttatcataccaagttttctaatgaatcgttaatggcaccgggtgatatttggataccgtctttgaacggattacgcgttgtattggaagaattggtacctgggaaagtagatacatttaataatgttgttactgaagaacagcttcttgcattacaggatagtaataataatgaagactataataacaataacgacgattacaggattagattagtaaattctggtttaagaattaaacgagtcaatggtgttgttattggtgaaggggtaactttatggacgctaccatttgaaccactggaacaatcgaatgaagaagacgggatgataggaataactgaagatgctagagtagttatacaaggtaaagtagttgaaaatttatttgtttggtatggatag

SEQ ID NO: 58628 - protein, 842 aa, Candida albicans SC5314
MFLGLFHNYIFLVILSLKIIPINAYSPYNSSFTSEHIRYLQNETQALFDHSWKSYMKYGFPFDEITPISCEPLGPDFDDYENTVRNDARGNISSMVLDNIDTLIIFERWDELEYILKYLSDNKQDFFNQDTVVQVFETCIRHLGGLLSAHLLLTDITNKPITLSTKYQPLREISNKYNGFLLDMAHDLGLRLIPSYQTSTTNIPLPRINLAYGLKKVPPKLQRDACTSGVMTPVLEFTLLSRLTGDRQFEYYSQLSFWKLWSSKSALNLLPMTIDPIANQWKDSITGIGASIDSFYEYAAKSAILFNDDYMWTVFKTSYRALLSHSAQGGKGTMIFPNVGIYDGVVFSPWIDSLGAFWSGLQVLTGQLQDAIKTHVVYLKIWDFFDSIPERWIYNHQHHHQGNKKVKRNKKKFKAEDSIDLEWYPLRPEFIESTYYLYRATKDPMYLQIGERVLNLLGDRYKAPCGLSGLQDVRTAERQDRMESFVVGETLKYLYLLFDTKDEIFLHNSTIMQNKNWIFSTEAHPLWLNKKIDLIGDSLTQSSNEISSAIMGEKPYHKNSLKPNKDLLKIPNSAFIRNITLPQPELVDIEGITEDVSHIAKKSPFAGRFDTCQLNPWNKSVDSFLESSYYKWPYLFNADYAFENSFRKPRYLSQTNLDGSYIELTKEFYNKFTMFNGANLICPRTSTTAVYEVFWGDIKQCEYIEVSEIYHTKFSNESLMAPGDIWIPSLNGLRVVLEELVPGKVDTFNNVVTEEQLLALQDSNNNEDYNNNNDDYRIRLVNSGLRIKRVNGVVIGEGVTLWTLPFEPSEQSNEEDGMIGITEDARVVIQGKVVENLFVWYG

SEQ ID NO: 58629 - DNA, 2115 bp, Aspergillus fumigatus Af293
  CDS (1)..(2115)
atgacgagctctccagcccagcgactccatagcgaaagccactggcgagcgaaccgcaatcccactgtcagccctctgggtggatatgggctatcgcaacagtcgaccggggtagggaacaaactcggcaacttcttcgacggcggtcgctcgctcccgatgtacaaagataagccgtactttgcgccgcggcgtacggcggggaggagtaggcggagaaagatcctgtatggcgggttgtgtgtgtttgtgttggtctgcctgtggtattttacgacggggtcgtctcagcggcataggcatggcttagacacgcctgaaacgcccaagggcgaggaaatgtggaagtggctgcagagtcttggggatccgacgaccgagattgaagatggccagcaccagaatatcgattggaatgcgcgaagggaaaaggtcagggatgcgttcattattagctgggatggatatgagcagcatggatggggatatgacgagtacaagccgatcacgaaagaaggaaaacagatggtcccaggagggttgggctggatcattgttgacgccctcgatacgctcatgatcatgaatctgacctcgcgggttcagcacgcgcgcaactggatccacaattcgctacaatacaaccaggaccacgacgtcaacacattcgagacgaccatccggatgttgggtggccttctgtcggcgcattatctttcgaccgcccatcccggactggccccaatcgcggacgacgatgcgggctcaccaggagaggatttgtatattgagaaggcgaccgacttggcggacagactgcttggggcttttgagtccaagtctggagtgccatatgccagcatcaatctgaatacgtcgactggtattccatctcatgcagacaatggggcttcatctacggcggaggctaccactgttcaacttgagttcaagtacttggccaagttgacgggagaagcggagtactggcgggtggtggagaaggtgatgcaagtggtcgatgaccagaagatggaagacggcctgctcccgatctatatctatccagactctggacatttcagaggagacaacatccgtctgggaagtcggggggattcttactacgagtatctcatcaagcagtatttgcaaacatctaaacaggagcccatctataaagagctctgggatgaatcgttgatgggcgtccgcaagcatctgattgcgtacaccaaaaatgctcagctaatgattttgggggagaggccgtctgggctccatgggaaactgtcgccgaagatggatcatctggtgtgcttcatgccgggaaccattgctcttggagccaccggcggcgtgccgttgagcgaagcccggaagtctcctgactggaatcaacggcgggacgaagaaattctgattgctcgggaattgatgaaaacatgctgggcgacatacctcgcgacgaagacgggtctggctccggaaatcacctacttcaccttggacgaccctccaaagatgttccacgacatgtacccggactcgacggcgagcgccggcaaccgcaagtcccagggggctgatttgccaatgaagtcacagcctctttacccgctggacgacgaaaccctcaagtggcgggaggacatccagatccaaagccaggaccgccacaatctccaacggccggagacggtcgagtcattgttttatatgtaccgcatcaccggggacgagatatatcgccagtggggatgggagatgttcaagtcctttatccgccacacggcagtggttgaacatgaccactcgcacgagaccgattcccctgccgatgccgctgccggaagccaatccgagaaagtcgcgcgtccctcgcggattacgggattcacgtcgctgagcaacgccaacaccgtgccccctgtaccccgagacaacatggagagtttctggatggcagagacgctcaagtatttctacttgttgttttccgaccgggactttatctccctggaggaccatgtgttcaacacggaagcgcatccgctgccacggtttcagcctacgggtgatttgaagacggggtggacgcggaagcctcggtag

SEQ ID NO: 58630 - protein, 704 aa, Aspergillus fumigatus Af293
MTSSPAQRLHSESHWRANRNPTVSPLGGYGLSQQSTGVGNKLGNFFDGGRSLPMYKDKPYFAPRRTAGRSRRRKILYGGLCVFVLVCLWYFTTGSSQRHRHGLDTPETPKGEEMWKWLQSLGDPTTEIEDGQHQNIDWNARREKVRDAFIISWDGYEQHGWGYDEYKPITKEGKQMVPGGLGWIIVDALDTLMIMNLTSRVQHARNWIHNSLQYNQDHDVNTFETTIRMLGGLLSAHYLSTAHPGLAPIADDDAGSPGEDLYIEKATDLADRLLGAFESKSGVPYASINLNTSTGIPSHADNGASSTAEATTVQLEFKYLAKLTGEAEYWRVVEKVMQVVDDQKMEDGLLPIYIYPDSGHFRGDNIRLGSRGDSYYEYLIKQYLQTSKQEPIYKELWDESLMGVRKHLIAYTKNAQLMILGERPSGLHGKLSPKMDHLVCFMPGTIALGATGGVPLSEARKSPDWNQRRDEEILIARELMKTCWATYLATKTGLAPEITYFTLDDPPKMFHDMYPDSTASAGNRKSQGADLPMKSQPLYPLDDETLKWREDIQIQSQDRHNLQRPETVESLFYMYRITGDEIYRQWGWEMFKSFIRHTAVVEHDHSHETDSPADAAAGSQSEKVARPSRITGFTSLSNANTVPPVPRDNMESFWMAETLKYFYLLFSDRDFISLEDHVFNTEAHPLPRFQPTGDLKTGWTRKPR

SEQ ID NO: 58631 - DNA, 1767 bp, Trypanosoma brucei
  CDS (1)..(1767)
atgccgtgggttcgtgctttactagttctcgtgacggtattttttgtccgtcttccgtccgtgatgagagaggaaaggttccaccagtacggaaatggtgaaagtagaaagttgcataatgtcagcgatatgcatcctattcaagctgagatgcttccttatgtgcgtgacatgattgaccacgcgtttggttcatacatcaaatacgcctttcccaaagatgaattgtgtcctgtgagtggtactgggaagaatacgatgggtggctatggctggacccttattgactctctcgatacactagcaattgccgggtttcacaaagaatttcgtcgccacgcgaagtgggtggaagagcacttgaccttcgatattgacgaatcagtgtcggtatttgagacgactattcgagctcttggaggtcttctggctgctcacttcatgtacgaggagggcatagtcccaattatcccttcggagcacgactacaacggcgggttcttgcggctcgctgtggatcttgcagatcgtctgatgccctgttttgacacgcccactgggataccatatggggcgattaatttacgccgtggggttagtggtggggaatcgcagctggccaacacggccggcgctgggacgttgttaatggagatgacggtactgtcgaggatcacaggcgatgaaaaatacgagcgtgcggcgcggcgtgcatctgaggctctttttgcggccagagattctcaaactgagcttatggggaatcacattcatactcatacaggaatttggagacatggtgaatcatccgttggagggaacattgatagcgtcattgaatactttatcaaatcacatagtatgagtggggacattggggactgggagcggttcgagaggactgcgagagctgtgaaccgctatgtgcggaagggtggaatgctgctagcagctagcatgtatagtggacggcggctgcagacgtcccaggaatctttgtcatcattttttcctgggaacttggttcttggcggccatctccacgaggctgtagaaagttcgtggccaattcatacgttcttcaaacattttggcgttctgccggagatattttccttggaatctggcgagccgtcgtggatgtcacatgactacgttggtcgacctgagcatatcgagtctctgtatatgctttaccgtgcaacacgagatcctacatacctcttgatgggaaaagaactggcactggccattaacttgcgtatgcgcacgccatatgggttttcttccgtaagtgatgtaaggtacccgcatcatgatggtgttcacagagactcgatggagagtttcatgatcgcggagaccctgaaatatttgtatctcttgtttgacgagtgcaacgctgttcacatgcagggacggatgggcggtcgcgcctcaccgcattgtgttatggacagcggtagcggcagtagcgtcagccacgtggggtgggttttcaacactgaagctcatctgttccctaattctgccgagtggtgggcgcctacttccttggagaccttggacaaggaggctgaggatcccgctgctgcgctcaggcgccagcgtttggaggtaattgacggtttgctcgcgagttttgaggaagtggacggtgaggttgttggggcgaatgataagggtggtgcagccctgtaccagttccactgtgccaatcacgccctgagtgatatagggaggctgtcgaagtctgtgtttcgataa

SEQ ID NO: 58632 - protein, 588 aa, Trypanosoma brucei
MPWVRALLVLVTVFFVRLPSVMREERFHQYGNGESRKLHNVSDMHPIQAEMLPYVRDMIDHAFGSYIKYAFPKDELCPVSGTGKNTMGGYGWTLIDSLDTLAIAGFHKEFRRHAKWVEEHLTFDIDESVSVFETTIRALGGLLAAHFMYEEGIVPIIPSEHDYNGGFLRLAVDLADRLMPCFDTPTGIPYGAINLRRGVSGGESQLANTAGAGTLLMEMTVLSRITGDEKYERAARRASEALFAARDSQTELMGNHIHTHTGIWRHGESSVGGNIDSVIEYFIKSHSMSGDIGDWERFERTARAVNRYVRKGGMLLAASMYSGRRLQTSQESLSSFFPGNLVLGGHLHEAVESSWPIHTFFKHFGVLPEIFSLESGEPSWMSHDYVGRPEHIESLYMLYRATRDPTYLLMGKELALAINLRMRTPYGFSSVSDVRYPHHDGVHRDSMESFMIAETLKYLYLLFDECNAVHMQGRMGGRASPHCVMDSGSGSSVSHVGWVFNTEAHLFPNSAEWWAPTSLETLDKEAEDPAAALRRQRLEVIDGLLASFEEVDGEVVGANDKGGAALYQFHCANHALSDIGRLSKSVFR

SEQ ID NO: 58633 - DNA, 1977 bp, Canis familiaris
  CDS (1)..(1977)
atgactaccccggccctgctgcccttatctggacgaaggataccacctctgaacctgggaccgccttccttcccgcaccacagggctaccttgagactttccgagaagtttatcctcctccttatcctaagtgccttcatcaccctgtgttttggagcattcttcttccttccagactcttcaaaacacaaacgctttgatctgggtttggaagatgtgttaattcctcacgtagatgccagcaaaggggctaaaaaccctggagtctttctgatccacggacccgatgaacacagacacaggtttgtttatttcagaagtttgggttttagcatttggcagagcgagaatggggaagaagaggaacgtttaagaaataaaattcgagctgatcacgagaaggccctggaggaagcaaaagaaaaattaaaaaagtcgagagaggaaattcgagcggaaattcagacagagaaaaataaggtagtccaagagatgaagacaaaagagaagaagccactgccaccagtccctataccaaatctaataggaataaatggtggagacccagaagataatgacatacgaaagaaaagggaaaaaattaaagagatgatgaaacatgcctgggataattataggatgtatggttggggacataatgaactcagacctattgcaaagaaaggacactccactaatatatttggtaattcacaaatgggtgctaccatagtagatgctttggataccctttatatcatgggacttcatgatgaatttggagatgggcaaaaatggattgaagagaaccttgatttcagtgtgaactcagaggtgtctgtgtttgaagtcaacattcgatttattggaggcctgcttgcagcttattacctttcaggagaagagatattcaagattaaagcagtccaactggctgagaaactccttccggcctttaacacacctactgggattccttgggcaatggtgaatctgaaaagtggagtagggcgaaactggggctgggcatctgcaggtagcagcattcttgctgaatttggtacactgcatatggagtttgtccacctcagctacttgacaggggacccagtttactacaaaaaggtaatgcacattcggaaactgcttcagaagatggatcgtccaaatggtctttatccaaattatttgaacccaagaacaggtcgctggggtcagtatcatacatcagttggcgggctgggagacagtttttacgaatacttactaaaagcatggttgatgtcagataaaacagaccatgaggcgagaaaaatgtatgatgatgctattgaggctatagagaaacatcttattaagaagtcccgaggaggtctcacctttattggagaatggaaaaatgggcacttggaaaagaagatggggcacttggcctgttttgctgggggaatgtttgcactgggagcagatggttccagaatggataaagctggtcattatttagagctaggggcagaaattgcacgtacatgtcatgagtcatatgacagaactgcattaaagctgggtcctgaatcattcaagtttgatggtgcagtagaggctgtggcagtccggcaggctgaaaagtattacatcctccgtccagaagtaattgaaacctattggtacctatggagattcactcatgatccaagatataggcaatggggctgggaagcagcactggctattgaaaagtattgccgagtaagtggtggattttctggggtgaaggatgtgtattcctctactcctacacatgatgatgtacagcagagcttctttcttgctgaaacattaaaatatttgtatctgctgttctccagtgatgatcttttacctttagaccactgggtattcaacacagaggctcatcctctgcctgtgttacatttagccaacaccacactttcaggaaatcctgctgttcgatga

SEQ ID NO: 58634 - protein, 658 aa, Canis familiaris
MTTPALLPLSGRRIPPLNLGPPSFPHHRATLRLSEKFILLLILSAFITLCFGAFFFLPDSSKHKRFDLGLEDVLIPHVDASKGAKNPGVFLIHGPDEHRHRFVYFRSLGFSIWQSENGEEEERLRNKIRADHEKALEEAKEKLKKSREEIRAEIQTEKNKVVQEMKTKEKKPLPPVPIPNLIGINGGDPEDNDIRKKREKIKEMMKHAWDNYRMYGWGHNELRPIAKKGHSTNIFGNSQMGATIVDALDTLYIMGLHDEFGDGQKWIEENLDFSVNSEVSVFEVNIRFIGGLLAAYYLSGEEIFKIKAVQLAEKLLPAFNTPTGIPWAMVNLKSGVGRNWGWASAGSSILAEFGTLHMEFVHLSYLTGDPVYYKKVMHIRKLLQKMDRPNGLYPNYLNPRTGRWGQYHTSVGGLGDSFYEYLLKAWLMSDKTDHEARKMYDDAIEAIEKHLIKKSRGGLTFIGEWKNGHLEKKMGHLACFAGGMFALGADGSRMDKAGHYLELGAEIARTCHESYDRTALKLGPESFKFDGAVEAVAVRQAEKYYILRPEVIETYWYLWRFTHDPRYRQWGWEAALAIEKYCRVSGGFSGVKDVYSSTPTHDDVQQSFFLAETLKYLYLLFSSDDLLPLDHWVFNTEAHPLPVLHLANTTLSGNPAVR

SEQ ID NO: 58635 - DNA, 2013 bp, Spodoptera frugiperda
  CDS (1)..(2013)
atgacggggattttacctacctaccagcgatttgtaaatggagttcctgtaccgtccatttctcgacgttcgttccgtctacgggagaaatatttgattgtttctgtacttttgacattcgggatcgtgtggttaggagcattattctacttgccagagtttaaaagttcaaatagtgtgaacgatagtgtttacaatgtatacaaaagaatccagaaagctggcccagagctgctcatgccgcctcctctggcacaaaacgatgtcggtgactttcctgtgattgggatcgctcaccatggtgaagggggtgatgatcctcacgtaattgaggacaggaaccggctacgagctaagatagaggaggatatgggaatgaaagtgttggagaggcctcagtttgacgtagcaccttccgtgtcgtcttcgcgagggcccagcaagccgccagtcgatgcgattgaggagcccgcggtagggaacaatgcagctaacaaagacgtgtcgccgtcaggcccgaaggctgagagctcggacaagtttgtggctgtggccctggcaccaggagctgaccctgagatcaagcacaagctggagactgtcaaaaagatgatgctgcacgcgtggtacaactacaagctgtatgcttggggcaagaatgagctgaagccgatgtcgaagcgagctcacttgtccagcgtgttcggcgcgggcgaacttggcgccaccatcgtcgatggtctcgacaccctctacctcatgggactcaacgacgaattccgagagggccgcgactgggtcgctgaacatttgcatattaatgaaatcgattccgacttatctgtgttcgagacgacgatccggtttgtcggaggtctcctgtcatgttacgcgctgaccggcgacacgatgttccgagacaaggcggcggaagtaggcgacgctttgctgccagcattcgacacacccaccgggttgccatatgctctcatcaacccgtccaccaaggcaagccgtcagtaccactgggcgggtccgaacagcatcctatcggagctgggaacgctccacctcgagttcacgtacctcagtgacgtcacgggccgtgatatttacagacaaaaagtgagccgcatccgtgaggttttggatcagatcgacaaacctggcgacttgtaccccaacttcatcaacccacgcactggacaatggggacaaaggcacatgtctctgggcgctctcggcgactcgttctacgagtacttactgaaggcgtggctgatgtctggcggcgctgacgagcaggctcgcatcatgttcgacacggccatgcaggcggcgctcgacaaaatgctgcgtgtctcgccctccggcctcgcttacctcgccgagctcaagtacggacgtatcattgaagagaagatggaccacctttcgtgcttcgctggcggtatgttcgcactggcgtcgactaccctggacaactcgatgtcggagcgctacatggacgtggccaagaagctgaccaatacctgccacgagagctacgcgcgatccgagaccaaactcggccctgaagcattccgattctccaacgcggccgaggcgcgtgcacagaagagcaatgagaaggtgtacctcctgcggccggagacgttcgagagctacttcatcatgtggagactcaccaagcaacagatgtaccgcgactgggcctgggaggctgtgcaggctctggagaaacactgccgcgtggagggcggctacaccggtctcgtgaacgtctaccacgccaaccctcagggagacgacgtgcagcagagcttcttcctcgctgagacactcaagtacttatacctgatattcggtgacgattcgttcctgccgctcgacgagtgggtgttcaacacggaagcccatccattcccgatcaggggcaagaacccgctgtaccgcgctgtcgacaaaccggtcctgccagaacctgcgcatgcgcaaaacaacaggatataa

SEQ ID NO: 58636 - protein, 670 aa, Spodoptera frugiperda
MTGILPTYQRFVNGVPVPSISRRSFRLREKYLIVSVLLTFGIVWLGALFYLPEFKSSNSVNDSVYNVYKRIQKAGPELLMPPPLAQNDVGDFPVIGIAHHGEGGDDPHVIEDRNRLRAKIEEDMGMKVLERPQFDVAPSVSSSRGPSKPPVDAIEEPAVGNNAANKDVSPSGPKAESSDKFVAVALAPGADPEIKHKLETVKKMMLHAWYNYKLYAWGKNELKPMSKRAHLSSVFGAGELGATIVDGLDTLYLMGLNDEFREGRDWVAEHLHINEIDSDLSVFETTIRFVGGLLSCYALTGDTMFRDKAAEVGDALLPAFDTPTGLPYALINPSTKASRQYHWAGPNSILSELGTLHLEFTYLSDVTGRDIYRQKVSRIREVLDQIDKPGDLYPNFINPRTGQWGQRHMSLGALGDSFYEYLLKAWLMSGGADEQARIMFDTAMQAALDKMLRVSPSGLAYLAELKYGRIIEEKMDHLSCFAGGMFALASTTLDNSMSERYMDVAKKLTNTCHESYARSETKLGPEAFRFSNAAEARAQKSNEKVYLLRPETFESYFIMWRLTKQQMYRDWAWEAVQALEKHCRVEGGYTGLVNVYHANPQGDDVQQSFFLAETLKYLYLIFGDDSFLPLDEWVFNTEAHPFPIRGKNPLYRAVDKPVLPEPAHAQNNRI

SEQ ID NO: 58637 - DNA, 2988 bp, Drosophila melanogaster
  CDS (1)..(2988)
atgcagcaaaaaccccgaaacaacggctatccgggcaccctcatctgcgcggtcctcctcgtcctgctgtccaccggtgtcagcggccagaagcagtattccaaggcaagaaagttggaactgagggaggatgtgcggcgcatgttccagcacgcctacgatggttacctgcgccacgcctccaactacgatgaactgcgtccgctgacctgcgatggccacgacacctggggcagctactccttgacactgatcgacgctctggacacgctggccaccatgggcaacttcacggaattccgccgcgcggcaagactgctcgaggagaagatggattttgacagggacatcaacgtgtccgtgttcgagacaaacatccgcatcgtgggcgggctgctgtccgcgcatctgctctccaagcgtgctggcgtagagctagagccaggatggccctgcaagggacctctgctgcgactggcggaggatgtggcccgacgattattgccagccttcgtcacgaacacgggtatgccttatggcacggtgaacctgcgctatggcgtgcccaagggcgagacctctataacctgtacggcgggcgtggggacattcctcatcgaatttggtacccttagccggttgaccgggaaaaccatctacgaggatgttgctatgaaggcggtacatgctctatgggcatatcgctcgcccattggactttttggcaatcacatcgacgtgcagagcggtcgttggaccgccctcgactctggtatcggagcaggagtggattccctttttgaatacctagttaaggcatctgtcctgctcaatcgcccagaactcttggagttattccatgaggctcgcgcggccattgataagtacatgcggaaggaggactggtacgtgtgggtaggcatgaacaaaggccgcgtcacccttcccgtctttcagtccctggaggcgttttggcccggcatcctgagcattattggcgacacggagccggccttgcgcaccatatcacggtacattggggtctggaagaagtacggctttctgccagagttttataacattgctgctggagaggcatcgccgaatcgggaggtgtaccccctgcgaccggagctaatcgagtcagctatgtatctctatcgagccacaggaaacgagtatcttctggagtttggtgagcacatgctggagaccttggagttcagtgccaaaaccaaatgcggatatgcaacgattcgcaatgttgtcacccacgaaaaggagaatcgcatggagtcattcttcctggcggaaacaagcaagtacctttatctgctgtttgacgaggaaaacttcctgcacaacgatgggtccggaggcgagctgctgtcaaccgaggatgatgtatgcgtggtacaggccggtgcgtacatcttcaacacagaggctcatcccatggacatgtcagccctccactgttgccacgcccacaacgaggacatctacacctctctggatctacagcggtttagtccacgggcgatattagagaggagcaaaaagcggcaggtagctgttcaggaacagtgggtgccgcagtgtcacccagagaacaacgagttctttaataaagaggatgagagtgtgcaggcgcaggactctgaaaaagagcaggaacgcgagcaatccggcacaagcactaccatggccgtagatattgaggtgttcgacgaatttcaacagcccgccggcgatctgttagtaagcaacttcgagcagatacgcgaggagcgggagctaaacgagagcctgcacagaaacgtggtggcacgaaaccagttgacagtgagcgatttggatgaattctttgctcagcgacgggagagtttcgcaagcgcctccgaggctcttaactatgtaaagaccttcatgggcaactataccatggatgtagcctttatacggggcttgcaactgtacgatactaatatgagtagtgtattgggcacaggcgcccagaaagagtatgagtctcgaatgaggaccctttggcagctgtacgaactgcagcagcaatatgtggccaacatccgagtgattcaaggattaggtttgctaacctttccggcggacggtgaccggatacctagccatttgacagaggtgttggacagcctggataagtcggctcacttggagcatatggatctacaagatctcgaaacaagagtgtccaatacctcctcgccccagttggctcatataagagaagttattctaaaagcacgtaatgcctatgccatagccatggtcaatacttcggccatgcaggaatttgctatccgaatctacctcagtggcacttcggaggccggtgttcgcattcacccacttttggaagacgcagaactaagtgaggaagcacgtaaaaggccattgaagttggcggaggagcgagccctcttcagctacgcccgtcgaatagtggactttcggaaacgaatggcggagacagttgatcgattgcagacgctcatgcaggacattccgccacccaaaaggaaagaggccactaccgactctcaggccgcagatgcgtccacagtctacactcaaaccaaagcccagatggcggcgcctgcacagcagccggagccgagccaggaagagaagcagtcgacacaaattcaaaaaggaaagcttgccgaaaacggctccggattgggtgaagaggagtccggctgcgtgtggtcgcagttggtgcagaccatccttcggaagaccacggtgcagcgggtcaaatttgacgaggccgtgctccaggaaaatacgcgcaaggcactggagaagtacgcccgcaaggagttaccccaccatctgttcgcctgcaccggccggagtacattgagggattcgcctatcgggacttttatccggaagcgctgtaagctcgcaatcacctcaccgaccaacacgactgatctgtag

SEQ ID NO: 58638 - protein, 995 aa, Drosophila melanogaster
MQQKPRNNGYPGTLICAVLLVLLSTGVSGQKQYSKARKLELREDVRRMFQHAYDGYLRHASNYDELRPLTCDGHDTWGSYSLTLIDALDTLATMGNFTEFRRAARLLEEKMDFDRDINVSVFETNIRIVGGLLSAHLLSKRAGVELEPGWPCKGPLLRLAEDVARRLLPAFVTNTGMPYGTVNLRYGVPKGETSITCTAGVGTFLIEFGTLSRLTGKTIYEDVAMKAVHALWAYRSPIGLFGNHIDVQSGRWTALDSGIGAGVDSLFEYLVKASVLLNRPELLELFHEARAAIDKYMRKEDWYVWVGMNKGRVTLPVFQSLEAFWPGILSIIGDTEPALRTISRYIGVWKKYGFLPEFYNIAAGEASPNREVYPLRPELIESAMYLYRATGNEYLLEFGEHMLETLEFSAKTKCGYATIRNVVTHEKENRMESFFLAETSKYLYLLFDEENFLHNDGSGGELLSTEDDVCVVQAGAYIFNTEAHPMDMSALHCCHAHNEDIYTSLDLQRFSPRAILERSKKRQVAVQEQWVPQCHPENNEFFNKEDESVQAQDSEKEQEREQSGTSTTMAVDIEVFDEFQQPAGDLLVSNFEQIREERELNESLHRNVVARNQLTVSDLDEFFAQRRESFASASEALNYVKTFMGNYTMDVAFIRGLQLYDTNMSSVLGTGAQKEYESRMRTLWQLYELQQQYVANIRVIQGLGLLTFPADGDRIPSHLTEVLDSLDKSAHLEHMDLQDLETRVSNTSSPQLAHIREVILKARNAYAIAMVNTSAMQEFAIRIYLSGTSEAGVRIHPLLEDAELSEEARKRPLKLAEERALFSYARRIVDFRKRMAETVDRLQTLMQDIPPPKRKEATTDSQAADASTVYTQTKAQMAAPAQQPEPSQEEKQSTQIQKGKLAENGSGLGEEESGCVWSQLVQTILRKTTVQRVKFDEAVLQENTRKALEKYARKELPHHLFACTGRSTLRDSPIGTFIRKRCKLAITSPTNTTDL

SEQ ID NO: 58639 - DNA, 2231 bp, Mus musculus
  CDS (75)..(2033)
gggacgcgcggggaggcggtcggctggggacgcgcccggcgcttcaaaataatgcccgcggcggacgcgcgaccatgcaatggcgagcgcttgtcctggggctggtgctgctgcgcctcggcctccacgcggtgctctggttggtcttcgggctggggcccagcatgggcttctaccagcggtttccgctcagcttcggcttccagcgcttgagggaccccgacggctcggggccagttggtccgcccggaggcccggcctggcttcatcggccaaggcgcggaacggaggggcggcttgagaccccgccagagccgggaccgacgccgggaccgggcgtgtgcggcccggcgcactggggctatgccctgggcggcggtggctgcggcccggacgagtacgagcggcgctacagcggcgccttcccgccgcagctgcgtgcccagatgcgcgacctggcgcggggcatgttcgtcttcggctatgacaactacatggcgcacgcctttccgcaggacgagctcaaccccatctactgccgcggccgggggcctgaccgcggagacccttccaatctgaacatcaatgatgtcctagggaattactctctgactctggttgatgccttggatacattggcaataatgggaaattcatccgagttccagaaggcagtcaagttagtgatcaacactgtttcatttgacaaagattccacagtccaggtcttcgaagctacgataagggttctgggaagcctcctttctgctcacagaataataactgattccaaacagccctttggtgacatgacaattgaggattatgataatgaattgttgtacatggcccatgacttggctgtgcggctccttccagcctttgaaaacaccaagacagggatcccctatcctcgggtgaatctgaagacaggtgttcctcctgacagcaataatgagacctgcacagcgggggccggttctctcctggtggaatttgggattctgagccgactgctgggggattccacttttgagtgggttgccagacgagctgtgaaagccctctggaacttgcggagcaacgatacaggattattaggcaatgttgtgaacatccagacaggccattgggttggaaagcagagtggcttgggtgctgggctggattccttctatgagtacctcttgaaatcttacattctctttggagaaaaagaagatctagagatgtttaatgctgcgtatcagagcatccagagctacctgcgaagaggccgggaagcctgcaatgaaggagaaggagacccaccgctctacgtcaacgtgaacatgttcagtgggcagctcatgaacacctggattgactcgctgcaggctttcttccctggactgcaggttctgataggggatgtggaagatgccatctgcctacacgccttctactatgccatatggaagcggtacggggccctccctgagcgctataactggcaactccaggcccctgatgttctcttctaccctctgggtccagagctagtggagtccacatatctcctctaccaggcaaccaagaatcccttctacctccatgtaggaatggacattctgcagagtcttgaaaaatacacaaaagtcaaatgtggatatgctacgctgcatcacgtcatagacaagtctaaagaagaccggatggaaagcttctttctcagcgagacttgcaaatacttgtatctgctatttgatgaagagaatccagtacacaaatctggaaccagatacatgtttacaactgagggccatatcatatctgtggacaaacgtcttcgggaattgccttggaaggaattcttctctgaagatggggagcgggaccaagaggaaaagtttgtacacagacctaagtctcaggagctcagagtcattaactccagttctaattgtaatcgtgttcctgatgagaggagatactccttgcccttaaagagcatctacatgcgccagatcgaccagatggttggcttgatttgacctgctcacctcaatgtggccagaacttaaaccaaacccaagtgtaccaaaatctcctctgaggtggaagcggtggagcctgcccatctgtgatgctgtcgaagtttctgtccagctcttactcacctctggttgaatcttgcacttagtgctttttagtgtttcccttctgtttaataaaatactctattttttctg

SEQ ID NO: 58640 - protein, 652 aa, Mus musculus
MQWRALVLGLVLLRLGLHAVLWLVFGLGPSMGFYQRFPLSFGFQRLRDPDGSGPVGPPGGPAWLHRPRRGTEGRLETPPEPGPTPGPGVCGPAHWGYALGGGGCGPDEYERRYSGAFPPQLRAQMRDLARGMFVFGYDNYMAHAFPQDELNPIYCRGRGPDRGDPSNLNINDVLGNYSLTLVDALDTLAIMGNSSEFQKAVKLVINTVSFDKDSTVQVFEATIRVLGSLLSAHRIITDSKQPFGDMTIEDYDNELLYMAHDLAVRLLPAFENTKTGIPYPRVNLKTGVPPDSNNETCTAGAGSLLVEFGILSRLLGDSTFEWVARRAVKALWNLRSNDTGLLGNVVNIQTGHWVGKQSGLGAGLDSFYEYLLKSYILFGEKEDLEMFNAAYQSIQSYLRRGREACNEGEGDPPLYVNVNMFSGQLMNTWIDSLQAFFPGLQVLIGDVEDAICLHAFYYAIWKRYGALPERYNWQLQAPDVLFYPLGPELVESTYLLYQATKNPFYLHVGMDILQSLEKYTKVKCGYATLHHVIDKSKEDRMESFFLSETCKYLYLLFDEENPVHKSGTRYMFTTEGHIISVDKRLRELPWKEFFSEDGERDQEEKFVHRPKSQELRVINSSSNCNRVPDERRYSLPLKSIYMRQIDQMVGLI

SEQ ID NO: 58641 - DNA, 1995 bp, Tetraodon nigroviridis
  CDS (1)..(1995)
atgaccacgccggcgctcctgcccctgtcgggccgaaggatacccaccctgtcgccgggcgcctcctcctttccgcaccaccgagccacgctgaggctctccgagaagttcatcctcctcctcatcctcagtgccttcatcacgctttgtttcggggcctttttcttcctcccggacagttccaagcacaagcgctttgacctgggcttggaggacgtgctcatcccccacatcgactcacccaaagaggggaaacacgcctccggacaggtggtcatacacggacagggggcccacgacgagcacagacacaggtcatttttcgggatgctggaatactctgtgggagccagagtaaatggggaggaggaggagagcttgcgggacaagatccgagcggaccacgagcgagcgctgcaggaggccaaggagaagctgagaaagtcacgcgaggagctgcaagccgagattcagacggagaagaacaaggtcgccgaggacctgaagaagaaggactcgggccccaagcctttaccgcctgtccccatgcccagggtggtgggggtcagcgacggcgagcctccagagccggacgtcaaagagaagcgtgacaagataagagagatgatgaagcacgcctgggacagctaccggcagtacggctggggccacaacgagctgaagcccctggccaagaagggacactccaccaacatctttggtaactcccaactcggcgccaccatcgtggacgcgctggacaccctctacatcatgggtctgcacgaggagttcaaggacggccaggagtggatcgagcagaacctggacttcggtgtgaatgcagaggtttccgtgttcgaagtcaacatccgcttcatcggagggctgctggccgcctactacctctctggacaagaagttttcaagatgaaggccgtccagctggccgagaagctgctccctgccttcaacacccccacaggcatcccctgggccatcgtcaacctgaagagcggcgtgggtcgtaactggggctgggcctcggctggaagcagcatcctggcggagtttgggaccctgcacatggagtttgttcacctcacctacctgaccggaaaccccgcctactaccagaaggtgatgcacatccggaagctcctagccaagatggaccgacccaacgggctctaccccaactacctgaacccacgcacgggccgctggggccagcatcacacgtccgtcggaggactcggggacagcttttacgaatacctgctgaaggcctggctgatgtcggacaagacggacacagaagcgcgcaagacttacgacgaggccatggaggctatcgagcgccacctgatccgcaagtccaacggcggcctgacgttcatcggcgagtggaagaacggacacctggagaggaagatgggccacctagcgtgtttcgccggtggcatgttcgctctgggcgcggatggttcccccgacgacaaggccgggcactatctgcagctgggggccgagatcgcgcacacgtgccacgagtcctacgacaggacggtgctgaagctgggccccgaggccttcaagttcgacagcggcctggaggcggtggcggtgcggcagaacgagaagtactacatcctgaggcccgaggtcatcgagacctactggtacatgtggaggttcacccacgaccccaaataccgccagtggggctgggaggcggcgcaggccatcgacaagtactgccgggtgagcggaggcttctcgggggtgaaggacgtctactcctccagcccgacctacgacgacgtgcagcagagcttcttcctggccgagacgctcaagtatctctacctgctgttctccagcgacgacctgatgccctttgagagttgggtcttcaacacggaggcccacccgcttcccgtcctccacctgggcaacatcacgctgcccggcagcgagccggcgcagcggtag

SEQ ID NO: 58642 - protein, 664 aa, Tetraodon nigroviridis
MTTPALLPLSGRRIPTLSPGASSFPHHRATLRLSEKFILLLILSAFITLCFGAFFFLPDSSKHKRFDLGLEDVLIPHIDSPKEGKHASGQVVIHGQGAHDEHRHRSFFGMLEYSVGARVNGEEEESLRDKIRADHERALQEAKEKLRKSREELQAEIQTEKNKVAEDLKKKDSGPKPLPPVPMPRVVGVSDGEPPEPDVKEKRDKIREMMKHAWDSYRQYGWGHNELKPLAKKGHSTNIFGNSQLGATIVDALDTLYIMGLHEEFKDGQEWIEQNLDFGVNAEVSVFEVNIRFIGGLLAAYYLSGQEVFKMKAVQLAEKLLPAFNTPTGIPWAIVNLKSGVGRNWGWASAGSSILAEFGTLHMEFVHLTYLTGNPAYYQKVMHIRKLLAKMDRPNGLYPNYLNPRTGRWGQHHTSVGGLGDSFYEYLLKAWLMSDKTDTEARKTYDEAMEAIERHLIRKSNGGLTFIGEWKNGHLERKMGHLACFAGGMFALGADGSPDDKAGHYLQLGAEIAHTCHESYDRTVLKLGPEAFKFDSGLEAVAVRQNEKYYILRPEVIETYWYMWRFTHDPKYRQWGWEAAQAIDKYCRVSGGFSGVKDVYSSSPTYDDVQQSFFLAETLKYLYLLFSSDDLMPFESWVFNTEAHPLPVLHLGNITLPGSEPAQR

SEQ ID NO: 58643 - DNA, 2823 bp, Cryptococcus neoformans var
  CDS (1)..(2823)
atgctatcatcaagaaccatatggatatggctggctccttgcctttgcctgtcgaatttattaggcgtatggggcatgaccgatgctcgaaggatacagcttcgtgacgagactgctgccctgttcagacatggatacgaagggtatataaagtatgcatatcctgcggacgaacttcgcccattgtcatgtgcaccactacgtcgatcaaagaatgcagctgattttggcatcaacgacctccacgccaatgtttccctcaccctcctcgacgtcctctcctccttaccgctcttacacccacatgctctcccctctgcgctagagcgtataacaacccaagtatcgttcgaccaagatgtgaaagtacaagtattcgaaatgaccatccgtgccctgggaggtttattgtcgatgtatcagtatctcgatgatttaccggattcaccttacgagcaagcgagagtgcttggggtggtaagagaaggaaaggaagggtggttaggcctagggctgggagctcaggaaaaagtggataaggtggatgtgaaaaagtataagccgaggatcttggaattggcggaagatttggggaggaggatgttgccggcgttcaacacgaaaactggattaccgtatgcgcgtgtgaatttgaagcatgggatcgagaagggtgagagtgcggagacgtgtacggcaggagcgggcagtcttatcctcgagttttcccttctttctagattgacaggcgacgaccgttacgaacaactagcccgaaacgcttactactcgatatggaatcgtcgctcggatcataatctactcggtaacacgataggagccacgcacggccattggctcatgcctggtttgagcggagttggagcagggatggatagcttctttgaatatggggtcaaggctggtatcatgctcggtgatgactcgttttacgacatattttacgactcttatgctgctattcaaactcatgtccgaacgactgacggttttatctatcgacctatccacactcgccttctccaaatccccagcccaacaacgatcgattccctctcggcctttctacccgccatccaagtcctcgctggtgatatcccttcggccatcagatcgcatctcgtcttctggaatctatggagaaagtttggagctctgcctgagagttggcggtggcaggagaggcggatagaatgggctggatggcctgggagaccagagtttatagagtcgacttattatctgtatcaggcaacaaaagatccgttctatttgagggttggcgaacgggttttaaaggatctggcaaggcgaaccaaaacgtcctgcggatttgctaccatcaagaacgtcttgacgagcgagctggaagacagaatggagagctttatgctttcggaaaccctcaagtatctctaccttttattctctgatacgcccttcccgaatcagaataaagttttcaccactgaaggccacccactatacataccacagcctcttctgcagcctagcacaaatgcgagaaagtcattgcataaaggcgaatggctcacatgcccggcgtatcaaagtccttttgccaccgggggtatcgactttcatgggactgacaaggttgggaaccgagtggagaaagttgggataacagtcgggattgagggcacgtcagagtatgaatatgcgagagcgctcgtctttggttggggagaggaaggattgaaggtagaagatcaaaaaagaatgtggtttgatggtggggtatgtagtatccaggaagtccccaaattcgcgttcgatatcgttttaacctctccgttcaatgagacgttccctgaggatccatctcctggatctgataaggtgtatcaaaataccacgacgggtgattatgtcatcagcaatatcgcggggatccgtctgggagtgagatggcggctggacgggcaagggtatgacgtgtcaagcatcggtccacatagggttaggaccggccagcaggtcacagtcatcgactcgtctatgcggaatcatttccctctaccttcccttgctccaggtccacctcagccgcagtatgagcctactgaagtcatcctccgcttcgtctttctctccccggtggttgtcaaggataaacatgtagaagctagtacagtttttctccacgctttaggagcgaccgcgacattcggaaaggattttggtgcttctgcaacgtcccccagaatggaagaccagcaaggatggcagctcagcggaggtgcactgccgattctcgtcctccccaacccctccgatggctgttcaccattaaccctatcaactcctgattatccgttcatcctcctcctcgataggggcaattgcacctttgcagagaaagcgcaaaacgcagagacaataggtgcaagcgggttgttaatagttggttaccctcacccacccgaaggaggtgtaacgcaaggtgatcagacggtatacgctgctccggaggaaggcttggtacggccctctgccgagccaaacgaggctgagggattggatagtatggggatagtgtatatggagcatcttgtaggagaactggtgcgcaatgcgagtcaaaaaggtgaaataggggcggcgattatgagaatcgaaggtgtaggtgaggaagcagctgggagcagtggattcccacaggctggatcgggggcgacaaagaagcattgggaaagcgattcgcggattagggaaggtaggctggcagttggagattgggaaatttgtaatcttgtggtcgtagatacttctgtataa

SEQ ID NO: 58644 - protein, 940 aa, Cryptococcus neoformans var
MLSSRTIWIWLAPCLCLSNLLGVWGMTDARRIQLRDETAALFRHGYEGYIKYAYPADELRPLSCAPLRRSKNAADFGINDLHANVSLTLLDVLSSLPLLHPHALPSALERITTQVSFDQDVKVQVFEMTIRALGGLLSMYQYLDDLPDSPYEQARVLGVVREGKEGWLGLGLGAQEKVDKVDVKKYKPRILELAEDLGRRMLPAFNTKTGLPYARVNLKHGIEKGESAETCTAGAGSLILEFSLLSRLTGDDRYEQLARNAYYSIWNRRSDHNLLGNTIGATHGHWLMPGLSGVGAGMDSFFEYGVKAGIMLGDDSFYDIFYDSYAAIQTHVRTTDGFIYRPIHTRLLQIPSPTTIDSLSAFLPAIQVLAGDIPSAIRSHLVFWNLWRKFGALPESWRWQERRIEWAGWPGRPEFIESTYYLYQATKDPFYLRVGERVLKDLARRTKTSCGFATIKNVLTSELEDRMESFMLSETLKYLYLLFSDTPFPNQNKVFTTEGHPLYIPQPLLQPSTNARKSLHKGEWLTCPAYQSPFATGGIDFHGTDKVGNRVEKVGITVGIEGTSEYEYARALVFGWGEEGLKVEDQKRMWFDGGVCSIQEVPKFAFDIVLTSPFNETFPEDPSPGSDKVYQNTTTGDYVISNIAGIRLGVRWRLDGQGYDVSSIGPHRVRTGQQVTVIDSSMRNHFPLPSLAPGPPQPQYEPTEVILRFVFLSPVVVKDKHVEASTVFLHALGATATFGKDFGASATSPRMEDQQGWQLSGGALPILVLPNPSDGCSPLTLSTPDYPFILLLDRGNCTFAEKAQNAETIGASGLLIVGYPHPPEGGVTQGDQTVYAAPEEGLVRPSAEPNEAEGLDSMGIVYMEHLVGELVRNASQKGEIGAAIMRIEGVGEEAAGSSGFPQAGSGATKKHWESDSRIREGRLAVGDWEICNLVVVDTSV

SEQ ID NO: 58645 - DNA, 1776 bp, Aspergillus fumigatus
  CDS (1)..(1776)
atgtggaagtggctgcagagtcttggggatccgacgaccgagattgaagatggccagcaccagaatatcgattggaatgcgcgaagggaaaaggtcagggatgcgttcattattagctgggatggatatgagcagcatggatggggatatgacgagtacaagccgatcacgaaagaaggaaaacagatggtcccaggagggttgggctggatcattgttgacgccctcgatacgctcatgatcatgaatctgacctcgcgggttcagcacgcgcgcaactggatccacaattcgctacaatacaaccaggaccacgacgtcaacacattcgagacgaccatccggatgttgggtggccttctgtcggcgcattatctttcgaccgcccatcccggactggccccaatcgcggacgacgatgcgggctcaccaggagaggatttgtatattgagaaggcgaccgacttggcggacagactgcttggggcttttgagtccaagtctggagtgccatatgccagcatcaatctgaatacgtcgactggtattccatctcatgcagacaatggggcttcatctacggcggaggctaccactgttcaacttgagttcaagtacttggccaagttgacgggagaagcggagtactggcgggtggtggagaaggtgatgcaagtggtcgatgaccagaagatggaagacggcctgctcccgatctatatctatccagactctggacatttcagaggagacaacatccgtctgggaagtcggggggattcttactacgagtatctcatcaagcagtatttgcaaacatctaaacaggagcccatctataaagagctctgggatgaatcgttgatgggcgtccgcaagcatctgattgcgtacaccaaaaatgctcagctaatgattttgggggagaggccgtctgggctccatgggaaactgtcgccgaagatggatcacctggtgtgcttcatgccgggaaccattgctcttggagccaccggcggcgtgccgttgagcgaagcccggaagtctcctgactggaatcaacggcgggacgaagaaattctgattgctcgggaattgatgaaaacatgctgggcgacatacctcgcgacgaagacgggtctggctccggaaatcacctacttcaccttggacgaccctccaaagatgttccacgacatgtacccggactcgacggcgagcgccggcaaccgcaagtcccagggggctgatttgccaatgaagtcacagcctctttacccgctggacgacgaaaccctcaagtggcgggaggacatccagatccaaagccaggaccgccacaatctccaacggccggagacggtcgagtcattgttttatatgtaccgcatcaccggggacgagatatatcgccagtggggatgggagatgttcaagtcctttatccgccacacggcagtggttgaacatgaccactcgcacgagaccgattcccctgccgatgccgctgccggaagccaatccgagaaagtcgcgcgtccctcgcggattacgggattcacgtcgctgagcaacgccaacaccgtgccccctgtaccccgagacaacatggagagtttctggatggcagagacgctcaagtatttctacttgttgttttccgaccgggactttatctccctggaggaccatgtgttcaacacggaagcgcatccgctgccacggtttcagcctacgggtgatttgaagacggggtggacgcggaagcctcggtag

SEQ ID NO: 58646 - protein, 591 aa, Aspergillus fumigatus
MWKWLQSLGDPTTEIEDGQHQNIDWNARREKVRDAFIISWDGYEQHGWGYDEYKPITKEGKQMVPGGLGWIIVDALDTLMIMNLTSRVQHARNWIHNSLQYNQDHDVNTFETTIRMLGGLLSAHYLSTAHPGLAPIADDDAGSPGEDLYIEKATDLADRLLGAFESKSGVPYASINLNTSTGIPSHADNGASSTAEATTVQLEFKYLAKLTGEAEYWRVVEKVMQVVDDQKMEDGLLPIYIYPDSGHFRGDNIRLGSRGDSYYEYLIKQYLQTSKQEPIYKELWDESLMGVRKHLIAYTKNAQLMILGERPSGLHGKLSPKMDHLVCFMPGTIALGATGGVPLSEARKSPDWNQRRDEEILIARELMKTCWATYLATKTGLAPEITYFTLDDPPKMFHDMYPDSTASAGNRKSQGADLPMKSQPLYPLDDETLKWREDIQIQSQDRHNLQRPETVESLFYMYRITGDEIYRQWGWEMFKSFIRHTAVVEHDHSHETDSPADAAAGSQSEKVARPSRITGFTSLSNANTVPPVPRDNMESFWMAETLKYFYLLFSDRDFISLEDHVFNTEAHPLPRFQPTGDLKTGWTRKPR

SEQ ID NO: 58647 - DNA, 2725 bp, Homo sapiens
  CDS (16)..(2115)
gttgacggcgctgcgatggctgcctgcgagggcaggagaagcggagctctcggttcctctcagtcggacttcctgacgccgccagtgggcggggccccttgggccgtcgccaccactgtagtcatgtacccaccgccgccgccgccgcctcatcgggacttcatctcggtgacgctgagctttggcgagaactatgacaacagcaagagttggcggcggcgctcgtgctggaggaaatggaagcaactgtcgagattgcagcggaatatgattctcttcctccttgcctttctgcttttctgtggactcctcttctacatcaacttggctgaccattggaaagctctggctttcaggctagaggaagagcagaagatgaggccagaaattgctgggttaaaaccagcaaatccacccgtcttaccagctcctcagaaggcggacaccgaccctgagaacttacctgagatttcgtcacagaagacacaaagacacatccagcggggaccacctcacctgcagattagacccccaagccaagacctgaaggatgggacccaggaggaggccacaaaaaggcaagaagcccctgtggatccccgcccggaaggagatccgcagaggacagtcatcagctggaggggagcggtgatcgagcctgagcagggcaccgagctcccttcaagaagagcagaagtgcccaccaagcctcccctgccaccggccaggacacagggcacaccagtgcatctgaactatcgccagaagggcgtgattgacgtcttcctgcatgcatggaaaggataccgcaagtttgcatggggccatgacgagctgaagcctgtgtccaggtccttcagtgagtggtttggcctcggtctcacactgatcgacgcgctggacaccatgtggatcttgggtctgaggaaagaatttgaggaagccaggaagtgggtgtcgaagaagttacactttgaaaaggacgtggacgtcaacctgtttgagagcacgatccgcatcctgggggggctcctgagtgcctaccacctgtctggggacagcctcttcctgaggaaagctgaggattttggaaatcggctaatgcctgccttcagaacaccatccaagattccttactcggatgtgaacatcggtactggagttgcccacccgccacggtggacctccgacagcactgtggccgaggtgaccagcattcagctggagttccgggagctctcccgtctcacaggggataagaagtttcaggaggcagtggagaaggtgacacagcacatccacggcctgtctgggaagaaggatgggctggtgcccatgttcatcaatacccacagtggcctcttcacccacctgggcgtattcacgctgggcgccagggccgacagctactatgagtacctgctgaagcagtggatccagggcgggaagcaggagacacagctgctggaagactacgtggaagccatcgagggtgtcagaacgcacctgctgcggcactccgagcccagtaagctcacctttgtgggggagcttgcccacggccgcttcagtgccaagatggaccacctggtgtgcttcctgccagggacgctggctctgggcgtctaccacggcctgcccgccagccacatggagctggcccaggagctcatggagacttgttaccagatgaaccggcagatggagacggggctgagtcccgagatcgtgcacttcaacctttacccccagccgggccgtcgggacgtggaggtcaagccagcagacaggcacaacctgctgcggccagagaccgtggagagcctgttctacctgtaccgcgtcacaggggaccgcaaataccaggactggggctgggagattctgcagagcttcagccgattcacacgggtcccctcgggtggctattcttccatcaacaatgtccaggatcctcagaagcccgagcctagggacaagatggagagcttcttcctgggggagacgctcaagtatctgttcttgctcttctccgatgacccaaacctgctcagcctggacgcctacgtgttcaacaccgaagcccaccctctgcctatctggacccctgcctagggtggatggctgctggtgtggggacttcgggtgggcagaggcaccttgctgggtctgtggcattttccaagggcccacgtagcaccggcaaccgccaagtggcccaggctctgaactggctctgggctcctcctcgtctctgctttaatcaggacaccgtgaggacaagtgaggccgtcagtcttggtgtgatgcggggtgggctgggccgctggagcctccgcctgcttcctccagaagacacgaatcatgactcacgattgctgaagcctgagcaggtctctgtgggccgaccagaggggggcttcgaggtggtccctggtactggggtgaccgagtggacagcccagggtgcagctctgcccgggctcgtgaagcctcagatgtccccaatccaagggtctggaggggctgccgtgactccagaggcctgaggctccagggctggctctggtgtttacaagctggactcagggatcctcctggccgccccgcagggggcttggagggctggacggcaagtccgtctagctcacgggcccctccagtggaatgggtcttttcggtggagataaaagttgatttgctctaaaaaaaaaaaaaaaaaaaa

SEQ ID NO: 58648 - protein, 699 aa, Homo sapiens
MAACEGRRSGALGSSQSDFLTPPVGGAPWAVATTVVMYPPPPPPPHRDFISVTLSFGENYDNSKSWRRRSCWRKWKQLSRLQRNMILFLLAFLLFCGLLFYINLADHWKALAFRLEEEQKMRPEIAGLKPANPPVLPAPQKADTDPENLPEISSQKTQRHIQRGPPHLQIRPPSQDLKDGTQEEATKRQEAPVDPRPEGDPQRTVISWRGAVIEPEQGTELPSRRAEVPTKPPLPPARTQGTPVHLNYRQKGVIDVFLHAWKGYRKFAWGHDELKPVSRSFSEWFGLGLTLIDALDTMWILGLRKEFEEARKWVSKKLHFEKDVDVNLFESTIRILGGLLSAYHLSGDSLFLRKAEDFGNRLMPAFRTPSKIPYSDVNIGTGVAHPPRWTSDSTVAEVTSIQLEFRELSRLTGDKKFQEAVEKVTQHIHGLSGKKDGLVPMFINTHSGLFTHLGVFTLGARADSYYEYLLKQWIQGGKQETQLLEDYVEAIEGVRTHLLRHSEPSKLTFVGELAHGRFSAKMDHLVCFLPGTLALGVYHGLPASHMELAQELMETCYQMNRQMETGLSPEIVHFNLYPQPGRRDVEVKPADRHNLLRPETVESLFYLYRVTGDRKYQDWGWEILQSFSRFTRVPSGGYSSINNVQDPQKPEPRDKMESFFLGETLKYLFLLFSDDPNLLSLDAYVFNTEAHPLPIWTPA

SEQ ID NO: 58649 - DNA, 2031 bp, Oryza sativa
  CDS (1)..(2031)
atgcagccggcgctgcgacggcggcggcggcgccaaggcttcctcctccccttcgcctgcctctccgccgccctcatcgccgctgccctgctccccggcgccgctttcgccgatggcgtcacgccctccgaggcccgccggctccgcgacgaggtcaaagatatgttctatcatgcatttgatgggtacatgcaacatgcttttccacttgatgaattgcggcctttaagttgccaaggagaagattcacttggtggctatgcacttactcttatagactctttggataccttggctttactaggggataaggagagatttgatgctgccgtggagtgggttggtaagaatgtccgctttgatattaataaaactgtctctgtttttgaaaccaacatacgcattcttgggggtctgctatcagctcacctgattgccagtgattatgcaactggaatgagaattcaatcttatgatgatcagttgcttcatttagcggctgacttagctcaaagattgctacctgcatttgacactccaacaggtattccatttggatcagtaaatttattgtatggagtcgatgaaaatgaaagcaagataacttcaacagctggtggtggcactttgacactggaatttggtgtcctgagtcgtttgactaatgatagcgtttatgaacgagttacaaaaaactctgtgcgtggaatatgggcacgcaggtcgaaacttgaccttgttggtgcccatataaatgtatttactggtgaatggacacagaaggatgcaggaattggcacaagcattgactcattctatgagtatcttctaaaggcgtatttattatttggagatgaagaatatttgtatatatttcaggaggcttacaaggctgccatgcattatctccatcatgatccctggtatgtggaggtaaatatgaattctggtgctactgtttggccactattcaacagtctccaggcattctggccaggacttcaggtgttagctggagatgttgatcctgccattcgaactcatgctgccttcttcagtgtatggaaaaaatatggcttcaccccagaagggtttaatcttgctacatccactgttcagaatggacaaaggagctacccgctgcggcctgaattgattgaaagcacatattggctgttcaaggctactagagattataggtaccttgatgttggaagggatatattagcaagccttcaatatggtgctaaatgtccatgtggttactgccatatttcagatgtagaaacccaccagcaggatgaccacatggagagttttttccttgcagaaacagtcaaatatctctggcttctttttgatttagctgcaggccctgataatattgttgaaaatgggccatataaatacatatttagtacagaaggtcatctgttgcctgctactcctcagataaccttgttagatgagcattgcttgtatgctggagcattctgcaatggtactgcaggccatggatatggtaccggtgatagttctaataagcatcaaaatgcaaactctgttccgttcgatgatagtcgaacaccttccgatcaatctttatccaatattttgtctacgacaagagggtacatcaagggagtttgtccaggattaactcatgcccagaaacttggcatatcatactctgccgaggaggataactcaatacagcagaattctggaagtagtgagaatcttgatgaatcacacgtgatcaaatccagtgtccaagctcaatcaagttctgttatattgatatcgcatccagtcgcaagccaaactgaggagcctacgtcgggcagaagtcagtacaatgcaaacattgtggcaactgctgagtctgtagggactgatactgccggcgcctcatcccaccccgaggatcttgttaaggaaactgagagcgtctctgaacagaaagaaatcaatgacaaagagatcgcttctcagggtagtcaaccgaccgaaggaagatacctgacctaa

SEQ ID NO: 58650 - protein, 676 aa, Oryza sativa
MQPALRRRRRRQGFLLPFACLSAALIAAALLPGAAFADGVTPSEARRLRDEVKDMFYHAFDGYMQHAFPLDELRPLSCQGEDSLGGYALTLIDSLDTLALLGDKERFDAAVEWVGKNVRFDINKTVSVFETNIRILGGLLSAHLIASDYATGMRIQSYDDQLLHLAADLAQRLLPAFDTPTGIPFGSVNLLYGVDENESKITSTAGGGTLTLEFGVLSRLTNDSVYERVTKNSVRGIWARRSKLDLVGAHINVFTGEWTQKDAGIGTSIDSFYEYLLKAYLLFGDEEYLYIFQEAYKAAMHYLHHDPWYVEVNMNSGATVWPLFNSLQAFWPGLQVLAGDVDPAIRTHAAFFSVWKKYGFTPEGFNLATSTVQNGQRSYPLRPELIESTYWLFKATRDYRYLDVGRDILASLQYGAKCPCGYCHISDVETHQQDDHMESFFLAETVKYLWLLFDLAAGPDNIVENGPYKYIFSTEGHLLPATPQITLLDEHCLYAGAFCNGTAGHGYGTGDSSNKHQNANSVPFDDSRTPSDQSLSNILSTTRGYIKGVCPGLTHAQKLGISYSAEEDNSIQQNSGSSENLDESHVIKSSVQAQSSSVILISHPVASQTEEPTSGRSQYNANIVATAESVGTDTAGASSHPEDLVKETESVSEQKEINDKEIASQGSQPTEGRYLT

SEQ ID NO: 58651 - DNA, 1569 bp, Caenorhabditis briggsae
  CDS (1)..(1569)
atgttcttgatcatttgtctagtctcaatgcaactactcgtttttctattcgttttcttggccacaccatcggattctctgaatcccaaaagacagcgattcttcggaacgtcttctgaaaattgtgcgatgattagtacaacgaaacggaaaattgcggcgaataagttgaaaagagcgccgcccatttttcaaggaccttctaacgatcgccagcgagcaattgtagcagcattccagcactcgtggacgggatacaagaaatatgcatggggacatgacgagctgcttccggtgtcgaagcgattcgatgatccattccagttaggattgacgattgtggatagtttggatacagcgattattatgggattggagacagaaacccgagaaggcgtcgaatggattcggaatagtctgaatgtgtctccatcgaaaagtgtgaatgtgttcgaaactacgattcgagtgctcggcggacttttgagtggatatcatttgactggggaagaagctctcctggaaaaagccgctaaactaggcgacaatctactcaacgcattcacaaaatccaaatctcccatcccgaaaagtgacgtggatcttggcaccggcgcagcattcagcccgaatcgcggatactcttcgctcgccgaagcgacaacgttgcagctggagtttcgagatttatcagtactgaccggtgataagaaatacgaagaaacggctttcgcagcgtcagaacatgtacacaagacgaaatgtgccgaatatgatggtttatgcttttatcatatcgatgagaacggagaattcaagaaaactgcgatcactcttggcgctcgtgctgacagctactatgagtacctcatcaagcaatggctccagaccaaaaaatcgattgattggctgcgcgatgacttcctccaatcgatgaaatccatcaaaaatcacctctaccgtcaatcccaaccatcaggcctctggttcattggagaaatcgctgaaaacgatgatttctacccaaaaatggatcacttggtgtgctttttatccggatccctggctctttctcacttaaatggactagatgaaaatggggaacatattagaatggccaagaaaatcggagaaatttgccataaaatgtatcaaaatccaactggtcttggccccgaaatcattcatttcaatatcgaaaatcgaacagacgacgtatccagagaagattcttatgtcaaaagtctagatgctcattctctgctccgtccagaagccattgaagcctggttttatttgtatcgtgtcaccaaggacccaaaatatcaagaatggggatggtcagcgtttgaagccattgaaaaatacgcgaaagtggagactggaggatacagttcaatcgataatgtccttcggaagaaggttagaagacgtgacaagatggaatccttcttcccagctgagacgctgaagtatctgtatttgctgctggccgatgatcaggagattctgccgttggatcgatgggtattcaataccgaagcacacccattgcctctttataattga

SEQ ID NO: 58652 - protein, 522 aa, Caenorhabditis briggsae
MFLIICLVSMQLLVFLFVFLATPSDSLNPKRQRFFGTSSENCAMISTTKRKIAANKLKRAPPIFQGPSNDRQRAIVAAFQHSWTGYKKYAWGHDELLPVSKRFDDPFQLGLTIVDSLDTAIIMGLETETREGVEWIRNSLNVSPSKSVNVFETTIRVLGGLLSGYHLTGEEALLEKAAKLGDNLLNAFTKSKSPIPKSDVDLGTGAAFSPNRGYSSLAEATTLQLEFRDLSVLTGDKKYEETAFAASEHVHKTKCAEYDGLCFYHIDENGEFKKTAITLGARADSYYEYLIKQWLQTKKSIDWLRDDFLQSMKSIKNHLYRQSQPSGLWFIGEIAENDDFYPKMDHLVCFLSGSLALSHLNGLDENGEHIRMAKKIGEICHKMYQNPTGLGPEIIHFNIENRTDDVSREDSYVKSLDAHSLLRPEAIEAWFYLYRVTKDPKYQEWGWSAFEAIEKYAKVETGGYSSIDNVLRKKVRRRDKMESFFPAETLKYLYLLLADDQEILPLDRWVFNTEAHPLPLYN

SEQ ID NO: 58653 - DNA, 1926 bp, Xenopus laevis
  CDS (1)..(1926)
atgtactccccgcagcgccgggactttctgtccgtgactgtgagccaggccgagggctacaataacagcaagggctggaggagaaagtcctgctggaggaaatggaagcagctgtcgaggttccagcgcaacatcattctgttcctgtgcgttgtactcgctgtctgcaccgtggtctcattctccaacctgggcgagcactggagagccctaatcagccaatcagaagagcattatgagtcccaggatgggcctggggttaaagccgtgctgccggcccctaagagagaggaagactcagacctgatgttgctcaaacctcctgctcagaaacccaggagaccccacaaacgcggcccccccatcttgcagccaccccctacgccaggccagaaagtggaagacaacgagcagagaccggaccaagttgagaaccagcagccagtaatcagctggcgcggcgccgttatagacccagtccaaccctcggaacctactgtgaataaagtacaaaaggcgactgcagctgctccggttgccaatgaaaaggaaccagtccctatcagcgagcgtcaggaggcagtgaaggaggcattccgccatgcttggaagggctacacggagcacgcatgggggcacgatgaactgaagcccatctctaaatcctacagcgagtggttcgggctggggctgaccctcatcgatgccctggacaccatgtggatcatgggactgaaggaagagtttgagaaagcccgggagtgggtcggcaatcggctcaccttcgacaagaacgtagacgtcaacctgtttgagagcacaatccggatcctgggggggctgctgagcacgtatcacctgaccaaagaccccatcttcctagataaagctaaagacatcggtacccgcttgctgccagccttcaacactccgtccaaggttcctttctccgatgtgaacattgggcgtgggacggcccacccccctcgctggacctctgacagcaccgtggccgaagtgaccagcgtacaactggaattccgggagctgagccgaatcacaggggacgaccgcttccagaaatccgtcgatcaggtgacccagcacgtgcacagtctgcccgggaaacgggacggtctggtaccgatgttcatcaacacaaacagcggccagttcactcacctgggggtgttcactttgggcgccagagctgacagttactacgagtatctgctgaagcagtggattcagagcggcaagaaggagaatgggttcctagaagattacatgcaggctatcgagggagtgaagaagaaccttctgcggaaatcccaccccaaccagctgacgtttgtgggagaattatctcacgggcacttcagtcccaagatggaccacctggtgtgtttccttcccggaacgcttgccctaggagctcacaacggcatcacggcggatcacatggagatcgccacggccttgatggaaacctgttaccagatgtacaagcagatggagaccggcctgagccccgagatctcccacttcttcctgagcggggcacagaagggcagcaaggatatcgatgtgaagccggccgaccgtcacaacctcctgcgcccagagacggtggaaagtctcttctacttgtaccgcttcaccggtgataccaaataccaggactgggggtgggagatactgcagagctttaacaaatacacgcgggtttcaggtggcggtttcacttccatcaacaacgtacagagcaccgagaaccccgagccacgggacaagatggagagcttcttcctgggcgagaccctcaagtacctgtacctgctcttttccgacgacgtggaccttattaacctggacaagtttgtgttcaacacggaagcccacccgctgcccatctggaactcatag

SEQ ID NO: 58654 - protein, 641 aa, Xenopus laevis
MYSPQRRDFLSVTVSQAEGYNNSKGWRRKSCWRKWKQLSRFQRNIILFLCVVLAVCTVVSFSNLGEHWRALISQSEEHYESQDGPGVKAVLPAPKREEDSDLMLLKPPAQKPRRPHKRGPPILQPPPTPGQKVEDNEQRPDQVENQQPVISWRGAVIDPVQPSEPTVNKVQKATAAAPVANEKEPVPISERQEAVKEAFRHAWKGYTEHAWGHDELKPISKSYSEWFGLGLTLIDALDTMWIMGLKEEFEKAREWVGNRLTFDKNVDVNLFESTIRILGGLLSTYHLTKDPIFLDKAKDIGTRLLPAFNTPSKVPFSDVNIGRGTAHPPRWTSDSTVAEVTSVQLEFRELSRITGDDRFQKSVDQVTQHVHSLPGKRDGLVPMFINTNSGQFTHLGVFTLGARADSYYEYLLKQWIQSGKKENGFLEDYMQAIEGVKKNLLRKSHPNQLTFVGELSHGHFSPKMDHLVCFLPGTLALGAHNGITADHMEIATALMETCYQMYKQMETGLSPEISHFFLSGAQKGSKDIDVKPADRHNLLRPETVESLFYLYRFTGDTKYQDWGWEILQSFNKYTRVSGGGFTSINNVQSTENPEPRDKMESFFLGETLKYLYLLFSDDVDLINLDKFVFNTEAHPLPIWNS

SEQ ID NO: 58655 - DNA, 1932 bp, Xenopus laevis
  CDS (1)..(1932)
atgaccaccccagcccttctcccactcacagggcgccggatcccagccctgaacctcggaacttcatcctttccccaccatcgggccaccctgagactctccgagaaattcattctgcttctcatcctcagtgcctttatcaccctgtgtttcggggctttcttttttctccccgactcctccaagcacaaacgctttgacctgggcctggaggatgtgcttatcccccatatcgagtctgataaaggaggcaagaactctgggagtcttctcatccacggacaaggccacgacgggcaccgacacagggaggaggaggagcagctgagaaacaagatccgtgccgaccatgagcgggcgctagaggaggccaaagagaagctgaagaagtcgcgggatgagatccgagccgagattcagacggagaagagtaagctggtcgaagagctaaagaaaaaggataacccaccccttccacttgcccccgtccccaacctcccagagataaagaatggggatcccggggaccccgacatcagagagaaacgggacaaaattaaagagatgatgaaacatgcctgggacaattacaaacagtatggctggggccacaatgagctcaaacccattgccaggaagggccactccacaaacatatttggaaattctcagatgggagccacaattgtggatgccctggacaccctgtacattatggggctcctggatgagttcagggatggacaggagtgggtgcaaaataacctggactttggtgtgaatgccgaggtgtctgtgtttgaggtgaacatccgtttcattggtggtttgctggcagcgttctacctgtctgggcaagaggtttttaagaacaaggcagttctgctggcagagaagcttctccctgcgttcaacaccccaactggaattccgtgggctatggtgaacctcaaaaccggtgttggcaggaactggggctgggcatcggcagggagcagtatcctggcagagtttggcaccctacacctggagtttgtgcatcttagttacctgacggggaaccctgtttattataacaaggttatgcacattcggaaactcctgcagaagatggatcggcccaatggacttttccccaattacttgaatcccaggacggggcgctgggggcagcaccacacgtcggtgggaggtttgggtgacagtttctacgaatacctgctgaaggcttggctgctgtcagaccgcactgacctggaggcgcgccatatgtacgacagcgctattgacgccatagagagacacctgatccgcaagtctggagggggtctgacgtttatcggcgagtggaagaacgggcacctggagaggaagatgggtcacctgacgtgctttgcggggggcatgctggcgctgggtgctgacggctcccctggagaaaaggccggtcactacctacagctgggggctgagattgcccacacgtgccacgagtcttacgaccggacggtgctaaagttgggccccgaggcctttaagtttgatggtggagcagaggcggtggcagtgagacagaatgagaagtattacatcctgaggccggaggtcattgagacttattggtacatgtggcgctttacccacgacccaaaataccggcagtggggctgggaggctgctcaggccattgataagtactgcagggtgagtgggggattctctggaatcaaagacgtgtattcctcgtctccaacctacgatgatgttcagcagagtttcttcctggctgagaccctaaagtacctgtacctcctcttctccagtgacgacctcctgccattggataactgggtgttcaacacggaggcccacccattaccagtgatccatttgctgaacaccaccctgcctggtaaccatgtgatgcgatag

SEQ ID NO: 58656 - protein, 643 aa, Xenopus laevis
MTTPALLPLTGRRIPALNLGTSSFPHHRATLRLSEKFILLLILSAFITLCFGAFFFLPDSSKHKRFDLGLEDVLIPHIESDKGGKNSGSLLIHGQGHDGHRHREEEEQLRNKIRADHERALEEAKEKLKKSRDEIRAEIQTEKSKLVEELKKKDNPPLPLAPVPNLPEIKNGDPGDPDIREKRDKIKEMMKHAWDNYKQYGWGHNELKPIARKGHSTNIFGNSQMGATIVDALDTLYIMGLLDEFRDGQEWVQNNLDFGVNAEVSVFEVNIRFIGGLLAAFYLSGQEVFKNKAVLLAEKLLPAFNTPTGIPWAMVNLKTGVGRNWGWASAGSSILAEFGTLHLEFVHLSYLTGNPVYYNKVMHIRKLLQKMDRPNGLFPNYLNPRTGRWGQHHTSVGGLGDSFYEYLLKAWLLSDRTDLEARHMYDSAIDAIERHLIRKSGGGLTFIGEWKNGHLERKMGHLTCFAGGMLALGADGSPGEKAGHYLQLGAEIAHTCHESYDRTVLKLGPEAFKFDGGAEAVAVRQNEKYYILRPEVIETYWYMWRFTHDPKYRQWGWEAAQAIDKYCRVSGGFSGIKDVYSSSPTYDDVQQSFFLAETLKYLYLLFSSDDLLPLDNWVFNTEAHPLPVIHLLNTTLPGNHVMR

SEQ ID NO: 58657 - DNA, 2703 bp, Xenopus laevis
  CDS (1)..(2703)
atgtggctggtggtggccttctgtctgctgggacacggacatgctgctgtgaccaaggaggagaaggctcacttaaggagtcaagtgctggagatgttcgatcatgcatacggaaattatatgcaacacgcttacccagctgacgaacttatgcccttgacctgccgtggaagaatacgtggccaggaacccagcagaggggatgttgatgacgctttgggaaaattttcgctaacattaatcgacacactggacacacttgtggtgttaaacaaaaccaaggagtttgaagatgcagtccgaaaagtgattactgatgtcaatttagacaatgatatagtggtgtctgtctttgagacaaatatcagagtcttgggcggcctccttggtggacactcagttgccatcatgctgaaagaaaatggggatggcatgcagtggtacaatgatgaactcctgcacatggctaaagagcttggctataagcttctcccagcgttcaacactaccagtggccttccctaccccagaattaacttaaaatttggcatcagaaggccagaggctcggacggggacagagactgatacgtgtacagcttgcgcaggaacaatgatcttggaattcgctgcactgagccgctttactggaatatcagtatttgaggaacatgctcggaaagccctagatttcctctgggacaaaaggcagcgcagcagtaacctggtcggtgtgacaattaatatccatacaggggactgggtgcgcaaagacagcggagtgggagcaggaatagattcttactatgaatatttactgaaggcctacgttctcctgggggatgacagctatctggaaagattcaatacacactatgatgccattatgcgatacataagccagcctccactcctgcttgatgtacatatccacaaaccaatgctgacagcacggacatggatggattcactacttgcatttttccctggtctccaggtgttgaagggggatatcagacctgcaattgagactcacgaaatgctttaccaggtgataaaaaagcacaatttcctgccagaggccttcacaactgatttcagggttcactgggcccagcaccctttaagaccagagtttgctgaaagtacttatttcctctataaagccactggtgatccttactacctcgaagtgggaaaaactctgattgataatctgaataaatatgcacgggtgccatgtggattcgctgctgttaaagatgtgcggacaggaagccatgaagaccgaatggattcctttttcctggcagagatgtttaagtacctctatttgctgttctccgaaagggaagatcttatatttgatatagaagattatatattcactacagaagcacatctcctacctctctctctttccactgcaaatccgagcagcacaaagaaaaacacaactactcagtacactgaactagatgatagtaactttgattggtcctgcccaaacacccagatcctgttccgaaatgacccaatgtacgcacagaatattcgggaacctctgaaaaatgtcgttgataagaattgtcctcggagtccttctcgtctggatgagatttctggcagtggtaaaatgccacctctacgggctcgtgattttatggcctctaattcagagcatttagagatcctaaagaagatgggtgtgagtctgattcacctcaaggatggccgtgttcagttggtccaacatgccaaccaagctgcaagctctattgatgctgaggatggccttcgattcatgcaagaaatgattgagctctccagccagcagcagaaagagcagcaactgcctccccgtgccgtgcagattgtgtcccacccgttttatgggagagtcgtattaactgcgggacccgctcagtttggcatggacctttcgaaacatttagcaggggcacaagggctggtagctagagctgagccatacagcgggtgctctgatatcaccaacggacaggcaatacaaggcaagattgcactgatgcagagaggtcagtgtatgtttgctgagaaggctcgcaatgtgcagaaagctggggccattggagggattgttatagatgacaatgaaggcagcagcagtgacactgcccctctcttccaaatggctggagatgggaagagtacggatgacgtcaccatccccatgttgtttctcttcagtaaggaaggaaatatcattcttgatgccattcgtgaataccagcaggtggaggttctactttcagacaaagccaaagaccgagatttagaaagtgaaagtggagaacagaagccagtagaaaacgattcccagaaacaggcattggaagatctttttatgactccagaagaaattgcagaacttcttatagtgcatgaggaagaatcacctgtttctcagccagaggtgccaagttctgactctccatctggtggggacagaacttcagaaagagacattacaccagaaagtcaagaacataagaccgaagagactgaacacagcccgaaagacaatgttcagaccccaccagaaaactctgaagactccacagaggagaaaatggacaacaaagttcagccaatggagtcaatattggccgactggaaagaggacattgaggcctttgaaatgatggagaaggatgaactatga

SEQ ID NO: 58658 - protein, 900 aa, Xenopus laevis
MWLVVAFCLLGHGHAAVTKEEKAHLRSQVLEMFDHAYGNYMQHAYPADELMPLTCRGRIRGQEPSRGDVDDALGKFSLTLIDTLDTLVVLNKTKEFEDAVRKVITDVNLDNDIVVSVFETNIRVLGGLLGGHSVAIMLKENGDGMQWYNDELLHMAKELGYKLLPAFNTTSGLPYPRINLKFGIRRPEARTGTETDTCTACAGTMILEFAALSRFTGISVFEEHARKALDFLWDKRQRSSNLVGVTINIHTGDWVRKDSGVGAGIDSYYEYLLKAYVLLGDDSYLERFNTHYDAIMRYISQPPLLLDVHIHKPMLTARTWMDSLLAFFPGLQVLKGDIRPAIETHEMLYQVIKKHNFLPEAFTTDFRVHWAQHPLRPEFAESTYFLYKATGDPYYLEVGKTLIDNLNKYARVPCGFAAVKDVRTGSHEDRMDSFFLAEMFKYLYLLFSEREDLIFDIEDYIFTTEAHLLPLSLSTANPSSTKKNTTTQYTELDDSNFDWSCPNTQILFRNDPMYAQNIREPLKNVVDKNCPRSPSRLDEISGSGKMPPLRARDFMASNSEHLEILKKMGVSLIHLKDGRVQLVQHANQAASSIDAEDGLRFMQEMIELSSQQQKEQQLPPRAVQIVSHPFYGRVVLTAGPAQFGMDLSKHLAGAQGLVARAEPYSGCSDITNGQAIQGKIALMQRGQCMFAEKARNVQKAGAIGGIVIDDNEGSSSDTAPLFQMAGDGKSTDDVTIPMLFLFSKEGNIILDAIREYQQVEVLLSDKAKDRDLESESGEQKPVENDSQKQALEDLFMTPEEIAELLIVHEEESPVSQPEVPSSDSPSGGDRTSERDITPESQEHKTEETEHSPKDNVQTPPENSEDSTEEKMDNKVQPMESILADWKEDIEAFEMMEKDEL

SEQ ID NO: 58659 - DNA, 1737 bp, Homo sapiens
  CDS (1)..(1737)
atgcctttccggctgctcatcccgctcggcctcctgtgcgcgctgctgcctcagcaccatggtgcgccaggtcccgacggctccgcgccagatcccgcccactacagggagcgagtcaaggccatgttctaccacgcctacgacagctacctggagaatgcctttcccttcgatgagctgcgacctctcacctgtgacgggcacgacacctggggcagtttttctctgactctaattgatgcactggacaccttgctgattttggggaatgtctcagaattccaaagagtggttgaagtgctccaggacagcgtggactttgatattgatgtgaacgcctctgtgtttgaaacaaacattcgagtggtaggaggactcctgtctgctcatctgctctccaagaaggctggggtggaagtagaggctggatggccctgttccgggcctctcctgagaatggctgaggaggcggcccgaaaactcctcccagcctttcagacccccactggcatgccatatggaacagtgaacttacttcatggcgtgaacccaggagagacccctgtcacctgtacggcagggattgggaccttcattgttgaatttgccaccctgagcagcctcactggtgacccggtgttcgaagatgtggccagagtggctttgatgcgcctctgggagagccggtcagatatcgggctggtcggcaaccacattgatgtgctcactggcaagtgggtggcccaggacgcaggcatcggggctggcgtggactcctactttgagtacttggtgaaaggagccatcctgcttcaggataagaagctcatggccatgttcctagagtataacaaagccatccggaactacacccgcttcgatgactggtacctgtgggttcagatgtacaaggggactgtgtccatgccagtcttccagtccttggaggcctactggcctggtcttcagagcctcattggagacattgacaatgccatgaggaccttcctcaactactacactgtatggaagcagtttggggggctcccggaattctacaacattcctcagggatacacagtggagaagcgagagggctacccacttcggccagaacttattgaaagcgcaatgtacctctaccgtgccacgggggatcccaccctcctagaactcggaagagatgctgtggaatccattgaaaaaatcagcaaggtggagtgcggatttgcaacaatcaaagatctgcgagaccacaagctggacaaccgcatggagtcgttcttcctggccgagactgtgaaatacctctacctcctgtttgacccaaccaacttcatccacaacaatgggtccaccttcgacacggtgatcaccccctatggggagtgcatcctgggggctggggggtacatcttcaacacagaagctcaccccatcgaccctgccgccctgcactgctgccagaggctgaaggaagagcagtgggaggtggaggacttgatgagggaattctactctctcaaacggagcaggtcgaaatttcagaaaaacactgttagttcggggccatgggaacctccagcaaggccaggaacactcttctcaccagaaaaccatgaccaggcaagggagaggaagcctgccaaacagaaggtcccacttctcagctgccccagtcagcccttcacctccaagttggcattactgggacaggttttcctagactcctcataa

SEQ ID NO: 58660 - protein, 578 aa, Homo sapiens [sequence omitted]

SEQ ID NO: 58661 - DNA, 2028 bp, Mus musculus
  CDS (1)..(2028)
atgcggggaggcggtcggctggggacgcgcccggcgcttcaaaataatgcccgcggcggacgcgcgaccatgcaatggcgagcgcttgtcctggggctggtgctgctgcgcctcggcctccacgcggtgctctggttggtcttcgggctggggcccagcatgggcttctaccagcggtttccgctcagcttcggcttccagcgcttgagggaccccgacggctcggggccagttggtccgcccggaggcccggcctggcttcatcggccaaggcgcggaacggaggggcggcttgagaccccgccagagccgggaccgacgccgggaccgggcgtgtgcggcccggcgcactggggctatgccctgggcggcggtggctgcggcccggacgagtacgagcggcgctacagcggcgccttcccgccgcagctgcgtgcccagatgcgcgacctggcgcggggcatgttcgtcttcggctatgacaactacatggcgcacgcctttccgcaggacgagctcaaccccatctactgccgcggccgggggcctgaccgcggagacccttccaatctgaacatcaatgatgtcctagggaattactctctgactctggttgatgccttggatacattggcaataatgggaaattcatccgagttccagaaggcagtcaagttagtgatcaacactgtttcatttgacaaagattccacagtccaggtcttcgaagctacgataagggttctgggaagcctcctttctgctcacagaataataactgattccaaacagccctttggtgacatgacaattgaggattatgataatgaattgttgtacatggcccatgacttggctgtgcggctccttccagcctttgaaaacaccaagacagggatcccctatcctcgggtgaatctgaagacaggtgttcctcctgacagcaataatgagacctgcacagcgggggccggttctctcctggtggaatttgggattctgagccgcctgctgggggattccacttttgagtgggttgccagacgagctgtgaaagccctctggaacttgcggagcaacgatacaggattattaggcaatgttgtgaacatccagacaggccattgggttggaaagcagagtggcttgggtgctgggctggattccttctatgagtacctcttgaaatcttacattctttttggagaaaaagaagatctagagatgtttaatgctgcgtatcagagcatccagagctacctgcgaagaggccgggaagcctgcaatgaaggagaaggagacccaccgctctacgtcaacgtgaacatgttcagtgggcagctcatgaacacctggattgactcactgcaggctttcttccctggactgcaggttctgataggggatgtggaagatgccatctgcctacacgccttctactatgccatatggaagcggtacggggccctccctgagcgctataactggcaactccaggcccctgatgttctcttctaccctctgagaccagagctagtggagtccacatatctcctctaccaggcaaccaagaatcccttctacctccatgtaggaatggacattctgcagagtcttgaaaaatacacaaaagtcaaatgtggatatgctacgctgcatcacgtcatagacaagtctaaagaagaccggatggaaagcttctttctcagcgagacttgcaaatacttgtatctgctatttgatgaagagaatccagtacacaaatctggaaccagatacatgtttacaactgagggccatatcatatctgtggacaaacgtcttcgggaattgccttggaaggaattcttctctgaagatggggagcgggaccaagaggaaaagtttgtacacagacctaagtctcaggagctcagagtcattaactccagttctaattgtaatcgtgttcctgatgagaggagatactccttgcccttaaagagcatctacatgcgccagatcgaccagatggttggcttgatttga

SEQ ID NO: 58662 - protein, 675 aa, Mus musculus
MRGGGRLGTRPALQNNARGGRATMQWRALVLGLVLLRLGLHAVLWLVFGLGPSMGFYQRFPLSFGFQRLRDPDGSGPVGPPGGPAWLHRPRRGTEGRLETPPEPGPTPGPGVCGPAHWGYALGGGGCGPDEYERRYSGAFPPQLRAQMRDLARGMFVFGYDNYMAHAFPQDELNPIYCRGRGPDRGDPSNLNINDVLGNYSLTLVDALDTLAIMGNSSEFQKAVKLVINTVSFDKDSTVQVFEATIRVLGSLLSAHRIITDSKQPFGDMTIEDYDNELLYMAHDLAVRLLPAFENTKTGIPYPRVNLKTGVPPDSNNETCTAGAGSLLVEFGILSRLLGDSTFEWVARRAVKALWNLRSNDTGLLGNVVNIQTGHWVGKQSGLGAGLDSFYEYLLKSYILFGEKEDLEMFNAAYQSIQSYLRRGREACNEGEGDPPLYVNVNMFSGQLMNTWIDSLQAFFPGLQVLIGDVEDAICLHAFYYAIWKRYGALPERYNWQLQAPDVLFYPLRPELVESTYLLYQATKNPFYLHVGMDILQSLEKYTKVKCGYATLHHVIDKSKEDRMESFFLSETCKYLYLLFDEENPVHKSGTRYMFTTEGHIISVDKRLRELPWKEFFSEDGERDQEEKFVHRPKSQELRVINSSSNCNRVPDERRYSLPLKSIYMRQIDQMVGLI

SEQ ID NO: 58663 - DNA, 1722 bp, Brachydanio rerio
  CDS (1)..(1722)
atgttgtattatttacctctgttcacatctcgttacttcatgcttactttccttttctccgccattttctgcgccgcgtacctgtctccgatcatcagtcatgttaaaggcagagactttactgagcaggaaatgtctcattacagggacagagtaaagtccatgttttatcatgcatataacagctatctggacaatgcgtatccatatgatgagctgaggccgctgacctgtgatggacaggacacctggggcagtttctccctcacactcatagatgctctggacacattgctgattctaggaaaccacacagagtttcagcgtgtggccactctgcttcaggacactgttgacttcgacatcgacgtcaatgcgtctgtgtttgagacaaatatacgagtggtcggtgggcttctctcggctcatctgctctccaagcgtgctgggatgaaggtggaggagggctggccctgctctggaccccttctgcgcatggcagaggacgccgctcgaaaactgcttcctgctttccagacgcccacagggatgccgtatggaacagtaaacctgctgcggggagtgaaccccggcgaaacccctgtcacctgcaccgccggagtgggcaccttcatcctagagttttccaccctcagtcgactcaccggtgaccctgtgttcgagaatgtggcccgcaaagctctcagggccttatggagaacgcgctctgacatcggcctggtgggcaatcacatagatgtcataacctcgaagtgggtcgctcaggacgcagggattggagcaggagttgattcatatttcgaatatcttgtaaggggtgccatcatgcttcaagatgaggagctgttgacaatgttctatgaatttgataagtccataaagaactacactaagtttgatgattggtatctgtgggtgcagatgcataaaggaacagtatcaatgcctgtgtttcagtctctggaggcgttctggcctggaatgcagagtttaataggtgatatttccagtgctacaaagagcttccacaactactacagcgtgtggcggcagtttggaggtcttccagaattctacagcattcctcaaggttacacagtggacaagcgagagggatatccactgcggccagagttaatagagagcgcaatgtatctgtataaggccactggggacccttcattcatccagcttggccgagatgcagtggagtccattgacagaatcagccgggtcaactgtggttttgccactgtgaaggatgtaagggaccacaagttggacaaccgcatggaatccttcttcctagccgagaccattaaatacctctacctcctcttcgatcctgacaacttccttcacaacacgggcacagagtttgagctggggggtctgcggggtgactgtattctcagcgcggggggctatgtgttcaacacagaggctcatccgctggaccccgccgcactccactgctgcagccgagagcagcaggaccgcagggagattcaggacatcctcctcagcttctcgcagccgcatacagaggagccatcacgggaccagagcgcaggtggctctccggagagcattgcactgaagccgggagagcagaggaaagcgccggtgctctcctgccctacgcagcccttcagtgccaaactggccgtcatgggtcaggtcttctctgacaactcttga

SEQ ID NO: 58664 - protein, 573 aa, Brachydanio rerio
MLYYLPLFTSRYFMLTFLFSAIFCAAYLSPIISHVKGRDFTEQEMSHYRDRVKSMFYHAYNSYLDNAYPYDELRPLTCDGQDTWGSFSLTLIDALDTLLILGNHTEFQRVATLLQDTVDFDIDVNASVFETNIRVVGGLLSAHLLSKRAGMKVEEGWPCSGPLLRMAEDAARKLLPAFQTPTGMPYGTVNLLRGVNPGETPVTCTAGVGTFILEFSTLSRLTGDPVFENVARKALRALWRTRSDIGLVGNHIDVITSKWVAQDAGIGAGVDSYFEYLVRGAIMLQDEELLTMFYEFDKSIKNYTKFDDWYLWVQMHKGTVSMPVFQSLEAFWPGMQSLIGDISSATKSFHNYYSVWRQFGGLPEFYSIPQGYTVDKREGYPLRPELIESAMYLYKATGDPSFIQLGRDAVESIDRISRVNCGFATVKDVRDHKLDNRMESFFLAETIKYLYLLFDPDNFLHNTGTEFELGGLRGDCILSAGGYVFNTEAHPLDPAALHCCSREQQDRREIQDILLSFSQPHTEEPSRDQSAGGSPESIALKPGEQRKAPVLSCPTQPFSAKLAVMGQVFSDNS

SEQ ID NO: 58665 - DNA, 1803 bp, Brachydanio rerio
  CDS (1)..(1803)
atggcattcgctcgcacgcacgcgcagtgtgtgcacttcctattattattattgtatagtatttgtgcacctccatgtagccgggaattattgtattatttacctctgttcacatctcgttacttcatgcttactttccttttctccgccattttctgcgccgcgtacctgtctccgatcatcagtcatgttaaaggcagagactttactgagcaggaaatgtctcattacagggacagagtaaagtccatgttttatcatgcatataacagctatccggacaatgcatatccatatgatgagctgaggccgctgacctgtgatggacaggacacctggggcagtttctccctcacactcatagatgctctggacacattgctgattctaggaaaccacacagagtttcagcgtgtggccactctgcttcaggacactgttgacttcgacatcgacgtcaatgcgtctgtgtttgagacaaatatacgagtggtcggtgggcttctctcggctcatctgctctccaagcgtgctgggatgaaggtggaggagggctggccctgctctggaccccttctgcgcatggcagaggacgccgctcgaaaactgcttcctgctttccagacgcccacagggatgccgtatggaacagtaaacctgctgcggggagtgaaccccggcgaaacccctgtcacctgcaccgccggagtgggcaccttcatcctagagttttccaccctcagtcgactcaccggtgaccctgtgttcgagaatgttgcccgcaaagctctcagggccttatggagaacgcgctctgacatcggcctggtgggcaatcacatagatgtcataacctcgaagtgggtcgctcaggatgcaggcattggagcaggagttgattcatatttcgaatatcttgttaagggtgccatcatgcttcaagatgagaagctgttgacaatgttttatgaatttgataagtccataaagaactacactaagtttgatgattggtatctgtgggtgcagatgcataaaggaacagtatcaatgcctgtgtttcagtctttggaggcgttctggcctggaatgcagagtttaataggtgatatttccagtgctacaaagagcttccacaactactacagcgtgtggcggcagtttggaggtctcccagaattctacagcattcctcaaggttacacagtggacaagcgagagggatatccactgcggccagagttaatagagagcgcaatgtatctgtataaggccactggagacccttcaatcatccaacttggccgagatgcagtggagtccattgacagaatcagccgggtcaactgtggctttgccactgatgtaagggaccacaagttggacaaccgcatggaatccttcttcctagccgagaccattaaatacctctacctcctcttcgatcctgacaacttccttcacaacacgggcacagagtttgagctggggggtctgcggggtgactgtattctcagcgcggggggctatgtgttcaacacagaggctcatccgctggaccccgccgcactccactgctgcagccgagagcagcaggaccgcagggagattcaggacatcctcctcagcttctcgcagccgcaaacagaggagccaccacgggaccagaacgcaggtggctctccggagagcattgcactgaagccgggagagcagaggaaagcgccggtgctctcctgccctacgcagccctttagtgccaaactggccgtcatgggtcaggtcttctctgacaactcttga

SEQ ID NO: 58666 - protein, 600 aa, Brachydanio rerio
MAFARTHAQCVHFLLLLLYSICAPPCSRELLYYLPLFTSRYFMLTFLFSAIFCAAYLSPIISHVKGRDFTEQEMSHYRDRVKSMFYHAYNSYPDNAYPYDELRPLTCDGQDTWGSFSLTLIDALDTLLILGNHTEFQRVATLLQDTVDFDIDVNASVFETNIRVVGGLLSAHLLSKRAGMKVEEGWPCSGPLLRMAEDAARKLLPAFQTPTGMPYGTVNLLRGVNPGETPVTCTAGVGTFILEFSTLSRLTGDPVFENVARKALRALWRTRSDIGLVGNHIDVITSKWVAQDAGIGAGVDSYFEYLVKGAIMLQDEKLLTMFYEFDKSIKNYTKFDDWYLWVQMHKGTVSMPVFQSLEAFWPGMQSLIGDISSATKSFHNYYSVWRQFGGLPEFYSIPQGYTVDKREGYPLRPELIESAMYLYKATGDPSIIQLGRDAVESIDRISRVNCGFATDVRDHKLDNRMESFFLAETIKYLYLLFDPDNFLHNTGTEFELGGLRGDCILSAGGYVFNTEAHPLDPAALHCCSREQQDRREIQDILLSFSQPQTEEPPRDQNAGGSPESIALKPGEQRKAPVLSCPTQPFSAKLAVMGQVFSDNS

SEQ ID NO: 58667 - DNA, 3132 bp, Dictyostelium discoideum
  CDS (1)..(3132)
atgataaggaatttaactttattatcaaaaagttcattagatccaaaatgtttaatcttaaaacattcaaacaaaaacctcaataattatttcaaacaaataacatttcgttattatagtaaaaccaacccaatcattaaacaacaaaatcataataatattaataactataataatacaacaccagaaactcaagaaagaattaatgaattattaaaattattccctccaataaagtatggatttgcatatggttcaggtgtaatttcacaaaaaggttacaatagaaatggtgatggatcaacctcaactgaaaatccatcaaaaaaagaagaacaatcaccaatgattgatttaatatttgctgttgaaaactcaactaaatggcattctctcaatcttgtaaataatcaatcacattattcttttcttggtttgatgggtgctcatatagttgcaaaagttcaatatatgaatgctaaaatttattttaatacattattagaacataatggaattaaatttaaatatggtgttattgaatataaagatttaatagatgatttaaagaattggaaaacattatatttatcaggtagaatgcaaaaaccaattttcaatttaccaacatcaagtacagaaggattgaaagagattcaagagattaatagtgaatataatttaaaaaatgctgtaatcacatcattattaatgttacctgaaacatttacagagtatgatctttatcatacaatctcaaaactatcctatagtggtgatataagaatgaaaggtgctgaaaatccaatgaaaactcataatatcacaacaacaacagcagcaccaaaaatggttacattcaaatcaaaacaagatccaatgaattatttaaatttattaatgatgctaccaggaagtattaaatcaacaatgttaaaagaagttagaaataatatgaaattgatgaaatctgatgaaaaaattgatccaacaatacttcacaatttaatatttatgattgtttcaaaaagtagtttcgctcaaacagtaaaaggtcaaatggataatagatcaccaaatggaataacaaaaaatattactctattggtgcctatactattattgtctttaatgccaatagtagtatcatcaacatctgattttaataattcacaacatttttatatcccgaccccaattttaaaagaaagattaaaatcagatgttaaaagaatgttttatcatggatatgataattatattaaatatagttttccaaaggatgaattaaatccaataagttgtagtggtaccaatacatttggagattatgcattaacgtttatagatagtttagatgcattagtagttttaggagatttaaaagaatttgaaagagcaattaaatgggtatcagagaatattagatttgataagaatttaacggtatcagtatttgaaacgaatattcgtgttttaggtggactattatcagcacatttattagcagaggaacatttacaaccaaatagttatgatggttcattattaccattagcaaaggatttaggtgatagattattgaaagcatttgaaacaccaactggtataccgtatggtgctgtcaatctaaagtatggtgtgcccagtggtgaaattgcaattacaagtacagcttcagcaaccacattctcattagagtttggaatattatcgcgacttacaaatgacaggaaatatgatgatgccgcaagaaaggctgttaggtcaatttggaagtataggtcggatttggagttggtgggtaatcatatcaatatcatcaatggtgagtggacgattaaggaagcgggcattggtacaggtgtggactcattctatgagtacctctacaaatcggcaatctatttcgatgatgatgaatatttaagtttattcgagaagaattacaagttaatcaataaatacattaaaaaggacccatggtatgtcgatgtttcaattgatcgtgcatccatagtttggccaatctacaatagtttacaatcgttttggcccggtattcaatcgatgtatggtgattatgagaatgctttctctacaattaaatcatttcatatcgtgtggcgtcgttatggtttcatacctgagggttataatctattgtctggcaatgttcaacctggtcaaaaggggtacccactcagacctgaattggctgaatctttatatcacatgtatcaaactaacaaggatccaatattcattagaatggcaaaagatttggtttggacaatctccaatgtaaccacaaccaaatgtggtcatgccaatatactcgatgttgaatctcatcaattggatgatcgtatggaatctttctttctttcagaaacttgtaaataccttttcttactattcaatagtatagataactataatggaactgatattcatagtgattcaacaacctattcaaatcctaatccaatcgatattgaaaattcaatattcaataccgaaggtcatatatttccaatgcaatcaagattttttaaaaaatttacaaccactactaatgatatttccgatataaatttaattaaaaaagaaaataataataataatagtaataaagaaaaagatattattaaaaataataataataataataataataataataataataacaataatcaaaaaaataaaaataataaaaataataatgaagaagataattttagtgttaataaaataaacgataatgtaaatgataatgaaaaaaaagaagttgtaaaagtaaataataataataataataataataataataataataataataataataataataataataataataataataataataataataataataataataataataataataataataataataataataataaaaaaaataataataataataataatttactattaagttacgatagtactttagaaaaagcaaattggacttgcgaaccattaccatttttaagaagaatatcatctggtactttccaatttattgggggtcctcaagatattgaatggtttgaagataaaaagatcagagatgcgatgtttgatcttacaacttaa

SEQ ID NO: 58668 - protein, 1043 aa, Dictyostelium discoideum
MIRNLTLLSKSSLDPKCLILKHSNKNLNNYFKQITFRYYSKTNPIIKQQNHNNINNYNNTTPETQERINELLKLFPPIKYGFAYGSGVISQKGYNRNGDGSTSTENPSKKEEQSPMIDLIFAVENSTKWHSLNLVNNQSHYSFLGLMGAHIVAKVQYMNAKIYFNTLLEHNGIKFKYGVIEYKDLIDDLKNWKTLYLSGRMQKPIFNLPTSSTEGLKEIQEINSEYNLKNAVITSLLMLPETFTEYDLYHTISKLSYSGDIRMKGAENPMKTHNITTTTAAPKMVTFKSKQDPMNYLNLLMMLPGSIKSTMLKEVRNNMKLMKSDEKIDPTILHNLIFMIVSKSSFAQTVKGQMDNRSPNGITKNITLLVPILLLSLMPIVVSSTSDFNNSQHFYIPTPILKERLKSDVKRMFYHGYDNYIKYSFPKDELNPISCSGTNTFGDYALTFIDSLDALVVLGDLKEFERAIKWVSENIRFDKNLTVSVFETNIRVLGGLLSAHLLAEEHLQPNSYDGSLLPLAKDLGDRLLKAFETPTGIPYGAVNLKYGVPSGEIAITSTASATTFSLEFGILSRLTNDRKYDDAARKAVRSIWKYRSDLELVGNHINIINGEWTIKEAGIGTGVDSFYEYLYKSAIYFDDDEYLSLFEKNYKLINKYIKKDPWYVDVSIDRASIVWPIYNSLQSFWPGIQSMYGDYENAFSTIKSFHIVWRRYGFIPEGYNLLSGNVQPGQKGYPLRPELAESLYHMYQTNKDPIFIRMAKDLVWTISNVTTTKCGHANILDVESHQLDDRMESFFLSETCKYLFLLFNSIDNYNGTDIHSDSTTYSNPNPIDIENSIFNTEGHIFPMQSRFFKKFTTTTNDISDINLIKKENNNNNSNKEKDIIKNNNNNNNNNNNNNNNQKNKNNKNNNEEDNFSVNKINDNVNDNEKKEVVKVNNNNNNNNNNNNNNNNNNNNNNNNNNNNNNNNNNNNNNNNNNNKKNNNNNNNLLLSYDSTLEKANWTCEPLPFLRRISSGTFQFIGGPQDIEWFEDKKIRDAMFDLTT

SEQ ID NO: 58669 - DNA, 1894 bp, Mus musculus
  CDS (84)..(1817)
gggaagaaccagccgcggctcggaggatgagctggtggcggtggctgcagctgctgcggcggcactgacaggacacgagctctatgcctttccggctactcatcccgctcggcctcgtgtgcgtgctgctacccctgcaccatggtgcgccaggccccgacggcaccgcgcccgaccccgcccactacagggagcgagtcaaggccatgttctaccacgcctacgacagttacctggaaaatgcctttccctacgatgagctgagacctctcacctgtgatgggcacgacacctggggcagtttttctctgacgctaattgatgccctggacaccttgctgattttggggaatacctctgaattccaaagagtagtggaggttcttcaggacaatgtggactttgatatcgacgtgaacgcctctgtgttcgaaaccaacatccgagtggtaggaggactcctttctgctcatctcttgtcaaagaaggccggtgtggaggtggaagccgggtggccttgttctgggcctctcctcaggatggcggaggaagcagcccggaaactcctcccagcatttcagacccccacgggcatgccctatggaactgtgaacctgcttcatggcgtgaaccctggagagacccctgttacctgtacagcagggattgggaccttcattgtggaatttgctaccctgagcagcctcaccggtgaccctgtgtttgaagatgtggccagagtggccctgatgcgtctctgggagagccggtcagatatcgggctggttggcaatcacatcgatgtgctcactggcaagtgggtggcccaggatgcaggcatcggggctggtgtggattcctattttgagtacctggtaaaaggagccatccttcttcaggataagaaactcatggccatgttcctagagtacaacaaagccatccggaattacacgcacttcgatgactggtacctctgggtgcagatgtacaaggggaccgtgtcaatgcctgtcttccagtccttggaggcctactggcctggccttcagagccttattggagacattgacaatgccatgaggacctttctcaactactacactgtatggaagcagtttggggggctgccagaattctacaacattcctcagggatacacagtggagaagcgagaaggctacccactccgaccggagctcatcgagagcgcaatgtacctctaccgcgccactggggatcccactctcttagaacttgggagagacgctgtggaatccattgagaaaatcagcaaggtggagtgtggatttgccacgatcaaggacctccgggaccacaagcttgacaaccgcatggagtctttcttcctggctgaaactgtgaaatacctctatcttctgttccacccaaacaacttcatccacaacaatggctccacctttgactctgtgatgactccccatggggagtgcatcctaggagccgggggctacatcttcaacacggaggctcaccccattgaccctgctgccttgcactgctgccggaggctcaaggaggagcagtgggaagtggaggacttgataaaggagttgtactccctcaaacagagcaggccaaagagagctcagaggaagacagtgaggtcggggccctgggagccccagtcagggccagccacgctctcctcacctgcaaaccagcccagggagaagcagcctgcccagcagcgaaccccgcttctcagctgccccagccagcccttcacctctaagctggcattgctaggccaggttttcctagactcctcatagccactggataattttctaatttttatttttttgagactaagctctaataataaatctgcttttggctatcaggtttt

SEQ ID NO: 58670 - protein, 577 aa, Mus musculus
MPFRLLIPLGLVCVLLPLHHGAPGPDGTAPDPAHYRERVKAMFYHAYDSYLENAFPYDELRPLTCDGHDTWGSFSLTLIDALDTLLILGNTSEFQRVVEVLQDNVDFDIDVNASVFETNIRVVGGLLSAHLLSKKAGVEVEAGWPCSGPLLRMAEEAARKLLPAFQTPTGMPYGTVNLLHGVNPGETPVTCTAGIGTFIVEFATLSSLTGDPVFEDVARVALMRLWESRSDIGLVGNHIDVLTGKWVAQDAGIGAGVDSYFEYLVKGAILLQDKKLMAMFLEYNKAIRNYTHFDDWYLWVQMYKGTVSMPVFQSLEAYWPGLQSLIGDIDNAMRTFLNYYTVWKQFGGLPEFYNIPQGYTVEKREGYPLRPELIESAMYLYRATGDPTLLELGRDAVESIEKISKVECGFATIKDLRDHKLDNRMESFFLAETVKYLYLLFHPNNFIHNNGSTFDSVMTPHGECILGAGGYIFNTEAHPIDPAALHCCRRLKEEQWEVEDLIKELYSLKQSRPKRAQRKTVRSGPWEPQSGPATLSSPANQPREKQPAQQRTPLLSCPSQPFTSKLALLGQVFLDSS

SEQ ID NO: 58671 - DNA, 1915 bp, Mus musculus
  CDS (75)..(1808)
gagccgcggctcggaggatgagctggtggcggtggctgcagctgctgcggcggcactgacaggacacgagctctatgcctttccggctactcatcccgctcggcctcgtgtgcgtgctgctacccctgcaccatggtgcgccaggccccgacggcaccgcgcccgaccccgcccactacagggagcgagtcaaggccatgttctaccacgcctacgacagttacctggaaaatgcctttccctacgatgagctgagacctctcacctgtgatgggcacgacacctggggcagtttttctctgacgctaattgatgccctggacaccttgctgattttggggaatacctctgaattccaaagagtagtggaggttcttcaggacaatgtggactttgatatcgacgtgaacgcctctgtgttcgaaaccaacatccgagtggtaggaggactcctttctgctcatctcttgtcaaagaaggccggtgtggaggtggaagccgggtggccttgttctgggcctctcctcaggatggcggaggaagcagcccggaaactcctcccagcatttcagacccccacgggcatgccctatggaactgtgaacctgcttcatggcgtgaaccctggagagacccctgttacctgtacagcagggattgggaccttcattgtggaatttgctaccctgagcagcctcaccggtgaccctgtgtttgaagatgtggccagagtggccctgatgcgtctctgggagagccggtcagatatcgggctggttggcaatcacatcgatgtgctcactggcaagtgggtggcccaggatgcaggcatcggggctggtgtggattcctattttgagtacctggtaaaaggagccatccttcttcaggataagaaactcatggccatgttcctagagtacaacaaagccatccggaattacacgcacttcgatgactggtacctctgggtgcagatgtacaaggggaccgtgtcaatgcctgtcttccagtccttggaggcctactggcctggccttcagagccttattggagacattgacaatgccatgaggacctttctcaactactacactgtatggaagcagtttggggggctgccagaattctacaacattcctcagggatacacagtggagaagcgagaaggctacccactccgaccggagctcatcgagagcgcaatgtacctctaccgcgccactggggatcccactctcttagaacttgggagagacgctgtggaatccattgagaaaatcagcaaggtggagtgtggatttgccacgatcaaggacctccgggaccacaagcttgacaaccgcatggagtctttcttcctggctgaaactgtgaaatacctctatcttctgttccacccaaacaacttcatccacaacaatggctccacctttgactctgtgatgactccccatggggagtgcatcctaggagccgggggctacatcttcaacacggaggctcaccccattgaccctgctgccttgcactgctgccggaggctcaaggaggagcagtgggaagtggaggacttgataaaggagttctactccctcaaacagagcaggccaaagagagctcagaggaagacagtgaggtcggggccctgggagccccagtcagggccagccacgctctcctcacctgcaaaccagcccagggagaagcagcctgcccagcagcgaaccccgcttctcagctgccccagccagcccttcacctctaagctggcattgctaggccaggttttcctagactcctcatagccactggataattttctaatttttatttttttgagactaagctctaataataaatctgcttttggctatcaggttttacatgctggattcttgataaaatttcactt

SEQ ID NO: 58672 - protein, 577 aa, Mus musculus
MPFRLLIPLGLVCVLLPLHHGAPGPDGTAPDPAHYRERVKAMFYHAYDSYLENAFPYDELRPLTCDGHDTWGSFSLTLIDALDTLLILGNTSEFQRVVEVLQDNVDFDIDVNASVFETNIRVVGGLLSAHLLSKKAGVEVEAGWPCSGPLLRMAEEAARKLLPAFQTPTGMPYGTVNLLHGVNPGETPVTCTAGIGTFIVEFATLSSLTGDPVFEDVARVALMRLWESRSDIGLVGNHIDVLTGKWVAQDAGIGAGVDSYFEYLVKGAILLQDKKLMAMFLEYNKAIRNYTHFDDWYLWVQMYKGTVSMPVFQSLEAYWPGLQSLIGDIDNAMRTFLNYYTVWKQFGGLPEFYNIPQGYTVEKREGYPLRPELIESAMYLYRATGDPTLLELGRDAVESIEKISKVECGFATIKDLRDHKLDNRMESFFLAETVKYLYLLFHPNNFIHNNGSTFDSVMTPHGECILGAGGYIFNTEAHPIDPAALHCCRRLKEEQWEVEDLIKEFYSLKQSRPKRAQRKTVRSGPWEPQSGPATLSSPANQPREKQPAQQRTPLLSCPSQPFTSKLALLGQVFLDSS

SEQ ID NO: 58673 - DNA, 1856 bp, Mus musculus
  CDS (53)..(1786)
gggatggcggtggctgcagctgctgcggcggcactgacaggacacgagctctatgcctttccggctactcatcccgctcggcctcgtgtgcgtgctgctacccctgcaccatggtgcgccaggccccgacggcaccgcgcccgaccccgcccactacagggagcgagtcaaggccatgttctaccacgcctacgacagttacctggaaaatgcctttccctacgatgagctgagacctctcacctgtgatgggcacgacacctggggcagtttttctctgacgctaattgatgccctggacaccttgctgattttggggaatacctctgaattccaaagagtagtggaggttcttcaggacaatgtggactttgatatcgacgtgaacgcctctgtgttcgaaaccaacatccgagtggtaggaggactcctttctgctcatctcttgtcaaagaaggccggtgtggaggtggaagccgggtggccttgttctgggcctctcctcaggatggcggaggaagcagcccggaaactcctcccagcatttcagacccccacgggcatgccctatggaactgtgaacctgcttcatggcgtgaaccctggagagacccctgttacctgtacagcagggattgggaccttcattgtggaatttgctaccctgagcagcctcaccggtgaccctgtgtttgaagatgtggccagagtggccctgatgcgtctctgggagagccggtcagatatcgggctggttggcaatcacatcgatgtgctcactggcaagtgggtggcccaggatgcaggcatcggggctggtgtggattcctattttgagtacctggtaaaaggagccatccttcttcaggataagaaactcatggccatgttcctagagtacaacaaagccatccggaattacacgcacttcgatgactggtacctctgggtgcagatgtacaaggggaccgtgtcaatgcctgtcttccagtccttggaggcctactggcctggccttcagagccttattggagacattgacaatgccatgaggacctttctcaactactacactgtatggaagcagtttggggggctgccagaattctacaacattcctcagggatacacagtggagaagcgagaaggctacccactccgaccggagctcatcgagagcgcaatgtacctctaccgcgccactggggatcccactctcttagaacttgggagagacgctgtggaatccattgagaaaatcagcaaggtggagtgtggatttgccacgatcaaggacctccgggaccacaagcttgacaaccgcatggagtctttcttcctggctgaaactgtgaaatacctctatcttctgttccacccaaacaacttcatccacaacaatggctccacctttgactctgtgatgactccccatggggagtgcatcctaggagccgggggctacatcttcaacacggaggctcaccccattgaccctgctgccttgcactgctgccggaggctcaaggaggagcagtgggaagtggaggacttgataaaggagttctactccctcaaacagagcaggccaaagagagctcagaggaagacagtgaggtcggggccctgggagccccagtcagggccagccacgctctcctcacctgcaaaccagcccagggagaagcagcctgcccagcagcgaacccccgttctcagctgccccagccagcccttcacctctaagctggcattgctaggccaggttttcctagactcctcatagccactggataattttctaatttttatttttttgagactaagctctaataataaatctgcttttggctatc

SEQ ID NO: 58674 - protein, 577 aa, Mus musculus
MPFRLLIPLGLVCVLLPLHHGAPGPDGTAPDPAHYRERVKAMFYHAYDSYLENAFPYDELRPLTCDGHDTWGSFSLTLIDALDTLLILGNTSEFQRVVEVLQDNVDFDIDVNASVFETNIRVVGGLLSAHLLSKKAGVEVEAGWPCSGPLLRMAEEAARKLLPAFQTPTGMPYGTVNLLHGVNPGETPVTCTAGIGTFIVEFATLSSLTGDPVFEDVARVALMRLWESRSDIGLVGNHIDVLTGKWVAQDAGIGAGVDSYFEYLVKGAILLQDKKLMAMFLEYNKAIRNYTHFDDWYLWVQMYKGTVSMPVFQSLEAYWPGLQSLIGDIDNAMRTFLNYYTVWKQFGGLPEFYNIPQGYTVEKREGYPLRPELIESAMYLYRATGDPTLLELGRDAVESIEKISKVECGFATIKDLRDHKLDNRMESFFLAETVKYLYLLFHPNNFIHNNGSTFDSVMTPHGECILGAGGYIFNTEAHPIDPAALHCCRRLKEEQWEVEDLIKEFYSLKQSRPKRAQRKTVRSGPWEPQSGPATLSSPANQPREKQPAQQRTPVLSCPSQPFTSKLALLGQVFLDSS

SEQ ID NO: 58675 - DNA, 1869 bp, Mus musculus
  CDS (1)..(1869)
atgggcttctaccagcggtttccgctcagcttcggcttccagcgcttgagggaccccgacggctcggggccagttggtccgcccggaggcccggcctggcttcatcggccaaggcgcggaacggaggggcggcttgagaccccgccagagccgggaccgacgccgggaccgggcgtgtgcggcccggcgcactggggctatgccctgggcggcggtggctgcggcccggacgagtacgagcggcgctacagcggcgccttcccgccgcagctgcgtgcccagatgcgcgacctggcgcggggcatgttcgtcttcggctatgacaactacatggcgcacgcctttccgcaggacgagctcaaccccatctactgccgcggccgggggcctgaccgcggagacccttccaatctgaacatcaatgatgtcctagggaattactctctgactctggttgatgccttggatacattggcaataatgggaaattcatccgagttccagaaggcagtcaagttagtgatcaacactgtttcatttgacaaagattccacagtccaggtcttcgaagctacgataagggttctgggaagcctcctttctgctcacagaataataactgattccaaacagccctttggtgacatgacaattgaggattatgataatgaattgttgtacatggcccatgacttggctgtgcggctccttccagcctttgaaaacaccaagacagggatcccctatcctcgggtgaatctgaagacaggtgttcctcctgacagcaataatgagacctgcacagcgggggccggttctctcctggtggaatttgggattctgagccgcctgctgggggattccacttttgagtgggttgccagacgagctgtgaaagccctctggaacttgcggagcaacgatacaggattattaggcaatgttgtgaacatccagacaggccattgggttggaaagcagagtggcttgggtgctgggctggattccttctatgagtacctcttgaaatcttacattctttttggagaaaaagaagatctagagatgtttaatgctgcgtatcagagcatccagagctacctgcgaagaggccgggaagcctgcaatgaaggagaaggagacccaccgctctacgtcaacgtgaacatgttcagtgggcagctcatgaacacctggattgactcactgcaggctttcttccctggactgcaggttctgataggggatgtggaagatgccatctgcctacacgccttctactatgccatatggaagcggtacggggccctccctgagcgctataactggcaactccaggcccctgatgttctcttctaccctctgagaccagagctagtggagtccacatatctcctctaccaggcaaccaagaatcccttctacctccatgtaggaatggacattctgcagagtcttgaaaaatacacaaaagtcaaatgtggatatgctacgctgcatcacgtcatagacaagtctaaagaagaccggatggaaagcttctttctcagcgagacttgcaaatacttgtatctgctatttgatgaagagaatccagtacacaaatctggaaccagatacatgtttacaactgagggccatatcatatctgtggacaaacgtcttcgggaattgccttggaaggaattcttctctgaagatggggagcgggaccaagaggaaaagtttgtacacagacctaagtctcaggagctcagagtcattaactccagttctaattgtaatcgtgttcctgatgagaggagatactccttgcccttaaagagcatctacatgcgccagatcgaccagatggttggcttgatttga

SEQ ID NO: 58676 - protein, 622 aa, Mus musculus
MGFYQRFPLSFGFQRLRDPDGSGPVGPPGGPAWLHRPRRGTEGRLETPPEPGPTPGPGVCGPAHWGYALGGGGCGPDEYERRYSGAFPPQLRAQMRDLARGMFVFGYDNYMAHAFPQDELNPIYCRGRGPDRGDPSNLNINDVLGNYSLTLVDALDTLAIMGNSSEFQKAVKLVINTVSFDKDSTVQVFEATIRVLGSLLSAHRIITDSKQPFGDMTIEDYDNELLYMAHDLAVRLLPAFENTKTGIPYPRVNLKTGVPPDSNNETCTAGAGSLLVEFGILSRLLGDSTFEWVARRAVKALWNLRSNDTGLLGNVVNIQTGHWVGKQSGLGAGLDSFYEYLLKSYILFGEKEDLEMFNAAYQSIQSYLRRGREACNEGEGDPPLYVNVNMFSGQLMNTWIDSLQAFFPGLQVLIGDVEDAICLHAFYYAIWKRYGALPERYNWQLQAPDVLFYPLRPELVESTYLLYQATKNPFYLHVGMDILQSLEKYTKVKCGYATLHHVIDKSKEDRMESFFLSETCKYLYLLFDEENPVHKSGTRYMFTTEGHIISVDKRLRELPWKEFFSEDGERDQEEKFVHRPKSQELRVINSSSNCNRVPDERRYSLPLKSIYMRQIDQMVGLI

SEQ ID NO: 58677 - DNA, 2406 bp, Drosophila melanogaster
  CDS (1)..(2406)
atgtctaccacatcctccgaatcctttgtccgcggccagcggcttatgctcatcttcctggtggccatgtgcatcgtagttgcctgcgtccttagcaccgaaaccaccatgcccacgcagaacatgtccaataaggagcgggcggaactccgggaagaggctcgcgatatgttctatcatgcatacaacgcctacatgcagaacgcctatccagctgatgagcttatgccgctctcctgcaaaggacggtaccgaggagtgacgccatcacgtggcgacatggacgacatccttggaaatttctccatgactctggtggatactctggacactctggtgctcctgggcgatttcacagagtttgatcacgcggtgaagctagttatccgcgaagttcaattcgacagcgacattattgtgtcggtgtttgagacgaacattcgaatggtcggtggcttgctgtcggcgcacatcctggcggagtatctgcaaaagcatgcggacacgatgcattggtacaagggcgaactgctggagatgtctcgcgagctgggctaccgtttgctaccggcgttcaacacatccacgggcattccgcatgcgcgggttaatctccgcctgggcatgaaggacccgatgctcaagaagtcccgtgaaacgtgtacggcgtgtgctggtaccatccttctggaatttgctgctctgtcgcgtctcaccggcgatcccattttcgaggtgcgagctcacgccgccatggatgcactgtggaagctaaggcaccgtggctccgatctcatgggcacggtacttaatgtccattcgggcgattgggtgcgtcgcgattctggagtcggagctggcatcgacagttactatgagtacctgttcaagtcgtacgtcctactgggtgacgacaagtacctggcacgctttaatcgccactacaacgcagtgatgaagtacgtcagcgaaggacccatgctactcgacgtgctcatgcacaggccacatgctaagtccaaaaacttcatggactcgcttctggcattttggccgggcttgcaggtgctatcgggcgatctgaaaccagctgtgcagacacacgagatgctctatcaggtcatgcagatgcacaccttcattccagaagcatttaccgtcgacttccagatccattggggacagcatcccctgcgaccagaatttatagagtccacttacttcctgtaccgcgccactggcgatcatcattatctgcaggttggcaagaaggctctgaaaacactccagcagcatgctaaggtatcttgcggctatgcggccgtcaatgatgtacggactggcaagcatgaggatcgcatggactcgtttgtgctctccgagacgatcaagtacctcttcctactgttctccgatccccaggatctgatcataaacgtcgatgagttcgtcttcacgaccgaggctcatctgctaccgctctctattgcccaactagggaatgccacgtttagctttcgccagacggacgaacacaacgtactcgacttcatgcgcacctgccccagttcaaataggctttttcctgaaaaagtacgcaaaccactgcgcaacttcattacgggctcgtgccctcgcaccacagcgggaaagcgactcagcgccctggattttcaggcaagcaatgcagatcatcttcgagctgtttacgacatgggcattaccatggtttcggtaggcgaccgcagccaaggcaaggtgcgactgtttcatagtttctataatgccaaaagtcacgaggagggcgaaatgggactgcaatttatgcaggagatgcttgagctgaccaagatgcaaagcataaatcagctagcgcaactgcaggccgttgcctacgccactgacgagaactcacaggattggatcgcactgatggccgggccgtcgcactttagcccagagttaactggcgatcagttcgtcgaaggggacgtgattctggccaagccgctacgagcatgcgatgagagcctagagaacgccgaggaggcgaaaggaaaggtcctggtggccgagcgcggcgattgcacgttcgttagcaaagcgcgactggcccagaaggtgggggcggcggcgctgattgtctgtgataatgttccgggctcttccggtgagacgcagccgatgttcgcaatgtctggcgacggcaaggacgacgtgctcattccagtcgtattcatgtacagcatggagttcggcaaactgtcggcggtcatgcagcgacggaaacaacctctgcgtgttcgcgtcatgcagatggtggagtttaagcggtggcaactggccaaggagcagcgccagaaccaaacagcgtcggtagcacagaaaccggaaaaagaattgtag

SEQ ID NO: 58678 - protein, 801 aa, Drosophila melanogaster
MSTTSSESFVRGQRLMLIFLVAMCIVVACVLSTETTMPTQNMSNKERAELREEARDMFYHAYNAYMQNAYPADELMPLSCKGRYRGVTPSRGDMDDILGNFSMTLVDTLDTLVLLGDFTEFDHAVKLVIREVQFDSDIIVSVFETNIRMVGGLLSAHILAEYLQKHADTMHWYKGELLEMSRELGYRLLPAFNTSTGIPHARVNLRLGMKDPMLKKSRETCTACAGTILLEFAALSRLTGDPIFEVRAHAAMDALWKLRHRGSDLMGTVLNVHSGDWVRRDSGVGAGIDSYYEYLFKSYVLLGDDKYLARFNRHYNAVMKYVSEGPMLLDVLMHRPHAKSKNFMDSLLAFWPGLQVLSGDLKPAVQTHEMLYQVMQMHTFIPEAFTVDFQIHWGQHPLRPEFIESTYFLYRATGDHHYLQVGKKALKTLQQHAKVSCGYAAVNDVRTGKHEDRMDSFVLSETIKYLFLLFSDPQDLIINVDEFVFTTEAHLLPLSIAQLGNATFSFRQTDEHNVLDFMRTCPSSNRLFPEKVRKPLRNFITGSCPRTTAGKRLSALDFQASNADHLRAVYDMGITMVSVGDRSQGKVRLFHSFYNAKSHEEGEMGLQFMQEMLELTKMQSINQLAQLQAVAYATDENSQDWIALMAGPSHFSPELTGDQFVEGDVILAKPLRACDESLENAEEAKGKVLVAERGDCTFVSKARLAQKVGAAALIVCDNVPGSSGETQPMFAMSGDGKDDVLIPVVFMYSMEFGKLSAVMQRRKQPLRVRVMQMVEFKRWQLAKEQRQNQTASVAQKPEKEL

SEQ ID NO: 58679 - DNA, 1713 bp, Mus musculus
  CDS (1)..(1713)
atggaagtcctgcctgtcttaccagcgcctcagaaggaaagtgctgaacaagaagggtttgcagacatactctctcagaagcggcaaaggcattttcggcggggccctccccatctgcagattagaccccccaacacagtctccaaggatgggatgcaggatgatgctaaggagagagaagcagccctggggaaggctcagcaggaagaaaacacacagagaaccgtcatcagctggcggggagccgtgattgagcctgaacaggccactgaacttccttacaaaagagctgaagcctccatcaaacctctggttttggcatccaagatatggaaagagccagcccccccgaatgagcgccagaagggagtgattgaggcctttctccatgcttggaagggttaccaaaagtttgcttggggccatgatgaactaaaacctgtgtccaaaaccttcagtgagtggtttggcctgggcctcaccctgatcgatgccttggataccatgtggattttgggtctgaagcaagaatttaagcaagccaggaaatgggtatcagagaacttagactttcagaagaatgttgatgtcaacctgtttgagagcaccattcgcatcttagggggcctgctgagtacctaccacctgtcgggggacagcctcttcctgaccaaagctgaagattttggaaaacggctgatgcctgccttcactacgccctccaagatcccatactctgatgtgaacattggcactggatttgcccactcaccccagtggacttcagacagcacggtggcagaagtgacgagcattcagttggagttccgggagctctctcgtcttactggaataaagaaattccaggaggccgtggaggaagtgacaaagcacatccactccctgtctgggaagaaagacgggctggtgcctatgttcatcaacacgaacagcggcctcttcacccacccaggagtgttcaccttgggggccagggctgacagctactacgaatacctgctgaaacagtggatccagggtggcaagaaggagacacagttgctggaagactatgttaaagccattgaggggataaaagcccatctgctccggcagtctcagcccagaaagctcaccttcgtgggagaacttgcccacggccgcttcagtgccaagatggaccacttagtgtgcttcctgccggggacgctggctttgggtgtccaccatggcctgccagctgaccacatggatctagctcgggccctcatggagacctgctaccagatgaaccaacagatggagacaggtctgagccctgagattgcacatttcaacatgtaccctcgggcagatcataaagatgtggaggtcaagccagctgacaggcacaacctgctgcggccagagacggtggaaagcctattctatctgtaccgtgtcacaagggaccgcaagtaccaggactggggctgggaaatcctgcagagcttcaataagtacacacgggtcccctcaggtggctattcttctatcaacaacgtccagaattcccacaagcctgagcccagggacaagatggagagcttctttgtgggggaaaccctgaagtacttgtacctgctcttttctgatgacctggagctgctcagtctggacagctgtgtgttcaacacagaagcccatcccctccccatctgggctcctgcgtag

SEQ ID NO: 58680 - protein, 570 aa, Mus musculus
MEVLPVLPAPQKESAEQEGFADILSQKRQRHFRRGPPHLQIRPPNTVSKDGMQDDAKEREAALGKAQQEENTQRTVISWRGAVIEPEQATELPYKRAEASIKPLVLASKIWKEPAPPNERQKGVIEAFLHAWKGYQKFAWGHDELKPVSKTFSEWFGLGLTLIDALDTMWILGLKQEFKQARKWVSENLDFQKNVDVNLFESTIRILGGLLSTYHLSGDSLFLTKAEDFGKRLMPAFTTPSKIPYSDVNIGTGFAHSPQWTSDSTVAEVTSIQLEFRELSRLTGIKKFQEAVEEVTKHIHSLSGKKDGLVPMFINTNSGLFTHPGVFTLGARADSYYEYLLKQWIQGGKKETQLLEDYVKAIEGIKAHLLRQSQPRKLTFVGELAHGRFSAKMDHLVCFLPGTLALGVHHGLPADHMDLARALMETCYQMNQQMETGLSPEIAHFNMYPRADHKDVEVKPADRHNLLRPETVESLFYLYRVTRDRKYQDWGWEILQSFNKYTRVPSGGYSSINNVQNSHKPEPRDKMESFFVGETLKYLYLLFSDDLELLSLDSCVFNTEAHPLPIWAPA

SEQ ID NO: 58681 - DNA, 1719 bp, Arabidopsis thaliana
  CDS (1)..(1719)
atggcgaggaataaacttgtaagtggtagtcatgggatatggaaatatttcaacccagcgttttatctccgaagaccaagacgtcttgctttgctcatcatcctcttcgtctctgtttcaatggttgtttgggatcgtcaatctctttcccgagactaccagtttgaagtttccaagttaaatgaagaagttttgcggttgcagcagatgttggaagagataaagagcgtcactgaggatgtgtctgtcaatagtttgaaggatgttcaggaagatccagttgatgctcagcgaatgcagagagttaaagaggcaatggttcatgcttggagttcacatgaaaagtatgcctggggacaagatgagcttcagccccagacaaaggatggtgttgacagctttggtggcctgggtgcaactatgatagatgcattagacacactatatataatgggtctagatgagcagtttcagaaagccagagagtgggtagcaagctcattagatttcgacaaggattatgctgccagtatgtttgagacaaccataagagtggtaggagggcttctcagtgcgtatgatctttctggggataaaattttccttgaaaaggctatggatattgcagacagattattgcctgcatgggacactcaatcgggtataccatataatattatcaacttgaagcatggaaatgctcacaatcctacatgggcggggggagacagtattcttgcagattctggtactgagcagcttgaatttattgccctttcccagaggacaggggacccaaaatatcagcaaaaggtagaaaaggttatttcagtgctaaataagaacttccctgctgatggtttacttccgatatatataaatcccgatacagctaatccatcgcagtctacaataacatttggtgccatgggagacagcttttacgaatatttgctcaaagtttgggtgtttgggaacaaaacttcagcagtgaaacactatagagatatgtgggagaagtcaatgaatggtctgctaagcttggttaagaaatcaacacctttgtcgtttacatatatctgtgagaagagtggaaattctttgatcgataagatggatgaattggcatgctttgctcctggaatgttggctttaggagcatctgggtatagtgatcctgctgaaggaaagaagtttctcacactcgctgaagagcttgcgtggacatgttataacttttaccaatcaactccaacaaaactggctggggagaattatttcttcaactctgggagtgacatgagtgttggaacgtcgtggaacatcttgagaccagaaactgtcgaatcactgttttacctctggcggttaactggaaacaagacatatcaagagtggggatggaatatatttgaagcatttgagaagaactcgcgcatagagtctggatatgttggtttgaaggatgttaatacaggcgttaaggacaacaagatgcaaagtttcttccttgcagagacactcaagtatctctatctactcttctcgccgacaacagtcattcctttagacgagtgggtattcaacaccgaagctcatccacttaagattaagtctcgaaacgatcaggtaaatctcaaacaatccaacaaagtactgctacgaaaaccggcatttagaatacgccagaggcattatggtcggataacaaagaagtaa

SEQ ID NO: 58682 - protein, 572 aa, Arabidopsis thaliana
MARNKLVSGSHGIWKYFNPAFYLRRPRRLALLIILFVSVSMVVWDRQSLSRDYQFEVSKLNEEVLRLQQMLEEIKSVTEDVSVNSLKDVQEDPVDAQRMQRVKEAMVHAWSSHEKYAWGQDELQPQTKDGVDSFGGLGATMIDALDTLYIMGLDEQFQKAREWVASSLDFDKDYAASMFETTIRVVGGLLSAYDLSGDKIFLEKAMDIADRLLPAWDTQSGIPYNIINLKHGNAHNPTWAGGDSILADSGTEQLEFIALSQRTGDPKYQQKVEKVISVLNKNFPADGLLPIYINPDTANPSQSTITFGAMGDSFYEYLLKVWVFGNKTSAVKHYRDMWEKSMNGLLSLVKKSTPLSFTYICEKSGNSLIDKMDELACFAPGMLALGASGYSDPAEGKKFLTLAEELAWTCYNFYQSTPTKLAGENYFFNSGSDMSVGTSWNILRPETVESLFYLWRLTGNKTYQEWGWNIFEAFEKNSRIESGYVGLKDVNTGVKDNKMQSFFLAETLKYLYLLFSPTTVIPLDEWVFNTEAHPLKIKSRNDQVNLKQSNKVLLRKPAFRIRQRHYGRITKK

SEQ ID NO: 58683 - DNA, 1518 bp, Emericella nidulans
  CDS (1)..(1518)
atgcgtacgcttctcgctctcgcggccttcgcgggctttgccgctgctagggtgcccgcctacgccatcacgcgcccggtgatgcgcagtgattctcgcgccgacgctgtcaaggaggccttttcgcatgcctgggacggttactacaactacgcttttcctcatgacgagcttcacccgatttcgaacggttacggagactcgcgaaaccactggggcgcgtcggccgtcgacgctctatcgacggccatcatgatgcgcaacgcgaccatcgtcaaccagatccttgaccatattgctgctgtggactactccaagaccaacgccatggtaagtttgttcgagacgaccatccggtacctcgcgggcatgatttctggatacgacctgctcaaaggccctgcggcggggttggtggacgacagcagggtcgacgtgcttctagagcagtcgcagaacctcgccgaggtgctgaaattcgcgttcgacactccttctggtgtgccgtacaacatgattaacattacttcgggcggcaacgacggcgccacgaccaacgggctggccgtgaccggtaccttggtgctggagtggacgcgtctgtcggacttgactgggaacgacgagtatgcccgcttgagccagagagctgaagactaccttctccacccggagccagcgcagtacgaaccgttccctggattgattggaagcgcagtcaatattgccgacggcaagctcgccaatggtcacatcagctggaatggtggcgcagactcgtactacgagtacctgatcaagatgtacgtctacgatcccgaacgctttggcctctaccgggaccgctgggtcgcagctgccgagtcgagcatcaaccatctggcttcgcacccgtccacccgcccagacgtgactttcttggccacttacaacgaggagcatcagctgggcctgaccagccaacacctgacctgcttcgacggtggaagctttctgcttggtgggacattgctggaccgccaggactttgtcgacttcggccttgaccttgtcgccggctgccacgagacgtacaactcgactctgacgggcatcggccctgagcaattcagctgggaccctaacggtgtgcccgacagccagaaggagctgttcgagcgcgcaggcttctacatcaacagcggccaatacattcttcgtcccgaagtcatcgagagcttctactatgcatggcgcgtcacaggtgatggaacgtacctcgaatgggtgtggaacgccttcaccaacatcaacaagtactgccgcactgcgaccggtttcgcggggctggagaacgtcaatgcagcgaacggcggaggccggatcgacaaccaggagagtttcatgttcgcagaggtgctgaagtattcgtttttgacttttgctcctgaggacgactggcaggtgcagaagggcagtggaaatacgtttgtttataacaccgaggcgcacccgtttaaggtgtatacgcctcagtag

SEQ ID NO: 58684 - protein, 505 aa, Emericella nidulans
MRTLLALAAFAGFAAARVPAYAITRPVMRSDSRADAVKEAFSHAWDGYYNYAFPHDELHPISNGYGDSRNHWGASAVDALSTAIMMRNATIVNQILDHIAAVDYSKTNAMVSLFETTIRYLAGMISGYDLLKGPAAGLVDDSRVDVLLEQSQNLAEVLKFAFDTPSGVPYNMINITSGGNDGATTNGLAVTGTLVLEWTRLSDLTGNDEYARLSQRAEDYLLHPEPAQYEPFPGLIGSAVNIADGKLANGHISWNGGADSYYEYLIKMYVYDPERFGLYRDRWVAAAESSINHLASHPSTRPDVTFLATYNEEHQLGLTSQHLTCFDGGSFLLGGTLLDRQDFVDFGLDLVAGCHETYNSTLTGIGPEQFSWDPNGVPDSQKELFERAGFYINSGQYILRPEVIESFYYAWRVTGDGTYLEWVWNAFTNINKYCRTATGFAGLENVNAANGGGRIDNQESFMFAEVLKYSFLTFAPEDDWQVQKGSGNTFVYNTEAHPFKVYTPQ

SEQ ID NO: 58685 - DNA, 1737 bp, Glycine max
  CDS (1)..(1737)
atggcgagagggagcagatcagtgggtagcagcagcagcaaatggaggtactgcaacccttcctattacttgaagcgcccaaagcgtcttgctctgctcttcatcgttttcgtttgtgtctctttcgttttctgggaccgtcaaactctcgtcagagagcaccaggttgaaatttctgagctgcagaaagaagtgactgatttgaaaaatttggtggatgatttaaataacaaacaaggtggtacctctgggaagactgacttggggagaaaagctaccaagtccagtaaagacgtcctagatgatcccattgatatcgagaggagggaaaaagtaaaagaagcaatgcttcatgcttggggatcttatgagaagtatgcatggggacaagatgaacttcagccacaatcaaagaatggtgtcaatagctttggaggtcttggagcaactttaatagattctcttgatacactatatattatgggtctcaacgaacagtttcagaaagcacgagaatgggttgcaaactctttggattttaacaaggattatgaagcaagtgtttttgagacaaccataagagtagtaggtggccttcttagtgcatatgatctttcaggggacaaagtattcctcgacaaagcaatagaaattgcagacagattactgcctgcatggaatacacctacaggaattccttacaacatcattaatttatcacatggacgagcacacaaccctagttggactgggggtgagagtatcttggcagattctggcactgaacaactggaattcattgttctatcccaaaggactggagacctcaagtatcagcagaaggtggaaaatgtaatagcccagctaaataaaacatttcctgatgatggattacttcccatctacattaatcctcatagtggggcagcaggctactctcccatcacattcggtgccatgggtgatagtttttacgagtacttgctcaaagtttggatacaagggaataagacttcatccataaaacattatagagatatgtgggagaaatcaatgaaaggcctgtcaagtttgattaggagatcaacaccatcttcttttacttatatatgtgagaagaatggaggatctctcacagacaaaatggatgaactagcatgctttgctccagggatgattgctttgggatcatttggttacagtgctgctgatgattcacagaagtttctgtcacttgcagaagagcttgcttggacatgttataacttctaccaatcaactccaacaaaattggctggagagaactatttctttcattctgggcaggacatgagtgtgggtacatcatggaacatactgaggccagagacagttgagtccctcttttacctttggcgtctaactggcaacaaaacataccaagaatggggttggaatatatttcaagcttttgagaagaactcccgcatagagtcaggctatgttggactgaaggatgttaatagtggagtcaaagacaacatgatgcaaagcttctttcttgcggagaccctgaagtatttttatcttctcttctcaccttcttcagtcatctcattagacgaatgggtattcaacacagaagcccaccctctgaggattgtgaccagacacgaagagggacttgttaagaatttaaatgagaagcaaaaacctttttctagaataggtggcagaaaggaaggaaggtcaggttag

SEQ ID NO: 58686 - protein, 578 aa, Glycine max
MARGSRSVGSSSSKWRYCNPSYYLKRPKRLALLFIVFVCVSFVFWDRQTLVREHQVEISELQKEVTDLKNLVDDLNNKQGGTSGKTDLGRKATKSSKDVLDDPIDIERREKVKEAMLHAWGSYEKYAWGQDELQPQSKNGVNSFGGLGATLIDSLDTLYIMGLNEQFQKAREWVANSLDFNKDYEASVFETTIRVVGGLLSAYDLSGDKVFLDKAIEIADRLLPAWNTPTGIPYNIINLSHGRAHNPSWTGGESILADSGTEQLEFIVLSQRTGDLKYQQKVENVIAQLNKTFPDDGLLPIYINPHSGAAGYSPITFGAMGDSFYEYLLKVWIQGNKTSSIKHYRDMWEKSMKGLSSLIRRSTPSSFTYICEKNGGSLTDKMDELACFAPGMIALGSFGYSAADDSQKFLSLAEELAWTCYNFYQSTPTKLAGENYFFHSGQDMSVGTSWNILRPETVESLFYLWRLTGNKTYQEWGWNIFQAFEKNSRIESGYVGLKDVNSGVKDNMMQSFFLAETLKYFYLLFSPSSVISLDEWVFNTEAHPLRIVTRHEEGLVKNLNEKQKPFSRIGGRKEGRSG

SEQ ID NO: 58687 - DNA, 2670 bp, Homo sapiens
  CDS (1)..(2670)
atgagtagggaggagaaacagaagcttgggaatcaagtactggaaatgtttgatcatgcttatggtaactatatggaacatgcttaccctgctgatgaactcatgcctttaacctgtagaggtcgagttagaggccaagagccaagtcgcggtgacgttgatgatgccttgggaaaattttctctgacactgattgattctttggacactcttgtggttttaaataaaactaaagaatttgaagatgcagtgagaaaagttttaagagatgttaatttagataacgatgtagtcgtatcagtctttgaaacaaacatcagagttcttgggggtcttttgggtgggcactccctggcaatcatgctgaaagaaaaaggtgaatatatgcagtggtacaatgatgaacttctccaaatggcaaagcagttaggttacaaacttttaccggctttcaacactaccagtggccttccttatccaagaattaatttaaagtttggcatcagaaaaccagaagctcggacaggaactgagacagatacctgtacagcttgtgcaggtaccttgatccttgaatttgctgctttaagtcgattcacaggagcaacaatatttgaggaatatgccagaaaagctcttgattttctctgggaaaaaagacagcgaagtagtaatttagtgggcgtgactataaatattcatactggagattgggtacgaaaagatagtggagttggagcagggattgattcatattatgaatatctgttgaaagcctatgtcttgcttggagatgacagttttctggaaagatttaacacacactatgatgccataatgaggtatattagccagccacctcttctacttgatgtgcatatccacaaaccaatgctgaatgctcggacttggatggatgctttgcttgccttcttcccaggcttgcaggtgttaaagggggatattagacctgctattgaaactcatgaaatgttatatcaggtgattaaaaaacacaattttctaccagaggcatttaccacagatttcagagtacactgggctcaacatcctttaaggccagaatttgcagaaagtacctacttcttatataaagctacaggagatccttactaccttgaagtagggaagacacttattgaaaatttaaataaatatgctagagtgccttgcggatttgctgccatgaaggatgttcgtactggaagtcatgaggacagaatggattctttcttcttggctgaaatgtttaaatatctttacctgttatttgctgataaagaagacattatttttgacatagaagattacatctttacaacagaagctcatctgttacctctttggctctctactacaaatcaaagcatctctaaaaagaacacaacctcggaatatacagaactggatgacagtaacttcgattggacttgtccaaatactcagatcctctttcctaatgacccattgtatgctcaaagtattcgtgagcccttgaaaaatgtggtggataagagctgtcctagaggcatcatcagagtagaggagagtttcaggagtggagctaaaccccctctgagagccagagatttcatggccactaaccctgagcatttagaaatcctgaagaagatgggggtgagtttgattcacctcaaagatgggagagtccagttggtccaacatgcaatccaagctgctagttcaatcgacgctgaagatgggttgaggttcatgcaggagatgattgaattgtcaagtcagcaacaaaaagaacagcagctgcctccacgagctgtacaaattgtttcccacccattttttggcagggtagtattgactgctggaccagctcagtttgggctggatctgtctaaacataaagagacaagaggatttgttgcaagcagtaaaccatccaatggttgttcagagcttactaacccagaggcagtgatgggaaaaatcgcactgatacaaagaggacagtgcatgtttgcagaaaaggcacgcaacatccagaatgctggagccattggtggcattgttattgatgacaatgaggggagcagcagtgatactgcccctctgttccagatggcaggtgatggaaaggatacagatgacatcaagatccccatgctgttcttattcagcaaagaaggaagtatcatactggatgccatccgggaatatgaggaggtagaagtgctcctctctgataaagcaaaagatcgagatcctgaaatggaaaatgaagaacaaccatcctctgaaaatgattctcagaatcagagtggtgaacagatttcatcaagttctcaggaggttgatttggttgatcaagagtcttctgaggaaaattctctaaattctcacccagaatcattatctctagcagatatggacaatgctgcaagcatttccccttctgaacagacttctaatcccacagaaaaccatgagactacaaatcttaatggtgaatgtacagatttagataaccagcttcaagaacaatcagaaactgaggaagattccaatcctaatgttagctggggtaaaaaggtccagcctatagactccatattagcagactggaatgaagatatagaagcatttgaaatgatggagaaggatgagctatga

SEQ ID NO: 58688 - protein, 889 aa, Homo sapiens
MSREEKQKLGNQVLEMFDHAYGNYMEHAYPADELMPLTCRGRVRGQEPSRGDVDDALGKFSLTLIDSLDTLVVLNKTKEFEDAVRKVLRDVNLDNDVVVSVFETNIRVLGGLLGGHSLAIMLKEKGEYMQWYNDELLQMAKQLGYKLLPAFNTTSGLPYPRINLKFGIRKPEARTGTETDTCTACAGTLILEFAALSRFTGATIFEEYARKALDFLWEKRQRSSNLVGVTINIHTGDWVRKDSGVGAGIDSYYEYLLKAYVLLGDDSFLERFNTHYDAIMRYISQPPLLLDVHIHKPMLNARTWMDALLAFFPGLQVLKGDIRPAIETHEMLYQVIKKHNFLPEAFTTDFRVHWAQHPLRPEFAESTYFLYKATGDPYYLEVGKTLIENLNKYARVPCGFAAMKDVRTGSHEDRMDSFFLAEMFKYLYLLFADKEDIIFDIEDYIFTTEAHLLPLWLSTTNQSISKKNTTSEYTELDDSNFDWTCPNTQILFPNDPLYAQSIREPLKNVVDKSCPRGIIRVEESFRSGAKPPLRARDFMATNPEHLEILKKMGVSLIHLKDGRVQLVQHAIQAASSIDAEDGLRFMQEMIELSSQQQKEQQLPPRAVQIVSHPFFGRVVLTAGPAQFGLDLSKHKETRGFVASSKPSNGCSELTNPEAVMGKIALIQRGQCMFAEKARNIQNAGAIGGIVIDDNEGSSSDTAPLFQMAGDGKDTDDIKIPMLFLFSKEGSIILDAIREYEEVEVLLSDKAKDRDPEMENEEQPSSENDSQNQSGEQISSSSQEVDLVDQESSEENSLNSHPESLSLADMDNAASISPSEQTSNPTENHETTNLNGECTDLDNQLQEQSETEEDSNPNVSWGKKVQPIDSILADWNEDIEAFEMMEKDEL

SEQ ID NO: 58689 - DNA, 1737 bp, Homo sapiens
  CDS (1)..(1737)
atgcctttccggctgctcatcccgctcggcctcctgtgcgcgctgctgcctcagcaccatggtgcgccaggtcccgacggctccgcgccagatcccgcccactacagggagcgagtcaaggccatgttctaccacgcctacgacagctacctggagaatgcctttcccttcgatgagctgcgacctctcacctgtgacgggcacgacacctggggcagtttttctctgactctaattgatgcactggacaccttgctgattttggggaatgtctcagaattccaaagagtggttgaagtgctccaggacagcgtggactttgatattgatgtgaacgcctctgtgtttgaaacaaacattcgagtggtaggaggactcctgtctgctcatctgctctccaagaaggctggggtggaagtagaggctggatggccctgttccgggcctctcctgagaatggctgaggaggcggcccgaaaactcctcccagcctttcagacccccactggcatgccatatggaacagtgaacttacttcatggcgtgaacccaggagagacccctgtcacctgtacggcagggattgggaccttcattgttgaatttgccaccctgagcagcctcactggtgacccggtgttcgaagatgtggccagagtggctttgatgcgcctctgggagagccggtcagatatcgggctggtcggcaaccacattgatgtgctcactggcaagtgggtggcccaggacgcaggcatcggggctggcgtggactcctactttgagtacttggtgaaaggagccatcctgcttcaggataagaagctcatggccatgttcctagagtataacaaagccatccggaactacacccgcttcgatgactggtacctgtgggttcagatgtacaaggggactgtgtccatgccagtcttccagtccttggaggcctactggcctggtcttcagagcctcattggagacattgacaatgccatgaggaccttcctcaactactacactgtatggaagcagtttggggggctcccggaattctacaacattcctcagggatacacagtggagaagcgagagggctacccacttcggccagaacttattgaaagcgcaatgtacctctaccgtgccacgggggatcccaccctcctagaactcggaagagatgctgtggaatccattgaaaaaatcagcaaggtggagtgcggatttgcaacaatcaaagatctgcgagaccacaagctggacaaccgcatggagtcgttcttcctggccgagactgtgaaatacctctacctcctgtttgacccaaccaacttcatccacaacaatgggtccaccttcgacgcggtgatcaccccctatggggagtgcatcctgggggctggggggtacatcttcaacacagaagctcaccccatcgaccctgccgccctgcactgctgccagaggctgaaggaagagcagtgggaggtggaggacttgatgagggaattctactctctcaaacggagcaggtcgaaatttcagaaaaacactgttagttcggggccatgggaacctccagcaaggccaggaacactcttctcaccagaaaaccatgaccaggcaagggagaggaagcctgccaaacagaaggtcccacttctcagctgccccagtcagcccttcacctccaagttggcattactgggacaggttttcctagactcctcataa

SEQ ID NO: 58690 - protein, 578 aa, Homo sapiens
MPFRLLIPLGLLCALLPQHHGAPGPDGSAPDPAHYRERVKAMFYHAYDSYLENAFPFDELRPLTCDGHDTWGSFSLTLIDALDTLLILGNVSEFQRVVEVLQDSVDFDIDVNASVFETNIRVVGGLLSAHLLSKKAGVEVEAGWPCSGPLLRMAEEAARKLLPAFQTPTGMPYGTVNLLHGVNPGETPVTCTAGIGTFIVEFATLSSLTGDPVFEDVARVALMRLWESRSDIGLVGNHIDVLTGKWVAQDAGIGAGVDSYFEYLVKGAILLQDKKLMAMFLEYNKAIRNYTRFDDWYLWVQMYKGTVSMPVFQSLEAYWPGLQSLIGDIDNAMRTFLNYYTVWKQFGGLPEFYNIPQGYTVEKREGYPLRPELIESAMYLYRATGDPTLLELGRDAVESIEKISKVECGFATIKDLRDHKLDNRMESFFLAETVKYLYLLFDPTNFIHNNGSTFDAVITPYGECILGAGGYIFNTEAHPIDPAALHCCQRLKEEQWEVEDLMREFYSLKRSRSKFQKNTVSSGPWEPPARPGTLFSPENHDQARERKPAKQKVPLLSCPSQPFTSKLALLGQVFLDSS

SEQ ID NO: 58691 - DNA, 1974 bp, Homo sapiens
  CDS (1)..(1974)
atgcaatggcgagcgctcgtcctggggctggtgctcctccggcttggcctccatggagtattgtggctcgtcttcgggctggggcccagcatgggcttctaccagcgctttccgctcagcttcggcttccagcgtctgaggagccccgacggccccgcgtcgcccacctcggggcccgtgggccggcctgggggggtatccgggccgtcgtggctgcagccgccggggaccggggcagcgcagagcccgcgcaaggctccgcggcgtcctgggccggggatgtgcggcccagccaactggggctacgtgctgggcggccggggccgcggcccggacgagtacgagaagcgctacagcggcgccttccctccgcagctgcgtgcccagatgcgcgacctggcacggggcatgttcgtctttggctacgacaactacatggctcacgccttcccccaggacgagctcaaccccatccactgccgcggccgtgggcccgaccgcggggacccttcaaatctgaacatcaatgatgtactagggaactactcattgactcttgttgatgcattggatacacttgcaataatgggaaattcatccgagttccagaaagcagtcaagttagtgatcaacacagtttcatttgacaaagattccaccgtccaagtctttgaggccacgataagggtcctgggaagcctcctttctgctcacagaataataactgactccaagcagccctttggtgacatgacaattaaggactatgataatgagttgttatacatggcccatgacctggcggtgcggctcctccctgcttttgaaaacaccaagacagggattccatatcctcgggtgaatctaaagacaggagttcctcctgacaccaataatgagacatgcacagcgggagccggttccctcctggtggaatttgggattctgagtcgactcctgggggactccacatttgagtgggtggccagacgagcagtgaaagccctttggaacctccggagcaatgatacaggattactaggcaatgtcgtgaacattcagacgggccactgggttggaaagcagagtggcctgggtgccgggctggactccttctatgaatacctcttgaaatcttacattctctttggagaaaaagaagacctagaaatgtttaatgctgcatatcagagtattcagaactacttaagaagagggcgggaagcctgcaatgaaggagaaggagaccctccactctatgtcaacgtgaacatgttcagtgggcagctgatgaacacctggattgactctctgcaggcctttttccctggactgcaggtgctgataggagatgtggaagatgccatctgccttcatgccttctactatgccatatggaaacgatatggtgccctccctgagagatataactggcagctgcaggcccctgacgttctcttctacccactgagaccagagttagtggaatccacatatctcctctaccaggcaaccaagaatcccttctacctccatgtaggaatggatattctgcagagtctggaaaagtacacaaaagtcaagtgtgggtacgccacgctgcatcacgtcattgacaagtccacagaagaccggatggagagcttctttctcagtgagacctgtaaatatttgtatctgctgtttgatgaagacaatccagtacacaagtctggaaccagatacatgttcacaacagagggacacattgtatctgtggatgagcatcttcgggaattgccatggaaggaattcttctctgaagagggagggcaggaccaagggggaaagtctgtgcacaggccgaaacctcatgagttaaaagtcatcaactccagctccaactgcaatcgtgtacctgatgagaggaggtactccctgcccttaaagagcatctacatgcgacagattgaccagatggttggtttgatttga

SEQ ID NO: 58692 - protein, 657 aa, Homo sapiens
MQWRALVLGLVLLRLGLHGVLWLVFGLGPSMGFYQRFPLSFGFQRLRSPDGPASPTSGPVGRPGGVSGPSWLQPPGTGAAQSPRKAPRRPGPGMCGPANWGYVLGGRGRGPDEYEKRYSGAFPPQLRAQMRDLARGMFVFGYDNYMAHAFPQDELNPIHCRGRGPDRGDPSNLNINDVLGNYSLTLVDALDTLAIMGNSSEFQKAVKLVINTVSFDKDSTVQVFEATIRVLGSLLSAHRIITDSKQPFGDMTIKDYDNELLYMAHDLAVRLLPAFENTKTGIPYPRVNLKTGVPPDTNNETCTAGAGSLLVEFGILSRLLGDSTFEWVARRAVKALWNLRSNDTGLLGNVVNIQTGHWVGKQSGLGAGLDSFYEYLLKSYILFGEKEDLEMFNAAYQSIQNYLRRGREACNEGEGDPPLYVNVNMFSGQLMNTWIDSLQAFFPGLQVLIGDVEDAICLHAFYYAIWKRYGALPERYNWQLQAPDVLFYPLRPELVESTYLLYQATKNPFYLHVGMDILQSLEKYTKVKCGYATLHHVIDKSTEDRMESFFLSETCKYLYLLFDEDNPVHKSGTRYMFTTEGHIVSVDEHLRELPWKEFFSEEGGQDQGGKSVHRPKPHELKVINSSSNCNRVPDERRYSLPLKSIYMRQIDQMVGLI

SEQ ID NO: 58693 - DNA, 1959 bp, Mus musculus
  CDS (1)..(1959)
atgcaatggcgagcgcttgtcctggggctggtgctgctgcgcctcggcctccacgcggtgctctggttggtcttcgggctggggcccagcatgggcttctaccagcggtttccgctcagcttcggcttccagcgcttgagggaccccgacggctcggggccagttggtccgcccggaggcccggcctggcttcatcggccaaggcgcggaacggaggggcggcttgagaccccgccagagccgggaccgacgccgggaccgggcgtgtgcggcccggcgcactggggctatgccctgggcggcggtggctgcggcccggacgagtacgagcggcgctacagcggcgccttcccgccgcagctgcgtgcccagatgcgcgacctggcgcggggcatgttcgtcttcggctatgacaactacatggcgcacgcctttccgcaggacgagctcaaccccatctactgccgcggccgggggcctgaccgcggagacccttccaatctgaacatcaatgatgtcctagggaattactctctgactctggttgatgccttggatacattggcaataatgggaaattcatccgagttccagaaggcagtcaagttagtgatcaacactgtttcatttgacaaagattccacagtccaggtcttcgaagctacgataagggttctgggaagcctcctttctgctcacagaataataactgattccaaacagccctttggtgacatgacaattgaggattatgataatgaattgttgtacatggcccatgacttggctgtgcggctccttccagcctttgaaaacaccaagacagggatcccctatcctcgggtgaatctgaagacaggtgttcctcctgacagcaataatgagacctgcacagcgggggccggttctctcctggtggaatttgggattctgagccgactgctgggggattccacttttgagtgggttgccagacgagctgtgaaagccctctggaacttgcggagcaacgatacaggattattaggcaatgttgtgaacatccagacaggccattgggttggaaagcagagtggcttgggtgctgggctggattccttctatgagtacctcttgaaatcttacattctttttggagaaaaagaagatctagagatgtttaatgctgcgtatcagagcatccagagctacctgcgaagaggccgggaagcctgcaatgaaggagaaggagacccaccgctctacgtcaacgtgaacatgttcagtgggcagctcatgaacacctggattgactcgctgcaggctttcttccctggactgcaggttctgataggggatgtggaagatgccatctgcctacacgccttctactatgccatatggaagcggtacggggccctccctgagcgctataactggcaactccaggcccctgatgttctcttctaccctctgagaccagagctagtggagtccacatatctcctctaccaggcaaccaagaatcccttctacctccatgtaggaatggacattctgcagagtcttgaaaaatacacaaaagtcaaatgtggatatgctacgctgcatcacgtcatagacaagtctaaagaagaccggatggaaagcttctttctcagcgagacttgcaaatacttgtatctgctatttgatgaagagaatccagtacacaaatctggaaccagatacatgtttacaactgagggccatatcatatctgtggacaaacgtcttcgggaattgccttggaaggaattcttctctgaagatggggagcgggaccaagaggaaaagtttgtacacagacctaagtctcaggagctcagagtcattaactccagttctaattgtaatcgtgttcctgatgagaggagatactccttgcccttaaagagcatctacatgcgccagatcgaccagatggttggcttgatttga

SEQ ID NO: 58694 - protein, 652 aa, Mus musculus
MQWRALVLGLVLLRLGLHAVLWLVFGLGPSMGFYQRFPLSFGFQRLRDPDGSGPVGPPGGPAWLHRPRRGTEGRLETPPEPGPTPGPGVCGPAHWGYALGGGGCGPDEYERRYSGAFPPQLRAQMRDLARGMFVFGYDNYMAHAFPQDELNPIYCRGRGPDRGDPSNLNINDVLGNYSLTLVDALDTLAIMGNSSEFQKAVKLVINTVSFDKDSTVQVFEATIRVLGSLLSAHRIITDSKQPFGDMTIEDYDNELLYMAHDLAVRLLPAFENTKTGIPYPRVNLKTGVPPDSNNETCTAGAGSLLVEFGILSRLLGDSTFEWVARRAVKALWNLRSNDTGLLGNVVNIQTGHWVGKQSGLGAGLDSFYEYLLKSYILFGEKEDLEMFNAAYQSIQSYLRRGREACNEGEGDPPLYVNVNMFSGQLMNTWIDSLQAFFPGLQVLIGDVEDAICLHAFYYAIWKRYGALPERYNWQLQAPDVLFYPLRPELVESTYLLYQATKNPFYLHVGMDILQSLEKYTKVKCGYATLHHVIDKSKEDRMESFFLSETCKYLYLLFDEENPVHKSGTRYMFTTEGHIISVDKRLRELPWKEFFSEDGERDQEEKFVHRPKSQELRVINSSSNCNRVPDERRYSLPLKSIYMRQIDQMVGLI

SEQ ID NO: 58695 - DNA, 2004 bp, Drosophila melanogaster
  CDS (1)..(2004)
atgtatcgcatcagtccaattggacgcaaatcgaacttccactcgcgcgaaaaatgtctgattggactcgtcctggtaacgttgtgcttcctctgcttcggcggcatcttccttctgccggacaatttcggcagcgatcgtgtcctgcgcgtctacaagcacttccgaaaggccggaccggagatctttatcccagccccgcccctcgccgcacacgccccccatcgcagcgaggatccacatttcattggcgatcgccaacgtttggagcaaaagattcgcgccgaattgggcgatatgctcgatgagccaccggctgcgggtggaggcgaacctggacaattccaggtgctcgcccaacaggctcaggctccagcacccgtcgccgctctggcggatcagccgctggatcaggacgagggacacgccgccattcccgttctggccgccccagttcagggggacaatgccgccagccaggcctcgtcccatccacaaagttccgcccagcagcacaaccagcagcaaccacaactgccattgggtggcggtggcaatgatcaggcgccggacacactggacgccacactggaagaacggcgtcagaaggtcaaagagatgatggaacatgcgtggcacaattacaaattgtatgcgtggggcaaaaacgagctgcgtccgctttcgcagcgaccccattcggccagtatttttggatcatacgatctgggtgctacaatcgtcgacggtctggataccctgtacattatgggactggagaaggaatatcgcgagggtcgcgattggatcgagcgaaaattctcactggacaatatcagcgcagagttgagtgttttcgaaacgaacattcgttttgttggcggcatgctgacgctgtacgcctttacgggcgatccactgtacaaggagaaggcccagcacgttgccgacaagctgctgcccgccttccaaacaccaacgggtattccctacgcgctggtcaacaccaagaccggtgtggccaagaactacggctgggcatccggcggcagttctatcctatccgaatttggcacactgcatctggaatttgcctatctgagcgacattaccgggaatccactgtatcgggaacgagtccagaccattcgccaagtgctcaaggagatcgagaaaccaaagggcctctatcccaacttccttaatcccaagacaggcaaatgggggcaacttcacatgtcattgggcgctctgggcgacagctactacgagtacttgctgaaggcctggctgcaatccggccaaacggatgaggaagcccgcgagatgttcgacgaggcaatgctggccattctggataagatggtccgcacaagtcccggcggactgacatacgtctctgatctcaagttcgacaggctggagcataagatggaccatttggcttgcttctcgggtggcctcttcgctttgggagcggctacacgtcaaaatgactatacggacaagtacatggaggtgggcaagggcattacgaatacctgccacgagagctacatcagagcacccactcagctgggacccgaggcctttagattcagcgaagctgtggaggcgcgagcgctgagatcgcaggagaagtactacattctacggccagagactttcgagagctactttgtgctgtggcgactcacgcacgaccagaaataccgcgactggggctgggaggcggtcctcgccctggagaagcactgccgcacggcgcacggatattgtggcctgcgcaacgtctaccagcaggagccgcaaaaggacgacgttcagcaaagcttcttcctcgccgaaacgcttaagtacctgtacttgctgttctcggacgattcggtgctgccgctggacgaatgggtgttcaacacggaggcccatccgctgccgatcaagggtgcgaatgcgtactatagacaggcgcccgtaacgcttccggtttcgaacgcatcgtaa

SEQ ID NO: 58696 - protein, 667 aa, Drosophila melanogaster
MYRISPIGRKSNFHSREKCLIGLVLVTLCFLCFGGIFLLPDNFGSDRVLRVYKHFRKAGPEIFIPAPPLAAHAPHRSEDPHFIGDRQRLEQKIRAELGDMLDEPPAAGGGEPGQFQVLAQQAQAPAPVAALADQPLDQDEGHAAIPVLAAPVQGDNAASQASSHPQSSAQQHNQQQPQLPLGGGGNDQAPDTLDATLEERRQKVKEMMEHAWHNYKLYAWGKNELRPLSQRPHSASIFGSYDLGATIVDGLDTLYIMGLEKEYREGRDWIERKFSLDNISAELSVFETNIRFVGGMLTLYAFTGDPLYKEKAQHVADKLLPAFQTPTGIPYALVNTKTGVAKNYGWASGGSSILSEFGTLHLEFAYLSDITGNPLYRERVQTIRQVLKEIEKPKGLYPNFLNPKTGKWGQLHMSLGALGDSYYEYLLKAWLQSGQTDEEAREMFDEAMLAILDKMVRTSPGGLTYVSDLKFDRLEHKMDHLACFSGGLFALGAATRQNDYTDKYMEVGKGITNTCHESYIRAPTQLGPEAFRFSEAVEARALRSQEKYYILRPETFESYFVLWRLTHDQKYRDWGWEAVLALEKHCRTAHGYCGLRNVYQQEPQKDDVQQSFFLAETLKYLYLLFSDDSVLPLDEWVFNTEAHPLPIKGANAYYRQAPVTLPVSNAS

SEQ ID NO: 58697 - DNA, 1932 bp, Drosophila melanogaster
  CDS (1)..(1932)
atgtgtccgaaaacgtcgaaaaccacgccgctcctgctgattggcggaatttgctttgtgatcgttctggtcgggattaccggcataacgctgatcaacaacatcaatttgtcgaacatcattcgactgaacgagaaggtagccagcgatagtgttagcaacaatgagaatcagatcaaagagttgaactatgtgaacaatcatccgcgaaatgtgtatctcaagttgaatgccagcagcagggatgacgaggatgatgagcaaatgcaaaaagagcaggagcagttggagctacccaagatatctgctgttattggtggcagtaagccaaaagtcgaggataatcaagtgaaggagtcgtcggaagtcatttccccatctacatcaactttctccatgcgctcgtctgccggagaattaacctcaacctctgcacccttgtcctcaattgtatccgtgaccgctccacctatgcccttcggcggggtcaagtacaaccaatccagcggtttgattgattacgaaaaacgtaaccaagtcgtcaagatgatggaacatgcgtggcacaattacaaattgtatgcgtggggcaaaaacgagctgcgtccgctttcgcagcgaccccattcggccagtatttttggatcatacgatctgggtgctacaatcgtcgacggtctggataccctgtacattatgggactggagaaggaatatcgcgagggtcgcgattggatcgagcgaaaattctcactggacaatatcagcgcagagttgagtgttttcgaaacgaacattcgttttgttggcggcatgctgacgctgtacgcctttacgggcgatccactgtacaaggagaaggcccagcacgttgccgacaagctgctgcccgccttccaaacaccaacgggtattccctacgcgctggtcaacaccaagaccggtgtggccaagaactacggctgggcatccggcggcagttctatcctatccgaatttggcacactgcatctggaatttgcctatctgagcgacattaccgggaatccactgtatcgggaacgagtccagaccattcgccaagtgctcaaggagatcgagaaaccaaagggcctctatcccaacttccttaatcccaagacaggcaaatgggggcaacttcacatgtcattgggcgctctgggcgacagctactacgagtacttgctgaaggcctggctgcaatccggccaaacggatgaggaagcccgcgagatgttcgacgaggcaatgctggccattctggataagatggtccgcacaagtcccggcggactgacatacgtctctgatctcaagttcgacaggctggagcataagatggaccatttggcttgcttctcgggtggcctcttcgctttgggagcggctacacgtcaaaatgactatacggacaagtacatggaggtgggcaagggcattacgaatacctgccacgagagctacatcagagcacccactcagctgggacccgaggcctttagattcagcgaagctgtggaggcgcgagcactgagatcgcaggagaagtactacattctacggccagagactttcgagagctactttgtgctgtggcgactcacgcacgaccagaaataccgcgactggggctgggaggcggtcctcgccctggagaagcactgccgcacggcgcacggatattgtggcctgcgcaacgtctaccagcaggagccgcaaaaggacgacgttcagcaaagcttcttcctcgccgaaacgcttaagtacctgtacttgctgttctcggacgattcggtgctgccgctggacgaatgggtgttcaacacggaggcccatccgctgccgatcaagggtgcgaatgcgtactatagacaggcgcccgtaacgcttccggtttcgaacgcatcgtaa

SEQ ID NO: 58698 - protein, 643 aa, Drosophila melanogaster
MCPKTSKTTPLLLIGGICFVIVLVGITGITLINNINLSNIIRLNEKVASDSVSNNENQIKELNYVNNHPRNVYLKLNASSRDDEDDEQMQKEQEQLELPKISAVIGGSKPKVEDNQVKESSEVISPSTSTFSMRSSAGELTSTSAPLSSIVSVTAPPMPFGGVKYNQSSGLIDYEKRNQVVKMMEHAWHNYKLYAWGKNELRPLSQRPHSASIFGSYDLGATIVDGLDTLYIMGLEKEYREGRDWIERKFSLDNISAELSVFETNIRFVGGMLTLYAFTGDPLYKEKAQHVADKLLPAFQTPTGIPYALVNTKTGVAKNYGWASGGSSILSEFGTLHLEFAYLSDITGNPLYRERVQTIRQVLKEIEKPKGLYPNFLNPKTGKWGQLHMSLGALGDSYYEYLLKAWLQSGQTDEEAREMFDEAMLAILDKMVRTSPGGLTYVSDLKFDRLEHKMDHLACFSGGLFALGAATRQNDYTDKYMEVGKGITNTCHESYIRAPTQLGPEAFRFSEAVEARALRSQEKYYILRPETFESYFVLWRLTHDQKYRDWGWEAVLALEKHCRTAHGYCGLRNVYQQEPQKDDVQQSFFLAETLKYLYLLFSDDSVLPLDEWVFNTEAHPLPIKGANAYYRQAPVTLPVSNAS

SEQ ID NO: 58699 - DNA, 1962 bp, Homo sapiens
  CDS (1)..(1962)
atgcccgtggggggcctgttgccgctcttcagcagccccgcgggcggcgtcctgggcggggggctcggcggcggcggtggcaggaaggggtcgggccccgccgccctccgcctgacggagaagttcgtgctgctgctggtattcagcgccttcatcacgctctgcttcggggcgatcttcttcctgccagactcctccaagctgctcagcggggtcctgttccactccagccccgccttgcagccggccgccgaccacaagcccgggcccggggcgcgcgccgaggacgcggccgaggggcgagcccggcgccgcgaggagggggcacccggggacccggaggccgccctggaggacaacttggccaggatccgcgaaaaccacgagcgggctctcagggaagccaaggagaccctgcagaagctgcccgaggagatccaaagagacatcctactggagaagaagaaggtggcccaggaccagctgcgtgacaaggcgccgttcagaggcctgcccccggtggacttcgtgcccccaatcggggtggagagccgggagcccgccgacgccgccatccgcgagaaaagggcaaagatcaaagagatgatgaaacatgcttggaataattataaaggttatgcctggggattaaatgaactcaaacctatatcaaaaggaggccattcaagcagtttgtttggtaacatcaaaggagcaactatagtagatgccctggatacactttttattatggaaatgaaacatgaatttgaagaagcaaaatcatgggttgaagaaaatttagattttaatgtgaatgctgaaatttctgtctttgaagtaaatatacgctttgttggtggactactctcagcctactatctgtctggagaagagatttttcgaaagaaagcagtggaacttggggtaaaattgctacctgcatttcatactccctctggaataccttgggcattgctgaatatgaaaagtggtattggaaggaactggccctgggcctctggaggcagcagtattctggcagaatttggaaccctgcatttggagtttatgcacttgagccacttatcaggaaaccccatctttgctgaaaaggtaatgaatattcgaacagtactgaacaaactggaaaaaccacaaggcctttatcctaactatctgaatcccagtagtggacagtggggtcaacatcatgtatcagttggaggacttggagacagcttctatgagtatttgctgaaggcctggttaatgtctgacaagacagatctggaagctaagaagatgtattttgatgctgttcaggctatcgagactcatttgatccgcaagtctagcagcggactaacttatatcgcagagtggaaagggggcctcctggagcacaagatgggccacctgacctgcttcgcggggggcatgttcgcactcggggctgatgcagctcccgaaggcatggcccaacactaccttgaactcggggctgaaattgcccgtacttgtcatgaatcatataatcgaacatttatgaaactgggaccagaagctttcagatttgatggtggtgttgaagccatcgctacaagacaaaatgaaaaatactacatcttacggccagaagttatggagacttacatgtatatgtggagactgactcatgatccaaagtacaggaaatgggcctgggaagccgtagaggccttggaaaaccattgcagagtgaatggaggctattcaggcctaagggatgtttaccttcttcatgagagttatgatgatgtgcagcagagtttcttcctggcagagacattgaaatatttgtacctaatattttctgacgacgatcttcttccactggagcattggatcttcaatagcgaggcacatcttctccctatcctccctaaagataaaaaggaagttgaaatcagagaggaataa

SEQ ID NO: 58700 - protein, 653 aa, Homo sapiens
MPVGGLLPLFSSPAGGVLGGGLGGGGGRKGSGPAALRLTEKFVLLLVFSAFITLCFGAIFFLPDSSKLLSGVLFHSSPALQPAADHKPGPGARAEDAAEGRARRREEGAPGDPEAALEDNLARIRENHERALREAKETLQKLPEEIQRDILLEKKKVAQDQLRDKAPFRGLPPVDFVPPIGVESREPADAAIREKRAKIKEMMKHAWNNYKGYAWGLNELKPISKGGHSSSLFGNIKGATIVDALDTLFIMEMKHEFEEAKSWVEENLDFNVNAEISVFEVNIRFVGGLLSAYYLSGEEIFRKKAVELGVKLLPAFHTPSGIPWALLNMKSGIGRNWPWASGGSSILAEFGTLHLEFMHLSHLSGNPIFAEKVMNIRTVLNKLEKPQGLYPNYLNPSSGQWGQHHVSVGGLGDSFYEYLLKAWLMSDKTDLEAKKMYFDAVQAIETHLIRKSSSGLTYIAEWKGGLLEHKMGHLTCFAGGMFALGADAAPEGMAQHYLELGAEIARTCHESYNRTFMKLGPEAFRFDGGVEAIATRQNEKYYILRPEVMETYMYMWRLTHDPKYRKWAWEAVEALENHCRVNGGYSGLRDVYLLHESYDDVQQSFFLAETLKYLYLIFSDDDLLPLEHWIFNSEAHLLPILPKDKKEVEIREE

SEQ ID NO: 58701 - DNA, 1968 bp, Mus musculus
  CDS (1)..(1968)
atgcccgtggggggcctgttgccgctcttcagtagccctgggggcggcggcctgggcagtggcctgggcggggggcttggcggcgggaggaaggggtctggccccgctgccttccgcctcaccgagaagttcgtgctgctgctggtgttcagcgccttcatcacgctctgcttcggggcaatcttcttcctgcctgactcctccaagctgctcagcggggtcctgttccactccaaccctgccttgcagccgccggcggagcacaagcccgggctcggggcgcgtgcggaggatgccgccgaggggagagtccggcaccgcgaggaaggcgcgcctggggaccctggagctggactggaagacaacttagccaggatccgcgaaaaccacgagcgggctctcagggaagccaaggagaccctgcagaagctgccggaggagatccaaagagacattctgctggagaaggaaaaggtggcccaggaccagctgcgtgacaaggatctgtttaggggcttgcccaaggtggacttcctgccccccgtcggggtagagaaccgggagcccgctgacgccaccatccgtgagaagagggcaaagatcaaagagatgatgacccatgcttggaataattataaacgctatgcgtggggcttgaacgaactgaaacctatatcaaaagaaggccattcaagcagtttgtttggcaacatcaaaggagctacaatagtagatgccctggatacccttttcattatgggcatgaagactgaatttcaagaagctaaatcgtggattaaaaaatatttagattttaatgtgaatgctgaagtttctgtttttgaagtcaacatacgcttcgtcggtggactgctgtcagcctactatttgtccggagaggagatatttcgaaagaaagcagtggaacttggggtaaaattgctacctgcatttcatactccctctggaataccttgggcattgctgaatatgaaaagtgggatcgggcggaactggccctgggcctctggaggcagcagtatcctggccgaatttggaactctgcatttagagtttatgcacttgtcccacttatcaggagacccagtctttgccgaaaaggttatgaaaattcgaacagtgttgaacaaactggacaaaccagaaggcctttatcctaactatctgaaccccagtagtggacagtggggtcaacatcatgtgtcggttggaggacttggagacagcttttatgaatatttgcttaaggcgtggttaatgtctgacaagacagatctcgaagccaagaagatgtattttgatgctgttcaggccatcgagactcacttgatccgcaagtcaagtgggggactaacgtacatcgcagagtggaaggggggcctcctggaacacaagatgggccacctgacgtgctttgcaggaggcatgtttgcacttggggcagatggagctccggaagcccgggcccaacactaccttgaactcggagctgaaattgcccgcacttgtcatgaatcttataatcgtacatatgtgaagttgggaccggaagcgtttcgatttgatggcggtgtggaagctattgccacgaggcaaaatgaaaagtattacatcttacggcccgaggtcatcgagacatacatgtacatgtggcgactgactcacgaccccaagtacaggacctgggcctgggaagccgtggaggctctagaaagtcactgcagagtgaacggaggctactcaggcttacgggatgtttacattgcccgtgagagttatgacgatgtccagcaaagtttcttcctggcagagacactgaagtatttgtacttgatattttccgatgatgaccttcttccactagaacactggatcttcaacaccgaggctcatcctttccctatactccgtgaacagaagaaggaaattgatggcaaagagaaatga

SEQ ID NO: 58702 - protein, 655 aa, Mus musculus
MPVGGLLPLFSSPGGGGLGSGLGGGLGGGRKGSGPAAFRLTEKFVLLLVFSAFITLCFGAIFFLPDSSKLLSGVLFHSNPALQPPAEHKPGLGARAEDAAEGRVRHREEGAPGDPGAGLEDNLARIRENHERALREAKETLQKLPEEIQRDILLEKEKVAQDQLRDKDLFRGLPKVDFLPPVGVENREPADATIREKRAKIKEMMTHAWNNYKRYAWGLNELKPISKEGHSSSLFGNIKGATIVDALDTLFIMGMKTEFQEAKSWIKKYLDFNVNAEVSVFEVNIRFVGGLLSAYYLSGEEIFRKKAVELGVKLLPAFHTPSGIPWALLNMKSGIGRNWPWASGGSSILAEFGTLHLEFMHLSHLSGDPVFAEKVMKIRTVLNKLDKPEGLYPNYLNPSSGQWGQHHVSVGGLGDSFYEYLLKAWLMSDKTDLEAKKMYFDAVQAIETHLIRKSSGGLTYIAEWKGGLLEHKMGHLTCFAGGMFALGADGAPEARAQHYLELGAEIARTCHESYNRTYVKLGPEAFRFDGGVEAIATRQNEKYYILRPEVIETYMYMWRLTHDPKYRTWAWEAVEALESHCRVNGGYSGLRDVYIARESYDDVQQSFFLAETLKYLYLIFSDDDLLPLEHWIFNTEAHPFPILREQKKEIDGKEK

SEQ ID NO: 58703 - DNA, 1980 bp, Sus scrofa
  CDS (1)..(1980)
atgccggtggggggcctgttgccactcttcagcagcccggcgggcggcggcctgggcggcggcctgggtggggggctcggcggcggcggcggcggcggcggcagaaaggggtcgggcccctccgccttccgcctgacggagaagttcgtgctgctgttggtgttcagcgccttcatcacgctctgcttcggagcgatcttcttcctgcccgactcttccaagctgctcagcggggtcctgttccactccagccccgccctgcagccagccgctgaccacaagccggggcccggggcgcgcgccgaggacgcggcagatgggcgagcccggcccggagaagagggcgctcccggggaccccgcggccgccctagaggacaacttggccaggatccgcgaaaaccacgagcgagctttgatggaagccaaggagactctgcagaagctgcccgaggagatccaaagagatatcctgatggagaaggagaaggtggcccaggaccagatgagtaacaggatggggttcaggctgcccccagtgtacttagtacccctcatcggggcgattgaccgggagccggccgacgccgctgtccgcgagaaaagggcaaagatcaaagagatgatgaaacatgcctggaataattataaactttatgcctggggaaaaaatgaactgaagcctgtatcaaaaggaggccattcaagcagtttgtttggtaatatcaaaggagcaacaatagtagatgccctggatacactttttattatgaaaatgaaaaacgaatttgaagaggcaaaagcatgggttgaagaacatctaaactttaatgtgaatgctgaagtttctgtttttgaagtaaatatacgctttattggtggactaatctcagcttactatctgtctggagaagagatatttcgaaagaaagcagtggaacttggggtaaaattgctacctgcattttatactccctctggaataccttgggcattgctgaatataaaaagtgggattggaaggaattggccatgggcctctggaggcagcagtattttggcagaatttggaactctgcatttggaatttatacacttgagctacttatcaggaaaccccttctttgctgaaaaggtaatgaatattcgaaaagtgctaaacaacctggaaaaaccacaaggcctttatcctaactatctgaatcctaatagtggacagtggggtcaatatcatgtatcagtaggaggacttggagacagcttttatgaatatttgctaaaggcatggttaatgtctgacaagacagatctagaagctaagaagatgtattttgatgctattaaggcaattgagacacacttgatccggaagtcacgtaacggactgacttacatcgcagagtggaaagggggcctcctggaacacaagatgggccacctgacctgctttgctgggggtatgtttgcacttggagcagacgatgcacctgatggcctgacccaacactaccttcagctcggggctgagattgcccgtacctgtcatgaatcatatagtcgcacatttgtgaaactgggaccagaagctttcagatttgatggtggtgtggaagccattgctacaaggcaaaatgaaaaatactacattctacggccagaagttgttgagacttacctgtacatgtggcgactgactcatgatccaaagtacaggaagtgggcctgggaagccgtggaggccctggaaaaacactgcagggtgaatggaggctattctggcctcagggacgtttatgtgagtgcacagacctacgacgacgtgcagcagagcttcttcctggcagagacacttaaatatttgtacttaatattttctgatgatgatctgcttccactggaacattggatcttcaataccgaggcacatcctctccccgtgctctctaggaatataaagaaagttgaagacaatgagaaataa

SEQ ID NO: 58704 - protein, 659 aa, Sus scrofa
MPVGGLLPLFSSPAGGGLGGGLGGGLGGGGGGGGRKGSGPSAFRLTEKFVLLLVFSAFITLCFGAIFFLPDSSKLLSGVLFHSSPALQPAADHKPGPGARAEDAADGRARPGEEGAPGDPAAALEDNLARIRENHERALMEAKETLQKLPEEIQRDILMEKEKVAQDQMSNRMGFRLPPVYLVPLIGAIDREPADAAVREKRAKIKEMMKHAWNNYKLYAWGKNELKPVSKGGHSSSLFGNIKGATIVDALDTLFIMKMKNEFEEAKAWVEEHLNFNVNAEVSVFEVNIRFIGGLISAYYLSGEEIFRKKAVELGVKLLPAFYTPSGIPWALLNIKSGIGRNWPWASGGSSILAEFGTLHLEFIHLSYLSGNPFFAEKVMNIRKVLNNLEKPQGLYPNYLNPNSGQWGQYHVSVGGLGDSFYEYLLKAWLMSDKTDLEAKKMYFDAIKAIETHLIRKSRNGLTYIAEWKGGLLEHKMGHLTCFAGGMFALGADDAPDGLTQHYLQLGAEIARTCHESYSRTFVKLGPEAFRFDGGVEAIATRQNEKYYILRPEVVETYLYMWRLTHDPKYRKWAWEAVEALEKHCRVNGGYSGLRDVYVSAQTYDDVQQSFFLAETLKYLYLIFSDDDLLPLEHWIFNTEAHPLPVLSRNIKKVEDNEK

SEQ ID NO: 58705 - DNA, 2100 bp, Homo sapiens
  CDS (1)..(2100)
atggctgcctgcgagggcaggagaagcggagctctcggttcctctcagtcggacttcctgacgccgccagtgggcggggccccttgggccgtcgccaccactgtagtcatgtacccaccgccgccgccgccgcctcatcgggacttcatctcggtgacgctgagctttggcgagagctatgacaacagcaagagttggcggcggcgctcgtgctggaggaaatggaagcaactgtcgagattgcagcggaatatgattctcttcctccttgcctttctgcttttctgtggactcctcttctacatcaacttggctgaccattggaaagctctggctttcaggctagaggaagagcagaagatgaggccagaaattgctgggttaaaaccagcaaatccacccgtcttaccagctcctcagaaggcggacaccgaccctgagaacttacctgagatttcgtcacagaagacacaaagacacatccagcggggaccacctcacctgcagattagacccccaagccaagacctgaaggatgggacccaggaggaggccacaaaaaggcaagaagcccctgtggatccccgcccggaaggagatccgcagaggacagtcatcagctggaggggagcggtgatcgagcctgagcagggcaccgagctcccttcaagaagagcagaagtgcccaccaagcctcccctgccaccggccaggacacagggcacaccagtgcatctgaactatcgccagaagggcgtgattgacgtcttcctgcatgcatggaaaggataccgcaagtttgcatggggccatgacgagctgaagcctgtgtccaggtccttcagtgagtggtttggcctcggtctcacactgatcgacgcgctggacaccatgtggatcttgggtctgaggaaagaatttgaggaagccaggaagtgggtgtcgaagaagttacactttgaaaaggacgtggacgtcaacctgtttgagagcacgatccgcatcctgggggggctcctgagtgcctaccacctgtctggggacagcctcttcctgaggaaagctgaggattttggaaatcggctaatgcctgccttcagaacaccatccaagattccttactcggatgtgaacatcggtactggagttgcccacccgccacggtggacctccgacagcactgtggccgaggtgaccagcattcagctggagttccgggagctctcccgtctcacaggggataagaagtttcaggaggcagtggagaaggtgacacagcacatccacggcctgtctgggaagaaggatgggctggtgcccatgttcatcaatacccacagtggcctcttcacccacctgggcgtattcacgctgggcgccagggccgacagctactatgagtacctgctgaagcagtggatccagggcgggaagcaggagacacagctgctggaagactacgtggaagccatcgagggtgtcagaacgcacctgctgcggcactccgagcccagtaagctcacctttgtgggggagcttgcccacggccgcttcagtgccaagatggaccacctggtgtgcttcctgccagggacgctggctctgggcgtctaccacggcctgcccgccagccacatggagctggcccaggagctcatggagacttgttaccagatgaaccggcagatggagacggggctgagtcccgagatcgtgcacttcaacctttacccccagccgggccgtcgggacgtggaggtcaagccagcagacaggcacaacctgctgcggccagagaccgtggagagcctgttctacctgtaccgcgtcacaggggaccgcaaataccaggactggggctgggagattctgcagagcttcagccgattcacacgggtcccctcgggtggctattcttccatcaacaatgtccaggatcctcagaagcccgagcctagggacaagatggagagcttcttcctgggggagacgctcaagtatctgttcttgctcttctccgatgacccaaacctgctcagcctggatgcctacgtgttcaacaccgaagcccaccctctgcctatctggacccctgcctag

SEQ ID NO: 58706 - protein, 699 aa, Homo sapiens
MAACEGRRSGALGSSQSDFLTPPVGGAPWAVATTVVMYPPPPPPPHRDFISVTLSFGESYDNSKSWRRRSCWRKWKQLSRLQRNMILFLLAFLLFCGLLFYINLADHWKALAFRLEEEQKMRPEIAGLKPANPPVLPAPQKADTDPENLPEISSQKTQRHIQRGPPHLQIRPPSQDLKDGTQEEATKRQEAPVDPRPEGDPQRTVISWRGAVIEPEQGTELPSRRAEVPTKPPLPPARTQGTPVHLNYRQKGVIDVFLHAWKGYRKFAWGHDELKPVSRSFSEWFGLGLTLIDALDTMWILGLRKEFEEARKWVSKKLHFEKDVDVNLFESTIRILGGLLSAYHLSGDSLFLRKAEDFGNRLMPAFRTPSKIPYSDVNIGTGVAHPPRWTSDSTVAEVTSIQLEFRELSRLTGDKKFQEAVEKVTQHIHGLSGKKDGLVPMFINTHSGLFTHLGVFTLGARADSYYEYLLKQWIQGGKQETQLLEDYVEAIEGVRTHLLRHSEPSKLTFVGELAHGRFSAKMDHLVCFLPGTLALGVYHGLPASHMELAQELMETCYQMNRQMETGLSPEIVHFNLYPQPGRRDVEVKPADRHNLLRPETVESLFYLYRVTGDRKYQDWGWEILQSFSRFTRVPSGGYSSINNVQDPQKPEPRDKMESFFLGETLKYLFLLFSDDPNLLSLDAYVFNTEAHPLPIWTPA

SEQ ID NO: 58707 - DNA, 1893 bp, Homo sapiens
  CDS (1)..(1893)
atgctcatgaggaaagtgcccggcttcgtcccggcctccccgtgggggctgcggctgccgcagaagttcctcttcctcctcttcctctcgggcctggtcaccctgtgcttcggggccctcttcctgctgccccactcctctcgcctcaagcgcctcttcctggccccccggacccagcagcctggtctggaagtggtggctgaaatcgccggccatgccccggcccgcgagcaggagccgcctcccaacccggcccccgccgcgccggccccgggcgaggatgaccccagcagctgggccagtccccgccgcaggaaaggggggctgcggcgcacccgccccactggaccccgcgaggaggccacggcggcccggggcaatagcatcccggcctccaggcccggggacgagggcgtccctttccgctttgacttcaacgcattccggagccgtctccgccacccggtcctgggaacgagggccgatgagagtcaggagccccagagccaagtgcgagcccagcgggagaaaatcaaggagatgatgcagtttgcttggcagagctataagcgttatgcaatggggaaaaacgaactccgtccactaacaaaagatggctacgagggtaacatgttcggaggcctcagcggggcaacagtcattgactccctcgataccctctacctcatggagctgaaggaggagttccaggaggccaaggcctgggtgggagagagcttccacctgaacgtgagcggagaagcatccttgtttgaggtgaacatccgctacatcgggggactcctctcagccttctacctgacaggagaagaggtgttccgaataaaggccatcaggctgggagagaagctcctgccggcgttcaacacccccacgggaatcccaaagggcgtggtgagcttcaaaagtgggaactggggctgggccacagccggcagcagcagcatcttggcggagtttggatccctgcacttggaattcttacacctcactgaactctctggcaaccaggtcttcgctgaaaaggtcaggaacatccgcaaggtcctcaggaagatcgaaaagccctttggcctctaccccaacttcctcagcccagtgagtgggaactgggtgcaacaccatgtctcagttggaggactcggggacagtttttatgaatatttgatcaaatcctggttgatgtcgggcaagacagatatggaggctaaaaatatgtactacgaagccttggaggcgatagagacctacttgctgaatgtctctcccggggggctgacctacattgccgagtggcgaggggggattctggaccacaagatggggcacctggcctgtttctccgggggcatgatcgcccttggcgccgaggatgccaaggaagaaaagagggcccactaccgagagctcgcagcccagatcaccaagacgtgtcacgagtcatacgcccgctcagacaccaaacttgggcctgaggccttctggtttaactccggcagagaggccgtggccacccagctgagcgagagctactacatcctccggccagaggtggtggagagctacatgtacctgtggcgacagacccacaaccccatctacagggagtggggctgggaggtggtgctggccttggagaaatactgtcggacagaagccggtttctctgggatccaagacgtgtacagtagcacccccaaccacgacaacaagcagcagagcttctttctagcggagacactaaagtatctctatcttctgttctctgaagatgacttgctctccctggaagactgggtgttcaacaccgaggcccacccactcccggtgaaccactcagacagctccggcagagcctggggcagacactga

SEQ ID NO: 58708 - protein, 630 aa, Homo sapiens
MLMRKVPGFVPASPWGLRLPQKFLFLLFLSGLVTLCFGALFLLPHSSRLKRLFLAPRTQQPGLEVVAEIAGHAPAREQEPPPNPAPAAPAPGEDDPSSWASPRRRKGGLRRTRPTGPREEATAARGNSIPASRPGDEGVPFRFDFNAFRSRLRHPVLGTRADESQEPQSQVRAQREKIKEMMQFAWQSYKRYAMGKNELRPLTKDGYEGNMFGGLSGATVIDSLDTLYLMELKEEFQEAKAWVGESFHLNVSGEASLFEVNIRYIGGLLSAFYLTGEEVFRIKAIRLGEKLLPAFNTPTGIPKGVVSFKSGNWGWATAGSSSILAEFGSLHLEFLHLTELSGNQVFAEKVRNIRKVLRKIEKPFGLYPNFLSPVSGNWVQHHVSVGGLGDSFYEYLIKSWLMSGKTDMEAKNMYYEALEAIETYLLNVSPGGLTYIAEWRGGILDHKMGHLACFSGGMIALGAEDAKEEKRAHYRELAAQITKTCHESYARSDTKLGPEAFWFNSGREAVATQLSESYYILRPEVVESYMYLWRQTHNPIYREWGWEVVLALEKYCRTEAGFSGIQDVYSSTPNHDNKQQSFFLAETLKYLYLLFSEDDLLSLEDWVFNTEAHPLPVNHSDSSGRAWGRH

SEQ ID NO: 58709 - DNA, 1698 bp, Candida albicans
  CDS (1)..(1698): transl_table=12
atgctattaaaaggttttatgttgtctttagtattatatgctgtgtaccatttagcatcaaatggtgggcaatttatgtttgatttctcgggtcaatcaaaatgggaaagagctcaactggaagttcgtcaagccatattagattcatggcatacctatgaaaagtatggttggggttatgatgtctatcatccaattaagcaagaaggggaaaatatgggtccaaaaccgttgggatggatgattgtggattcattagatactttgatgattatggattgtccagaagaagtcagtcgagccagagattggatcaagaatgatttggattacacttttgattataatgtcaacacatttgaaaccactattagaatgcttggtggtttattatcagcttatcatttcagcaatgacgatgtctatttggataaagcggtacaattggccaatgcattacacggggcctatgatagtccatcaggaataccatatctgtctgtcaatttgaaatcaggtaaaggtataaagaatcatgttgataatggtgcctcatccactgctgaagctgctactgttcaattagaaatgaaatatttatcgaaattgactggagaaattttgtggtggaacttggcagagaaagtaatgcaagtgttagaaagtaataaacctcaagatggtttggtgccaatttatgtcaacccagatactggtaaatatcaaggccatttgattagattggggtcacgtggagattcttattacgaatatttgttgaagcaatacttgcaaacaaataagcaagaacttgtctattgggatatgtatcgtgaatcggttgaaggtgtcaagaaacatcttgtgagtgattcttatccttcaggattgacgtttattggggaattggataatggtattggtggcaaattgtcaaccaagatggaccatttagtttgcttttacggtggattgttagcccttggtgctactggaggattgacattgaacgaggctcaaagtttaaaatcatggaatgaagaaagagaagctgactttaaacttggtgaagagttgacttatacttgttataagatgtaccacgatgttagtccaactggattgtcaccagaaattgttgttttcaatgaagatacttcaaaatccaaagattttattattaaacctttggatagacataacttacaacgtccagaaacagttgaatcattgttttatctttatagattaactggtgatgtcaaatatcgtgaaatgggatatgaaattttccaaaattttatcaagtacactaaagttgttaattcggaaggtgaagtttcattttcctcgctttccgatgtcacttctttcgattctaatggcttaccgaaattcaaagataacactgaatcattctggtgggcagaaactttgaaatatttgtatcttttgtttgatgacaccaataagattccattgacagattatgtctttaatactgaagcccatccattccctagatttgatactaatgattatttcaaaactggttggagaagaaaaattgatgagaatgaaaaggcacaaatgagagaatccaaagttattgataaaagtaatcttccggaagctcaaccagttgataaatcagctgatcaagaagctaaagaaattattgaagaaattgctgggtaa

SEQ ID NO: 58710 - protein, 565 aa, Candida albicans
MLLKGFMLSLVLYAVYHLASNGGQFMFDFSGQSKWERAQSEVRQAILDSWHTYEKYGWGYDVYHPIKQEGENMGPKPLGWMIVDSLDTLMIMDCPEEVSRARDWIKNDLDYTFDYNVNTFETTIRMLGGLLSAYHFSNDDVYLDKAVQLANALHGAYDSPSGIPYSSVNLKSGKGIKNHVDNGASSTAEAATVQLEMKYLSKLTGEILWWNLAEKVMQVLESNKPQDGLVPIYVNPDTGKYQGHLIRLGSRGDSYYEYLLKQYLQTNKQELVYWDMYRESVEGVKKHLVSDSYPSGLTFIGELDNGIGGKLSTKMDHLVCFYGGLLALGATGGLTLNEAQSLKSWNEEREADFKLGEELTYTCYKMYHDVSPTGLSPEIVVFNEDTSKSKDFIIKPLDRHNLQRPETVESLFYLYRLTGDVKYREMGYEIFQNFIKYTKVVNSEGEVSFSSLSDVTSFDSNGLPKFKDNTESFWWAETLKYLYLLFDDTNKIPLTDYVFNTEAHPFPRFDTNDYFKTGWRRKIDENEKAQMRESKVIDKSNLPEAQPVDKSADQEAKEIIEEIAG

SEQ ID NO: 58711 - DNA, 1650 bp, Saccharomyces cerevisiae
  CDS (1)..(1650)
atgaagaactctgtcggtatttcaattgcaaccattgttgctatcatagcagctatatactatgtgccatggtacgaacactttgagagaaagtcaccgggggccggagaaatgagagatcggattgaaagcatgttcttggaatcgtggagagactattccaagcatggctggggatacgatgtgtatggacctattgagcacacttcccataatatgcctcgtggcaaccagccgttaggctggattatcgtagattcagtggataccttgatgttaatgtataactcctccacactatacaaaagtgagttcgaggcagaaattcagagatcggagcattggataaacgatgttttggattttgatattgatgccgaagtgaatgtttttgaaactactattagaatgctaggtggtttattatccgcatatcatctatctgatgttttagaagtaggtaataagactgtctacttgaacaaagcaatagatttgggggataggcttgctttggcgttcttatccactcagaccggaattccatactcaagtataaaccttcatagtggccaagcggttaagaaccatgcagatgggggggcatcttctaccgcagaattcactacgctacaaatggaattcaaatatctggcgtatttgacaggaaatcgtacttattgggagctggtggagcgtgtttacgagccattatacaaaaataacgatcttctaaatacctacgatggattggttccaatttatacatttccagatactgggaagtttggtgcttcgactatccggttcggatcaagaggtgattctttttatgagtatttactaaaacaatatttattgacgcacgaaacactttattatgatctgtacagaaaatccatggaaggtatgaaaaagcatttattagcacaatccaaaccctcttctctgtggtacattggggaaagagaacaaggtctacatggacaactttctcctaagatggaccacctcgtgtgctttatggggggattgttagcatcaggctctactgagggcctttctattcatgaagcccgaagacgtccgtttttctctctttcccttgaaagaaaaagtgactgggatttggctaaagggataactgacacatgttatcaaatgtacaagcagtcttcctcggggcttgcgcctgaaatcgttgtcttcaatgatggaaacataaaacaggatggttggtggcggtcgtctgtgggtgatttttttgttaaaccactcgataggcacaacctacaaagaccagaaacggtggaatcgattatgttcatgtatcatttatctcatgatcacaaatatcgtgaatggggggcggaaatcgcaactagcttctttgaaaatacctgtgttgattgtaatgacccaaaattaaggcggttcaccagtttaagtgattgtatcacgttacctacaaagaaatctaacaatatggaaagtttctggttggcagagactttaaagtatttatatatattgtttttagacgagtttgatttgaccaaagttgttttcaacacagaagctcatccttttccagtattagacgaagaaatattaaaatcgcagtctctgaccacaggttggtcgttgtag

SEQ ID NO: 58712 - protein, 549 aa, Saccharomyces cerevisiae
MKNSVGISIATIVAIIAAIYYVPWYEHFERKSPGAGEMRDRIESMFLESWRDYSKHGWGYDVYGPIEHTSHNMPRGNQPLGWIIVDSVDTLMLMYNSSTLYKSEFEAEIQRSEHWINDVLDFDIDAEVNVFETTIRMLGGLLSAYHLSDVLEVGNKTVYLNKAIDLGDRLALAFLSTQTGIPYSSINLHSGQAVKNHADGGASSTAEFTTLQMEFKYLAYLTGNRTYWELVERVYEPLYKNNDLLNTYDGLVPIYTFPDTGKFGASTIRFGSRGDSFYEYLLKQYLLTHETLYYDLYRKSMEGMKKHLLAQSKPSSLWYIGEREQGLHGQLSPKMDHLVCFMGGLLASGSTEGLSIHEARRRPFFSLSLERKSDWDLAKGITDTCYQMYKQSSSGLAPEIVVFNDGNIKQDGWWRSSVGDFFVKPLDRHNLQRPETVESIMFMYHLSHDHKYREWGAEIATSFFENTCVDCNDPKLRRFTSLSDCITLPTKKSNNMESFWLAETLKYLYILFLDEFDLTKVVFNTEAHPFPVLDEEILKSQSLTTGWSL

SEQ ID NO: 58713 - DNA, 1566 bp, Schizosaccharomyces pombe
  CDS (1)..(1566)
atggttaaacgaaggactgtcaaatactttcttcgtcgaattttggcactctttgtattatgcgttccaatatattatttatacacgactgtccaacgacctcctggttataccaaacttaaaggctccacgagaagaaaagcgctgattaagaaaacattcatagaaagctggacagactatgaaacttatggctggggtaaagatgaatactatcctattattaaacgtggacggaattaccttaggaagggcatgggctggatgattattgattcccttgatacaatgatgattatgggccttgatgaacaagttttacgtgctcgtgaatgggttaataattctcttacttggaaccaagatgacgaagaagttagtgtttttgaaactactattcgtatattgggaggactcctttcttcttatcacttgtctcaagacaaactatacctagaccgcgcagtggacctagctgatcgtttgctagctgcttataatacctccacgggcttacctagatcaaatgtaaacctaggaactcgtaaatctagaaaaagaactagagagtatttcgtaagcactgctgaatccggaactgttcagatggagctacgttatttatcctatcttactggcgatcctaaatattggataacggctgacaagacaatggaggtgttgctaggagatgctacttggtctcatactggcttggttcctattacggtaaatttgattacaggcgcctacgttggtcgaaatattcgactgggttctcacggtgattcctactatgagtatttactgaaacaagatcttcaattattttcaagtggtacagtatataggaaagcgttcgatttgagtgttgatggaattattgaatatctccttaattatactactcctaatcactttgcctacatagcggaacttcccggtggattagaacacgctcaacttccaaaaatggatcacttagtatgttttttacctggcacacttatgtggggagcaaccaacggtacttcattagaagcagcacgtacttccaaaaattggggtacacgtcaagaacgtgatgtaaagctggctcaagaacttatgcgaacttgttatgaaatgtacaacatgacagctactggtttagcacctgaaattgtgttttttgatgttgaccagactaaaaatgaaatttatagcaagcgtcgtgaccaacataatttgatgaggccagagacggtagagagtctgtttattctttacagaataacgagagatgaaatatatagagaatggggatggaacatatttgtttcatttttgagatattctcgattgcctggccgagatgcatttacatgtttggatagtgtagagtcgaagaaggttaaagaccaaagggacaaaaccgaatcattttggtttgcggagacgctcaagtatctgtaccttctatttgaagacgattttagtattttgcctttaacaaactacaccttcaatacggaagctcatccatttccaaatattgaaaacaatatggacctgtacacggtgtaa

SEQ ID NO: 58714 - protein, 521 aa, Schizosaccharomyces pombe
MVKRRTVKYFLRRILALFVLCVPIYYLYTTVQRPPGYTKLKGSTRRKALIKKTFIESWTDYETYGWGKDEYYPIIKRGRNYLRKGMGWMIIDSLDTMMIMGLDEQVLRAREWVNNSLTWNQDDEEVSVFETTIRILGGLLSSYHLSQDKLYLDRAVDLADRLLAAYNTSTGLPRSNVNLGTRKSRKRTREYFVSTAESGTVQMELRYLSYLTGDPKYWITADKTMEVLLGDATWSHTGLVPITVNLITGAYVGRNIRLGSHGDSYYEYLLKQDLQLFSSGTVYRKAFDLSVDGIIEYLLNYTTPNHFAYIAELPGGLEHAQLPKMDHLVCFLPGTLMWGATNGTSLEAARTSKNWGTRQERDVKLAQELMRTCYEMYNMTATGLAPEIVFFDVDQTKNEIYSKRRDQHNLMRPETVESLFILYRITRDEIYREWGWNIFVSFLRYSRLPGRDAFTCLDSVESKKVKDQRDKTESFWFAETLKYLYLLFEDDFSILPLTNYTFNTEAHPFPNIENNMDLYTV

SEQ ID NO: 58715 - DNA, 24 bp, Artificial sequence
  Primer sequence
atggtttgctgcttatgggtgctt

SEQ ID NO: 58716 - DNA, 27 bp, Artificial sequence
  Primer sequence
tcatacaataaataagttgatgatggg

SEQ ID NO: 58717 - protein, 709 aa, Artificial sequence
  Consensus
  Variant (3)..(4): Xaa in position 3 to 4 is any amino acid
  Variant (6)..(8): Xaa in position 6 to 8 is any amino acid
  Variant (11)..(12): Xaa in position 11 to 12 is any amino acid
  Variant (16)..(16): Xaa in position 16 is any amino acid
  Variant (19)..(30): Xaa in position 19 to 30 is any amino acid
  Variant (31)..(46): Xaa in position 31 to 46 is any or no amino acid
  Variant (56)..(56): Xaa in position 56 is any amino acid
  Variant (59)..(62): Xaa in position 59 to 62 is any amino acid
  Variant (63)..(63): Xaa in position 63 is any or no amino acid
  Variant (65)..(66): Xaa in position 65 to 66 is any amino acid
  Variant (68)..(70): Xaa in position 68 to 70 is any amino acid
  Variant (72)..(74): Xaa in position 72 to 74 is any amino acid
  Variant (76)..(76): Xaa in position 76 is any amino acid
  Variant (77)..(111): Xaa in position 77 to 111 is any or no amino acid
  Variant (115)..(116): Xaa in position 115 to 116 is any amino acid
  Variant (119)..(119): Xaa in position 119 is any amino acid
  Variant (128)..(128): Xaa in position 128 is any or no amino acid
  Variant (130)..(134): Xaa in position 130 to 134 is any amino acid
  Variant (135)..(177): Xaa in position 135 to 177 is any or no amino acid
  Variant (179)..(180): Xaa in position 179 to 180 is any amino acid
  Variant (182)..(183): Xaa in position 182 to 183 is any amino acid
  Variant (186)..(186): Xaa in position 186 is any amino acid
  Variant (190)..(190): Xaa in position 190 is any amino acid
  Variant (193)..(193): Xaa in position 193 is any amino acid
  Variant (194)..(194): Xaa in position 194 is any or no amino acid
  Variant (196)..(196): Xaa in position 196 is any amino acid
  Variant (201)..(203): Xaa in position 201 to 203 is any amino acid
  Variant (207)..(208): Xaa in position 207 to 208 is any amino acid
  Variant (210)..(212): Xaa in position 210 to 212 is any amino acid
  Variant (213)..(239): Xaa in position 213 to 239 is any or no amino acid
  Variant (241)..(242): Xaa in position 241 to 242 is any or no amino acid
  Variant (244)..(246): Xaa in position 244 to 246 is any or no amino acid
  Variant (248)..(249): Xaa in position 248 to 249 is any or no amino acid
  Variant (253)..(254): Xaa in position 253 to 254 is any amino acid
  Variant (257)..(257): Xaa in position 257 is any amino acid
  Variant (261)..(263): Xaa in position 261 to 263 is any amino acid
  Variant (265)..(274): Xaa in position 265 to 274 is any amino acid
  Variant (276)..(283): Xaa in position 276 to 283 is any amino acid
  Variant (284)..(288): Xaa in position 284 to 288 is any or no amino acid
  Variant (290)..(293): Xaa in position 290 to 293 is any amino acid
  Variant (295)..(297): Xaa in position 295 to 297 is any amino acid
  Variant (300)..(300): Xaa in position 300 is any amino acid
  Variant (302)..(307): Xaa in position 302 to 307 is any amino acid
  Variant (308)..(308): Xaa in position 308 is any or no amino acid
  Variant (312)..(313): Xaa in position 312 to 313 is any amino acid
  Variant (323)..(324): Xaa in position 323 to 324 is any or no amino acid
  Variant (326)..(377): Xaa in position 326 to 377 is any or no amino acid
  Variant (379)..(384): Xaa in position 379 to 384 is any or no amino acid
  Variant (386)..(387): Xaa in position 386 to 387 is any or no amino acid
  Variant (389)..(429): Xaa in position 389 to 429 is any or no amino acid
  Variant (431)..(432): Xaa in position 431 to 432 is any or no amino acid
  Variant (434)..(435): Xaa in position 434 to 435 is any or no amino acid
  Variant (437)..(437): Xaa in position 437 is any amino acid
  Variant (438)..(439): Xaa in position 438 to 439 is any or no amino acid
  Variant (441)..(441): Xaa in position 441 is any amino acid
  Variant (443)..(456): Xaa in position 443 to 456 is any amino acid
  Variant (457)..(472): Xaa in position 457 to 472 is any or no amino acid
  Variant (474)..(496): Xaa in position 474 to 496 is any amino acid
  Variant (497)..(561): Xaa in position 497 to 561 is any or no amino acid
  Variant (566)..(566): Xaa in position 566 is any amino acid
  Variant (570)..(572): Xaa in position 570 to 572 is any amino acid
  Variant (576)..(576): Xaa in position 576 is any amino acid
  Variant (578)..(581): Xaa in position 578 to 581 is any amino acid
  Variant (583)..(585): Xaa in position 583 to 585 is any amino acid
  Variant (587)..(597): Xaa in position 587 to 597 is any amino acid
  Variant (599)..(601): Xaa in position 599 to 601 is any amino acid
  Variant (603)..(617): Xaa in position 603 to 617 is any amino acid
  Variant (618)..(650): Xaa in position 618 to 650 is any or no amino acid
  Variant (658)..(658): Xaa in position 658 is any amino acid
  Variant (666)..(670): Xaa in position 666 to 670 is any amino acid
  Variant (672)..(675): Xaa in position 672 to 675 is any amino acid
  Variant (676)..(699): Xaa in position 676 to 699 is any or no amino acid
  Variant (703)..(703): Xaa in position 703 is any amino acid
  Variant (708)..(708): Xaa in position 708 is any amino acid
AWXXYXXXAWXXDELXPIXXXXXXXXXXXXXXXXXXXXXXXXXXXXTLIDALDTLXIMXXXXXFXXAXXXVXXXLXXXXXXXXXXXXXXXXXXXXXXXXXXXXXXXXXXXXVFEXXIRXLGGLLSAHXLXXXXXXXXXXXXXXXXXXXXXXXXXXXXXXXXXXXXXXXXXXXXXXXXLXXAXXLAXRLLXAFXXTXTGIPXXXVNLXXGXXXXXXXXXXXXXXXXXXXXXXXXXXXXXXSXXAXXXTXXLEFXXLSXLTGXXXFXXXXXXXXXXLXXXXXXXXXXXXXLXXXXIXXXTGXWXXXXXXXLGAXXDSYYEYLLKXXIXXXXXXXXXXXXXXXXXXXXXXXXXXXXXXXXXXXXXXXXXXXXXXXXXXXXFXXXXXXIXXHXXXXXXXXXXXXXXXXXXXXXXXXXXXXXXXXXXXXXXXXXLXXFXXGXXXLXGXXXXXXXXXXXXXXXXXXXXXXXXXXXXXXLXXXXXXXXXXXXXXXXXXXXXXXXXXXXXXXXXXXXXXXXXXXXXXXXXXXXXXXXXXXXXXXXXXXXXXXXXXXXXXXXXXXXXXXXLRPEXVESXXXLYRXTXXXXYXXXGXXXXXXXXXXXKXXXGXXXXXXXXXXXXXXXXXXXXXXXXXXXXXXXXXXXXXXXXXXXXXXXXSFFLAETXKYLYLLFXXXXXLXXXXXXXXXXXXXXXXXXXXXXXXXXXXYVFXTEAHXL

SEQ ID NO: 58718 - protein, 13 aa, Artificial sequence
  Consensus
  Variant (2)..(4): Xaa in position 2 to 4 is any or no amino acid
  Variant (6)..(6): Xaa in position 6 is any amino acid
  Variant (7)..(7): Xaa in position 7 is Gly, Asn or Pro
  Variant (8)..(8): Xaa in position 8 is any amino acid
  Variant (9)..(9): Xaa in position 9 is Asp or Asn
  Variant (10)..(12): Xaa in position 10 to 12 is any amino acid
YXXXAXXXXXXXP

SEQ ID NO: 58719 - protein, 6 aa, Artificial sequence
  Consensus
  Variant (2)..(2): Xaa in position 2 is Asn, Ser or Thr
  Variant (5)..(5): Xaa in position 5 is Ala or Gly
FXTEXH

SEQ ID NO: 58720 - protein, 8 aa, Artificial sequence
  Consensus
  Variant (2)..(2): Xaa in position 2 is Ile, Leu, Met or Val
  Variant (3)..(3): Xaa in position 3 is Ile, Leu or Val
  Variant (5)..(5): Xaa in position 5 is Ala, Gly, Asn, Ser, Thr or Val
  Variant (7)..(7): Xaa in position 7 is Asp, Gly, Ser or Thr
  Variant (8)..(8): Xaa in position 8 is Ser or Thr
TXXDXLXX

SEQ ID NO: 58721 - protein, 13 aa, Artificial sequence
  Consensus
  Variant (3)..(3): Xaa in position 3 is Ala, Cys, Ser, Thr or Val
  Variant (4)..(4): Xaa in position 4 is any amino acid
  Variant (7)..(8): Xaa in position 7 to 8 is any amino acid
  Variant (10)..(10): Xaa in position 10 is Gly or Ser
  Variant (12)..(12): Xaa in position 12 is Ile or Leu
FEXXIRXXGXLXS

SEQ ID NO: 58722 - protein, 17 aa, Artificial sequence
  Consensus
  Variant (2)..(2): Xaa in position 2 is any amino acid
  Variant (3)..(3): Xaa in position 3 is Ala, Gly or Pro
  Variant (4)..(6): Xaa in position 4 to 6 is any amino acid
  Variant (7)..(7): Xaa in position 7 is Ser or Thr
  Variant (8)..(8): Xaa in position 8 is any amino acid
  Variant (9)..(9): Xaa in position 9 is Ser or Thr
  Variant (10)..(10): Xaa in position 10 is any amino acid
  Variant (11)..(11): Xaa in position 11 is Ile, Leu, Met or Val
  Variant (13)..(13): Xaa in position 13 is any amino acid
  Variant (14)..(14): Xaa in position 14 is Ala, Gly, Asn, Pro, Ser or Thr
  Variant (15)..(16): Xaa in position 15 to 16 is any amino acid
LXXXXXXXXXXPXXXXN

SEQ ID NO: 58723 - protein, 17 aa, Artificial sequence
  Consensus
  Variant (2)..(3): Xaa in position 2 to 3 is any amino acid
  Variant (4)..(4): Xaa in position 4 is Ala, Gly, Ser or Thr
  Variant (5)..(5): Xaa in position 5 is Cys, Ser or Thr
  Variant (6)..(7): Xaa in position 6 to 7 is any amino acid
  Variant (8)..(8): Xaa in position 8 is Phe, Ile, Leu, Met or Val
  Variant (11)..(12): Xaa in position 11 to 12 is any amino acid
  Variant (13)..(15): Xaa in position 13 to 15 is any or no amino acid
  Variant (17)..(17): Xaa in position 17 is Ser or Thr
AXXXXXXXEFXXXXXLX

SEQ ID NO: 58724 - protein, 14 aa, Artificial sequence
  Consensus
  Variant (2)..(2): Xaa in position 2 is Ala, Gly, Ser or Thr
  Variant (3)..(3): Xaa in position 3 is any amino acid
  Variant (4)..(4): Xaa in position 4 is Ala, Gly, Ile, Leu or Val
  Variant (7)..(7): Xaa in position 7 is any or no amino acid
  Variant (9)..(9): Xaa in position 9 is any or no amino acid
  Variant (13)..(13): Xaa in position 13 is any amino acid
GXXXDSXYXEYLXK

SEQ ID NO: 58725 - protein, 11 aa, Artificial sequence
  Consensus
  Variant (2)..(2): Xaa in position 2 is any amino acid
  Variant (3)..(3): Xaa in position 3 is Ala or Cys
  Variant (5)..(5): Xaa in position 5 is any amino acid
  Variant (6)..(6): Xaa in position 6 is Gly, Pro or Ser
  Variant (8)..(8): Xaa in position 8 is any amino acid
  Variant (9)..(10): Xaa in position 9 to 10 is any or no amino acid
LXXFXXGXXXL

SEQ ID NO: 58726 - protein, 32 aa, Artificial sequence
  Consensus
  Variant (5)..(5): Xaa in position 5 is any amino acid
  Variant (6)..(6): Xaa in position 6 is Phe, Ile, Met or Val
  Variant (8)..(8): Xaa in position 8 is Ala, Ser or Thr
  Variant (9)..(12): Xaa in position 9 to 12 is any amino acid
  Variant (13)..(13): Xaa in position 13 is Phe, Trp or Tyr
  Variant (14)..(15): Xaa in position 14 to 15 is any amino acid
  Variant (17)..(17): Xaa in position 17 is any amino acid
  Variant (18)..(18): Xaa in position 18 is Asp or Asn
  Variant (19)..(24): Xaa in position 19 to 24 is any amino acid
  Variant (25)..(25): Xaa in position 25 is Ala, Gly or Val
  Variant (26)..(31): Xaa in position 26 to 31 is any amino acid
  Variant (32)..(32): Xaa in position 32 is Phe, Ile, Leu or Val
LRPEXXEXXXXXXXXTXXXXXXXXXXXXXXXX

SEQ ID NO: 58727 - protein, 16 aa, Artificial sequence
  Consensus
  Variant (2)..(2): Xaa in position 2 is any or no amino acid
  Variant (4)..(5): Xaa in position 4 to 5 is any amino acid
  Variant (6)..(6): Xaa in position 6 is any or no amino acid
  Variant (9)..(9): Xaa in position 9 is any amino acid
  Variant (12)..(12): Xaa in position 12 is Phe or Leu
  Variant (13)..(13): Xaa in position 13 is Phe, Trp or Tyr
  Variant (15)..(15): Xaa in position 15 is Ile or Leu
SXFXXXETXKYXXLXF

SEQ ID NO: 58728 - DNA, 243 bp, Saccharomyces cerevisiae
  CDS (1)..(243)
atgccacattccgagaaactgaaaggcaaaaaagaaaaagccttttttttcctgccgcgaaagtttaatttgcctaccggcgttcctattggagtcaggaaaagatcactaggaattacagctgtgagaacatactctggggctggcgtaggcacacaatccggtattcctaaagttttgtggtacaaaactccatacctaaaacataaaacaaatctcacccgtggatccttttattcataa

SEQ ID NO: 58729 - protein, 80 aa, Saccharomyces cerevisiae
MPHSEKLKGKKEKAFFFLPRKFNLPTGVPIGVRKRSLGITAVRTYSGAGVGTQSGIPKVLWYKTPYLKHKTNLTRGSFYS

SEQ ID NO: 58730 - DNA, 25 bp, Artificial sequence
  Primer sequence
atgccacattccgagaaactgaaag

SEQ ID NO: 58731 - DNA, 26 bp, Artificial sequence
  Primer sequence
ttatgaataaaaggatccacgggtga

SEQ ID NO: 58732 - DNA, 1877 bp, Saccharomyces cerevisiae; identical to SEQ ID NO: 45527
  CDS (505)..(1791)

SEQ ID NO: 58733 - protein, 428 aa, Saccharomyces cerevisiae; identical to SEQ ID NO: 45528

SEQ ID NO: 58734 - DNA, 969 bp, Encephalitozoon cuniculi; identical to SEQ ID NO: 45529
  CDS (1)..(969): transl_table=11

SEQ ID NO: 58735 - protein, 322 aa, Encephalitozoon cuniculi; identical to SEQ ID NO: 45530

SEQ ID NO: 58736 - DNA, 1137 bp, Schizosaccharomyces pombe; identical to SEQ ID NO: 45531
  CDS (1)..(1137)

SEQ ID NO: 58737 - protein, 378 aa, Schizosaccharomyces pombe; identical to SEQ ID NO: 45532

SEQ ID NO: 58738 - DNA, 897 bp, Schizosaccharomyces pombe; identical to SEQ ID NO: 45533
  CDS (1)..(897)

SEQ ID NO: 58739 - protein, 298 aa, Schizosaccharomyces pombe; identical to SEQ ID NO: 45534

SEQ ID NO: 58740 - DNA, 1176 bp, Schizosaccharomyces pombe; identical to SEQ ID NO: 45535
  CDS (1)..(1176)

SEQ ID NO: 58741 - protein, 391 aa, Schizosaccharomyces pombe; identical to SEQ ID NO: 45536

SEQ ID NO: 58742 - DNA, 1317 bp, Schizosaccharomyces pombe; identical to SEQ ID NO: 45537
  CDS (1)..(1317)

SEQ ID NO: 58743 - protein, 438 aa, Schizosaccharomyces pombe; identical to SEQ ID NO: 45538

SEQ ID NO: 58744 - DNA, 1119 bp, Schizosaccharomyces pombe; identical to SEQ ID NO: 45539
  CDS (1)..(1119)

SEQ ID NO: 58745 - protein, 372 aa, Schizosaccharomyces pombe; identical to SEQ ID NO: 45540

SEQ ID NO: 58746 - DNA, 1173 bp, Schizosaccharomyces pombe; identical to SEQ ID NO: 45541
  CDS (1)..(1173)

SEQ ID NO: 58747 - protein, 390 aa, Schizosaccharomyces pombe; identical to SEQ ID NO: 45542

SEQ ID NO: 58748 - DNA, 1239 bp, Eremothecium gossypii; identical to SEQ ID NO: 45543
  CDS (1)..(1239)

SEQ ID NO: 58749 - protein, 412 aa, Eremothecium gossypii; identical to SEQ ID NO: 45544

SEQ ID NO: 58750 - DNA, 1263 bp, Eremothecium gossypii; identical to SEQ ID NO: 45545
  CDS (1)..(1263)

SEQ ID NO: 58751 - protein, 420 aa, Eremothecium gossypii; identical to SEQ ID NO: 45546

SEQ ID NO: 58752 - DNA, 1362 bp, Eremothecium gossypii; identical to SEQ ID NO: 45547
  CDS (1)..(1362)

SEQ ID NO: 58753 - protein, 453 aa, Eremothecium gossypii; identical to SEQ ID NO: 45548

SEQ ID NO: 58754 - DNA, 1284 bp, Eremothecium gossypii; identical to SEQ ID NO: 45549
  CDS (1)..(1284)

SEQ ID NO: 58755 - protein, 427 aa, Eremothecium gossypii; identical to SEQ ID NO: 45550

SEQ ID NO: 58756 - DNA, 1305 bp, Neurospora crassa; identical to SEQ ID NO: 45551
  CDS (1)..(1305)

SEQ ID NO: 58757 - protein, 434 aa, Neurospora crassa; identical to SEQ ID NO: 45552

SEQ ID NO: 58758 - DNA, 1512 bp, Neurospora crassa; identical to SEQ ID NO: 45553
  CDS (1)..(1512)

SEQ ID NO: 58759 - protein, 503 aa, Neurospora crassa; identical to SEQ ID NO: 45554

SEQ ID NO: 58760 - DNA, 1446 bp, Neurospora crassa; identical to SEQ ID NO: 45555
  CDS (1)..(1446)

SEQ ID NO: 58761 - protein, 481 aa, Neurospora crassa; identical to SEQ ID NO: 45556

SEQ ID NO: 58762 - DNA, 1311 bp, Neurospora crassa; identical to SEQ ID NO: 45557
  CDS (1)..(1311)

SEQ ID NO: 58763 - protein, 436 aa, Neurospora crassa; identical to SEQ ID NO: 45558

SEQ ID NO: 58764 - DNA, 1182 bp, Neurospora crassa; identical to SEQ ID NO: 45559
  CDS (1)..(1182)

SEQ ID NO: 58765 - protein, 393 aa, Neurospora crassa; identical to SEQ ID NO: 45560

SEQ ID NO: 58766 - DNA, 1185 bp, Magnaporthe grisea 70-15; identical to SEQ ID NO: 45561
  CDS (1)..(1185)

SEQ ID NO: 58767 - protein, 394 aa, Magnaporthe grisea 70-15; identical to SEQ ID NO: 45562

SEQ ID NO: 58768 - DNA, 1176 bp, Magnaporthe grisea 70-15; identical to SEQ ID NO: 45563
  CDS (1)..(1176)

SEQ ID NO: 58769 - protein, 391 aa, Magnaporthe grisea 70-15; identical to SEQ ID NO: 45564

SEQ ID NO: 58770 - DNA, 1317 bp, Magnaporthe grisea 70-15; identical to SEQ ID NO: 45565
  CDS (1)..(1317)

SEQ ID NO: 58771 - protein, 438 aa, Magnaporthe grisea 70-15; identical to SEQ ID NO: 45566

SEQ ID NO: 58772 - DNA, 1551 bp, Magnaporthe grisea 70-15; identical to SEQ ID NO: 45567
  CDS (1)..(1551)

SEQ ID NO: 58773 - protein, 516 aa, Magnaporthe grisea 70-15; identical to SEQ ID NO: 45568

SEQ ID NO: 58774 - DNA, 1527 bp, Gibberella zeae PH-1; identical to SEQ ID NO: 45569
  CDS (1)..(1527)

SEQ ID NO: 58775 - protein, 508 aa, Gibberella zeae PH-1; identical to SEQ ID NO: 45570

SEQ ID NO: 58776 - DNA, 1434 bp, Gibberella zeae PH-1; identical to SEQ ID NO: 45571
  CDS (1)..(1434)

SEQ ID NO: 58777 - protein, 477 aa, Gibberella zeae PH-1; identical to SEQ ID NO: 45572

SEQ ID NO: 58778 - DNA, 1185 bp, Gibberella zeae PH-1; identical to SEQ ID NO: 45573
  CDS (1)..(1185)

SEQ ID NO: 58779 - protein, 394 aa, Gibberella zeae PH-1; identical to SEQ ID NO: 45574

SEQ ID NO: 58780 - DNA, 1311 bp, Ustilago maydis 521; identical to SEQ ID NO: 45575
  CDS (1)..(1311)

SEQ ID NO: 58781 - protein, 436 aa, Ustilago maydis 521; identical to SEQ ID NO: 45576

SEQ ID NO: 58782 - DNA, 1188 bp, Ustilago maydis 521; identical to SEQ ID NO: 45577
  CDS (1)..(1188)

SEQ ID NO: 58783 - protein, 395 aa, Ustilago maydis 521; identical to SEQ ID NO: 45578

SEQ ID NO: 58784 - DNA, 1497 bp, Aspergillus nidulans FGSC A4; identical to SEQ ID NO: 45579
  CDS (1)..(1497)

SEQ ID NO: 58785 - protein, 498 aa, Aspergillus nidulans FGSC A4; identical to SEQ ID NO: 45580

SEQ ID NO: 58786 - DNA, 1350 bp, Aspergillus nidulans FGSC A4; identical to SEQ ID NO: 45581
  CDS (1)..(1350)

SEQ ID NO: 58787 - protein, 449 aa, Aspergillus nidulans FGSC A4; identical to SEQ ID NO: 45582

SEQ ID NO: 58788 - DNA, 1188 bp, Aspergillus nidulans FGSC A4; identical to SEQ ID NO: 45583
  CDS (1)..(1188)

SEQ ID NO: 58789 - protein, 395 aa, Aspergillus nidulans FGSC A4; identical to SEQ ID NO: 45584

SEQ ID NO: 58790 - DNA, 1206 bp, Candida glabrata CBS138; identical to SEQ ID NO: 45585
  CDS (1)..(1206)

SEQ ID NO: 58791 - protein, 401 aa, Candida glabrata CBS138; identical to SEQ ID NO: 45586

SEQ ID NO: 58792 - DNA, 1392 bp, Candida glabrata CBS138; identical to SEQ ID NO: 45587
  CDS (1)..(1392)

SEQ ID NO: 58793 - protein, 463 aa, Candida glabrata CBS138; identical to SEQ ID NO: 45588

SEQ ID NO: 58794 - DNA, 1275 bp, Candida glabrata CBS138; identical to SEQ ID NO: 45589
  CDS (1)..(1275)

SEQ ID NO: 58795 - protein, 424 aa, Candida glabrata CBS138; identical to SEQ ID NO: 45590

SEQ ID NO: 58796 - DNA, 1281 bp, Candida glabrata CBS138; identical to SEQ ID NO: 45591
  CDS (1)..(1281)

SEQ ID NO: 58797 - protein, 426 aa, Candida glabrata CBS138; identical to SEQ ID NO: 45592

SEQ ID NO: 58798 - DNA, 1236 bp, Candida glabrata CBS138; identical to SEQ ID NO: 45593
  CDS (1)..(1236)

SEQ ID NO: 58799 - protein, 411 aa, Candida glabrata CBS138; identical to SEQ ID NO: 45594

SEQ ID NO: 58800 - DNA, 1599 bp, Candida glabrata CBS138; identical to SEQ ID NO: 45595
  CDS (1)..(1599)

SEQ ID NO: 58801 - protein, 532 aa, Candida glabrata CBS138; identical to SEQ ID NO: 45596

SEQ ID NO: 58802 - DNA, 1434 bp, Candida glabrata CBS138; identical to SEQ ID NO: 45597
  CDS (1)..(1434)

SEQ ID NO: 58803 - protein, 477 aa, Candida glabrata CBS138; identical to SEQ ID NO: 45598

SEQ ID NO: 58804 - DNA, 1335 bp, Kluyveromyces lactis NRRL Y-1140; identical to SEQ ID NO: 45599
  CDS (1)..(1335)

SEQ ID NO: 58805 - protein, 444 aa, Kluyveromyces lactis NRRL Y-1140; identical to SEQ ID NO: 45600

SEQ ID NO: 58806 - DNA, 1284 bp, Kluyveromyces lactis NRRL Y-1140; identical to SEQ ID NO: 45601
  CDS (1)..(1284)

SEQ ID NO: 58807 - protein, 427 aa, Kluyveromyces lactis NRRL Y-1140; identical to SEQ ID NO: 45602

SEQ ID NO: 58808 - DNA, 1221 bp, Kluyveromyces lactis NRRL Y-1140; identical to SEQ ID NO: 45603
  CDS (1)..(1221)

SEQ ID NO: 58809 - protein, 406 aa, Kluyveromyces lactis NRRL Y-1140; identical to SEQ ID NO: 45604

SEQ ID NO: 58810 - DNA, 1569 bp, Kluyveromyces lactis NRRL Y-1140; identical to SEQ ID NO: 45605
  CDS (1)..(1569)

SEQ ID NO: 58811 - protein, 522 aa, Kluyveromyces lactis NRRL Y-1140; identical to SEQ ID NO: 45606

SEQ ID NO: 58812 - DNA, 1251 bp, Kluyveromyces lactis NRRL Y-1140; identical to SEQ ID NO: 45607
  CDS (1)..(1251)

SEQ ID NO: 58813 - protein, 416 aa, Kluyveromyces lactis NRRL Y-1140; identical to SEQ ID NO: 45608

SEQ ID NO: 58814 - DNA, 1233 bp, Kluyveromyces lactis NRRL Y-1140; identical to SEQ ID NO: 45609
  CDS (1)..(1233)

SEQ ID NO: 58815 - protein, 410 aa, Kluyveromyces lactis NRRL Y-1140; identical to SEQ ID NO: 45610

SEQ ID NO: 58816 - DNA, 1773 bp, Debaryomyces hansenii CBS767; identical to SEQ ID NO: 45611
  CDS (1)..(1773)

SEQ ID NO: 58817 - protein, 590 aa, Debaryomyces hansenii CBS767; identical to SEQ ID NO: 45612

SEQ ID NO: 58818 - DNA, 1515 bp, Debaryomyces hansenii CBS767; identical to SEQ ID NO: 45613
  CDS (1)..(1515)

SEQ ID NO: 58819 - protein, 504 aa, Debaryomyces hansenii CBS767; identical to SEQ ID NO: 45614

SEQ ID NO: 58820 - DNA, 1257 bp, Debaryomyces hansenii CBS767; identical to SEQ ID NO: 45615
  CDS (1)..(1257)

SEQ ID NO: 58821 - protein, 418 aa, Debaryomyces hansenii CBS767; identical to SEQ ID NO: 45616

SEQ ID NO: 58822 - DNA, 1320 bp, Debaryomyces hansenii CBS767; identical to SEQ ID NO: 45617
  CDS (1)..(1320)

SEQ ID NO: 58823 - protein, 439 aa, Debaryomyces hansenii CBS767; identical to SEQ ID NO: 45618

SEQ ID NO: 58824 - DNA, 1419 bp, Debaryomyces hansenii CBS767; identical to SEQ ID NO: 45619
  CDS (1)..(1419)

SEQ ID NO: 58825 - protein, 472 aa, Debaryomyces hansenii CBS767; identical to SEQ ID NO: 45620

SEQ ID NO: 58826 - DNA, 1341 bp, Debaryomyces hansenii CBS767; identical to SEQ ID NO: 45621
  CDS (1)..(1341)

SEQ ID NO: 58827 - protein, 446 aa, Debaryomyces hansenii CBS767; identical to SEQ ID NO: 45622

SEQ ID NO: 58828 - DNA, 1251 bp, Debaryomyces hansenii CBS767; identical to SEQ ID NO: 45623
  CDS (1)..(1251)

SEQ ID NO: 58829 - protein, 416 aa, Debaryomyces hansenii CBS767; identical to SEQ ID NO: 45624

SEQ ID NO: 58830 - DNA, 1302 bp, Debaryomyces hansenii CBS767; identical to SEQ ID NO: 45625
  CDS (1)..(1302)

SEQ ID NO: 58831 - protein, 433 aa, Debaryomyces hansenii CBS767; identical to SEQ ID NO: 45626

SEQ ID NO: 58832 - DNA, 1341 bp, Yarrowia lipolytica CLIB99; identical to SEQ ID NO: 45627
  CDS (1)..(1341)

SEQ ID NO: 58833 - protein, 446 aa, Yarrowia lipolytica CLIB99; identical to SEQ ID NO: 45628

SEQ ID NO: 58834 - DNA, 1290 bp, Yarrowia lipolytica CLIB99; identical to SEQ ID NO: 45629
  CDS (1)..(1290)

SEQ ID NO: 58835 - protein, 429 aa, Yarrowia lipolytica CLIB99; identical to SEQ ID NO: 45630

SEQ ID NO: 58836 - DNA, 1242 bp, Yarrowia lipolytica CLIB99; identical to SEQ ID NO: 45631
  CDS (1)..(1242)

SEQ ID NO: 58837 - protein, 413 aa, Yarrowia lipolytica CLIB99; identical to SEQ ID NO: 45632

SEQ ID NO: 58838 - DNA, 1527 bp, Yarrowia lipolytica CLIB99; identical to SEQ ID NO: 45633
  CDS (1)..(1527)

SEQ ID NO: 58839 - protein, 508 aa, Yarrowia lipolytica CLIB99; identical to SEQ ID NO: 45634

SEQ ID NO: 58840 - DNA, 1299 bp, Schizosaccharomyces pombe; identical to SEQ ID NO: 45635
  CDS (1)..(1299)

SEQ ID NO: 58841 - protein, 432 aa, Schizosaccharomyces pombe; identical to SEQ ID NO: 45636

SEQ ID NO: 58842 - DNA, 1215 bp, Saccharomyces cerevisiae; identical to SEQ ID NO: 45637
  CDS (1)..(1215)

SEQ ID NO: 58843 - protein, 404 aa, Saccharomyces cerevisiae; identical to SEQ ID NO: 45638

SEQ ID NO: 58844 - DNA, 1233 bp, Candida albicans; identical to SEQ ID NO: 45639
  CDS (1)..(1233): transl_table=12

SEQ ID NO: 58845 - protein, 410 aa, Candida albicans; identical to SEQ ID NO: 45640

SEQ ID NO: 58846 - DNA, 1443 bp, Candida albicans; identical to SEQ ID NO: 45641
  CDS (1)..(1443): transl_table=12

SEQ ID NO: 58847 - protein, 480 aa, Candida albicans; identical to SEQ ID NO: 45642

SEQ ID NO: 58848 - DNA, 1296 bp, Candida albicans; identical to SEQ ID NO: 45643
  CDS (1)..(1296): transl_table=12

SEQ ID NO: 58849 - protein, 431 aa, Candida albicans; identical to SEQ ID NO: 45644

SEQ ID NO: 58850 - DNA, 1329 bp, Saccharomyces cerevisiae; identical to SEQ ID NO: 45645
  CDS (1)..(1329)

SEQ ID NO: 58851 - protein, 442 aa, Saccharomyces cerevisiae; identical to SEQ ID NO: 45646

SEQ ID NO: 58852 - DNA, 1182 bp, Saccharomyces cerevisiae; identical to SEQ ID NO: 45647
  CDS (1)..(1182)

SEQ ID NO: 58853 - protein, 393 aa, Saccharomyces cerevisiae; identical to SEQ ID NO: 45648

SEQ ID NO: 58854 - DNA, 1278 bp, Saccharomyces cerevisiae; identical to SEQ ID NO: 45649
  CDS (1)..(1278)

SEQ ID NO: 58855 - protein, 425 aa, Saccharomyces cerevisiae; identical to SEQ ID NO: 45650

SEQ ID NO: 58856 - DNA, 1215 bp, Saccharomyces cerevisiae; identical to SEQ ID NO: 45651
  CDS (1)..(1215)

SEQ ID NO: 58857 - protein, 404 aa, Saccharomyces cerevisiae; identical to SEQ ID NO: 45652

SEQ ID NO: 58858 - DNA, 1395 bp, Saccharomyces cerevisiae; identical to SEQ ID NO: 45653
  CDS (1)..(1395)

SEQ ID NO: 58859 - protein, 464 aa, Saccharomyces cerevisiae; identical to SEQ ID NO: 45654

SEQ ID NO: 58860 - DNA, 1569 bp, Saccharomyces cerevisiae; identical to SEQ ID NO: 45655
  CDS (1)..(1569)

SEQ ID NO: 58861 - protein, 522 aa, Saccharomyces cerevisiae; identical to SEQ ID NO: 45656

SEQ ID NO: 58862 - DNA, 1341 bp, Saccharomyces cerevisiae; identical to SEQ ID NO: 45657
  CDS (1)..(1341)

SEQ ID NO: 58863 - protein, 446 aa, Saccharomyces cerevisiae; identical to SEQ ID NO: 45658

SEQ ID NO: 58864 - DNA, 1554 bp, Saccharomyces cerevisiae; identical to SEQ ID NO: 45659
  CDS (1)..(1554)

SEQ ID NO: 58865 - protein, 517 aa, Saccharomyces cerevisiae; identical to SEQ ID NO: 45660

SEQ ID NO: 58866 - DNA, 1386 bp, Candida albicans; identical to SEQ ID NO: 45661
  CDS (1)..(1386): transl_table=12

SEQ ID NO: 58867 - protein, 461 aa, Candida albicans; identical to SEQ ID NO: 45662

SEQ ID NO: 58868 - DNA, 1137 bp, Candida albicans; identical to SEQ ID NO: 45663
  CDS (1)..(1137): transl_table=12

SEQ ID NO: 58869 - protein, 378 aa, Candida albicans; identical to SEQ ID NO: 45664

SEQ ID NO: 58870 - DNA, 23 bp, Artificial sequence
  Primer sequence
atggcaaaaggaggctcgctata

SEQ ID NO: 58871 - DNA, 26 bp, Artificial sequence
  Primer sequence
ttaaatctcgtcttgctcttctttta

SEQ ID NO: 58872 - protein, 464 aa, Artificial sequence; identical to SEQ ID NO: 45667
  Consensus
  Variant (2)..(3): Xaa in position 2 to 3 is any amino acid
  Variant (5)..(6): Xaa in position 5 to 6 is any amino acid
  Variant (8)..(8): Xaa in position 8 is any amino acid
  Variant (10)..(10): Xaa in position 10 is any amino acid
  Variant (13)..(13): Xaa in position 13 is any amino acid
  Variant (16)..(17): Xaa in position 16 to 17 is any amino acid
  Variant (19)..(20): Xaa in position 19 to 20 is any amino acid
  Variant (23)..(24): Xaa in position 23 to 24 is any amino acid
  Variant (27)..(28): Xaa in position 27 to 28 is any amino acid
  Variant (31)..(32): Xaa in position 31 to 32 is any amino acid
  Variant (33)..(34): Xaa in position 33 to 34 is any or no amino acid
  Variant (36)..(36): Xaa in position 36 is any amino acid
  Variant (38)..(38): Xaa in position 38 is any amino acid
  Variant (40)..(40): Xaa in position 40 is any amino acid
  Variant (45)..(46): Xaa in position 45 to 46 is any amino acid
  Variant (48)..(50): Xaa in position 48 to 50 is any amino acid
  Variant (52)..(63): Xaa in position 52 to 63 is any amino acid
  Variant (64)..(74): Xaa in position 64 to 74 is any or no amino acid
  Variant (76)..(77): Xaa in position 76 to 77 is any amino acid
  Variant (79)..(82): Xaa in position 79 to 82 is any amino acid
  Variant (84)..(85): Xaa in position 84 to 85 is any amino acid
  Variant (87)..(88): Xaa in position 87 to 88 is any amino acid
  Variant (90)..(103): Xaa in position 90 to 103 is any amino acid
  Variant (104)..(108): Xaa in position 104 to 108 is any or no amino acid
  Variant (110)..(110): Xaa in position 110 is any or no amino acid
  Variant (113)..(114): Xaa in position 113 to 114 is any amino acid
  Variant (115)..(115): Xaa in position 115 is any or no amino acid
  Variant (118)..(119): Xaa in position 118 to 119 is any or no amino acid
  Variant (124)..(124): Xaa in position 124 is any or no amino acid
  Variant (127)..(127): Xaa in position 127 is any or no amino acid
  Variant (130)..(134): Xaa in position 130 to 134 is any or no amino acid
  Variant (136)..(141): Xaa in position 136 to 141 is any or no amino acid
  Variant (143)..(143): Xaa in position 143 is any or no amino acid
  Variant (151)..(151): Xaa in position 151 is any amino acid
  Variant (153)..(155): Xaa in position 153 to 155 is any amino acid
  Variant (159)..(159): Xaa in position 159 is any amino acid
  Variant (160)..(160): Xaa in position 160 is any or no amino acid
  Variant (163)..(163): Xaa in position 163 is any amino acid
  Variant (165)..(166): Xaa in position 165 to 166 is any amino acid
  Variant (168)..(171): Xaa in position 168 to 171 is any amino acid
  Variant (173)..(173): Xaa in position 173 is any amino acid
  Variant (177)..(177): Xaa in position 177 is any amino acid
  Variant (179)..(179): Xaa in position 179 is any amino acid
  Variant (181)..(181): Xaa in position 181 is any or no amino acid
  Variant (183)..(185): Xaa in position 183 to 185 is any amino acid
  Variant (188)..(189): Xaa in position 188 to 189 is any amino acid
  Variant (192)..(196): Xaa in position 192 to 196 is any amino acid
  Variant (198)..(214): Xaa in position 198 to 214 is any amino acid
  Variant (215)..(296): Xaa in position 215 to 296 is any or no amino acid
  Variant (298)..(299): Xaa in position 298 to 299 is any amino acid
  Variant (310)..(310): Xaa in position 310 is any amino acid
  Variant (312)..(313): Xaa in position 312 to 313 is any amino acid
  Variant (316)..(318): Xaa in position 316 to 318 is any amino acid
  Variant (320)..(321): Xaa in position 320 to 321 is any amino acid
  Variant (322)..(323): Xaa in position 322 to 323 is any or no amino acid
  Variant (326)..(327): Xaa in position 326 to 327 is any amino acid
  Variant (330)..(331): Xaa in position 330 to 331 is any amino acid
  Variant (336)..(336): Xaa in position 336 is any amino acid
  Variant (349)..(350): Xaa in position 349 to 350 is any amino acid
  Variant (352)..(357): Xaa in position 352 to 357 is any amino acid
  Variant (360)..(360): Xaa in position 360 is any amino acid
  Variant (362)..(362): Xaa in position 362 is any amino acid
  Variant (367)..(367): Xaa in position 367 is any amino acid
  Variant (369)..(372): Xaa in position 369 to 372 is any amino acid
  Variant (373)..(375): Xaa in position 373 to 375 is any or no amino acid
  Variant (378)..(381): Xaa in position 378 to 381 is any amino acid
  Variant (382)..(430): Xaa in position 382 to 430 is any or no amino acid
  Variant (432)..(443): Xaa in position 432 to 443 is any amino acid
  Variant (444)..(459): Xaa in position 444 to 459 is any or no amino acid
  Variant (461)..(463): Xaa in position 461 to 463 is any amino acid

SEQ ID NO: 58873 - protein, 48 aa, Artificial sequence; identical to SEQ ID NO: 45668
  Consensus
  Variant (2)..(3): Xaa in position 2 to 3 is any amino acid
  Variant (4)..(5): Xaa in position 4 to 5 is any or no amino acid
  Variant (7)..(7): Xaa in position 7 is any amino acid
  Variant (8)..(9): Xaa in position 8 to 9 is any or no amino acid
  Variant (12)..(12): Xaa in position 12 is any amino acid
  Variant (13)..(13): Xaa in position 13 is Asp or Glu
  Variant (14)..(19): Xaa in position 14 to 19 is any amino acid
  Variant (20)..(20): Xaa in position 20 is Ala, Pro, Ser or Thr
  Variant (21)..(21): Xaa in position 21 is Ile, Met or Val
  Variant (22)..(24): Xaa in position 22 to 24 is any amino acid
  Variant (25)..(25): Xaa in position 25 is Glu or Gln
  Variant (26)..(28): Xaa in position 26 to 28 is any amino acid
  Variant (30)..(31): Xaa in position 30 to 31 is any amino acid
  Variant (32)..(32): Xaa in position 32 is Phe, His or Tyr
  Variant (33)..(33): Xaa in position 33 is any amino acid
  Variant (35)..(35): Xaa in position 35 is Asp, Gly or Pro
  Variant (36)..(37): Xaa in position 36 to 37 is any amino acid
  Variant (39)..(39): Xaa in position 39 is any amino acid
  Variant (41)..(41): Xaa in position 41 is Asp or Asn
  Variant (42)..(43): Xaa in position 42 to 43 is any amino acid
  Variant (44)..(44): Xaa in position 44 is Phe or Trp
  Variant (45)..(47): Xaa in position 45 to 47 is any amino acid

SEQ ID NO: 58874 - protein, 18 aa, Artificial sequence
  Consensus
  Variant (2)..(2): Xaa in position 2 is Ala or Gly
  Variant (3)..(5): Xaa in position 3 to 5 is any amino acid
  Variant (6)..(6): Xaa in position 6 is Pro or Ser
  Variant (8)..(8): Xaa in position 8 is His or Arg
  Variant (9)..(9): Xaa in position 9 is any amino acid
  Variant (13)..(13): Xaa in position 13 is Phe, Trp or Tyr
  Variant (14)..(14): Xaa in position 14 is any amino acid
  Variant (16)..(16): Xaa in position 16 is any amino acid
  Variant (17)..(17): Xaa in position 17 is any or no amino acid
YXXXXXYXXMCRXXSXXF

SEQ ID NO: 58875 - protein, 48 aa, Artificial sequence; identical to SEQ ID NO: 45670
  Consensus
  Variant (2)..(15): Xaa in position 2 to 15 is any amino acid
  Variant (16)..(18): Xaa in position 16 to 18 is any or no amino acid
  Variant (21)..(21): Xaa in position 21 is Ile, Leu, Pro or Val
  Variant (23)..(24): Xaa in position 23 to 24 is any amino acid
  Variant (25)..(25): Xaa in position 25 is Leu or Met
  Variant (26)..(29): Xaa in position 26 to 29 is any amino acid
  Variant (31)..(31): Xaa in position 31 is any amino acid
  Variant (33)..(33): Xaa in position 33 is Ala, Gly or Ser
  Variant (34)..(34): Xaa in position 34 is Phe or Tyr
  Variant (35)..(35): Xaa in position 35 is any amino acid
  Variant (36)..(36): Xaa in position 36 is Ile, Leu, Met or Val
  Variant (37)..(37): Xaa in position 37 is any amino acid
  Variant (38)..(38): Xaa in position 38 is Ile, Leu, Met or Val
  Variant (39)..(39): Xaa in position 39 is any amino acid
  Variant (40)..(40): Xaa in position 40 is Asp or Glu
  Variant (41)..(43): Xaa in position 41 to 43 is any amino acid
  Variant (44)..(44): Xaa in position 44 is Ser or Thr
  Variant (45)..(46): Xaa in position 45 to 46 is any amino acid
  Variant (47)..(47): Xaa in position 47 is Gly, Asn, Ser or Thr
  Variant (48)..(48): Xaa in position 48 is Ile or Leu

SEQ ID NO: 58876 - protein, 75 aa, Artificial sequence; identical to SEQ ID NO: 45671
  Consensus
  Variant (2)..(2): Xaa in position 2 is any amino acid
  Variant (3)..(4): Xaa in position 3 to 4 is any or no amino acid
  Variant (6)..(6): Xaa in position 6 is Ser or Thr
  Variant (8)..(8): Xaa in position 8 is Phe or Leu
  Variant (10)..(10): Xaa in position 10 is Ile or Val
  Variant (11)..(11): Xaa in position 11 is Ala or Gly
  Variant (12)..(16): Xaa in position 12 to 16 is any amino acid
  Variant (17)..(17): Xaa in position 17 is Asp, Glu, Asn or Arg
  Variant (18)..(18): Xaa in position 18 is Gly, Asn or Ser
  Variant (19)..(20): Xaa in position 19 to 20 is any amino acid
  Variant (22)..(24): Xaa in position 22 to 24 is any amino acid
  Variant (26)..(27): Xaa in position 26 to 27 is any amino acid
  Variant (28)..(28): Xaa in position 28 is Leu or Met
  Variant (29)..(29): Xaa in position 29 is Asp or Glu
  Variant (30)..(32): Xaa in position 30 to 32 is any amino acid
  Variant (33)..(33): Xaa in position 33 is Gly or Asn
  Variant (35)..(35): Xaa in position 35 is Phe, Trp or Tyr
  Variant (36)..(36): Xaa in position 36 is any amino acid
  Variant (43)..(43): Xaa in position 43 is Ala or Pro
  Variant (44)..(44): Xaa in position 44 is Phe, Ile or Val
  Variant (46)..(46): Xaa in position 46 is Ser or Thr
  Variant (47)..(47): Xaa in position 47 is Ile, Leu, Met or Val
  Variant (48)..(48): Xaa in position 48 is any amino acid
  Variant (49)..(49): Xaa in position 49 is Ala, Ile, Leu or Val
  Variant (50)..(60): Xaa in position 50 to 60 is any amino acid
  Variant (61)..(61): Xaa in position 61 is Phe or Trp
  Variant (62)..(62): Xaa in position 62 is any amino acid
  Variant (63)..(63): Xaa in position 63 is Asp, Glu, Gly or Asn
  Variant (64)..(64): Xaa in position 64 is Phe, Ile, Leu or Val
  Variant (65)..(65): Xaa in position 65 is Ala, Gly or Ser
  Variant (66)..(66): Xaa in position 66 is Phe or Tyr
  Variant (67)..(67): Xaa in position 67 is any amino acid
  Variant (69)..(73): Xaa in position 69 to 73 is any amino acid
  Variant (75)..(75): Xaa in position 75 is Gly or Pro

SEQ ID NO: 58877 - DNA, 1390 bp, Saccharomyces cerevisiae; identical to SEQ ID NO: 531
  CDS (303)..(1118)

SEQ ID NO: 58878 - protein, 271 aa, Saccharomyces cerevisiae; identical to SEQ ID NO: 532

SEQ ID NO: 58879 - DNA, 714 bp, Deinococcus radiodurans; identical to SEQ ID NO: 533
  CDS (1)..(714)

SEQ ID NO: 58880 - protein, 237 aa, Deinococcus radiodurans; identical to SEQ ID NO: 534

SEQ ID NO: 58881 - DNA, 1350 bp, Nostoc sp. PCC 7120; identical to SEQ ID NO: 535
  CDS (1)..(1350)

SEQ ID NO: 58882 - protein, 449 aa, Nostoc sp. PCC 7120; identical to SEQ ID NO: 536

SEQ ID NO: 58883 - DNA, 636 bp, Listeria monocytogenes; identical to SEQ ID NO: 537
  CDS (1)..(636)

SEQ ID NO: 58884 - protein, 211 aa, Listeria monocytogenes; identical to SEQ ID NO: 538

SEQ ID NO: 58885 - DNA, 636 bp, Listeria innocua; identical to SEQ ID NO: 539
  CDS (1)..(636)

SEQ ID NO: 58886 - protein, 211 aa, Listeria innocua; identical to SEQ ID NO: 540

SEQ ID NO: 58887 - DNA, 654 bp, Brucella melitensis; identical to SEQ ID NO: 541
  CDS (1)..(654)

SEQ ID NO: 58888 - protein, 217 aa, Brucella melitensis; identical to SEQ ID NO: 542

SEQ ID NO: 58889 - DNA, 813 bp, Nostoc sp. PCC 7120; identical to SEQ ID NO: 543
  CDS (1)..(813)

SEQ ID NO: 58890 - protein, 270 aa, Nostoc sp. PCC 7120; identical to SEQ ID NO: 544

SEQ ID NO: 58891 - DNA, 615 bp, Deinococcus radiodurans; identical to SEQ ID NO: 545
  CDS (1)..(615)

SEQ ID NO: 58892 - protein, 204 aa, Deinococcus radiodurans; identical to SEQ ID NO: 546

SEQ ID NO: 58893 - DNA, 714 bp, Caulobacter crescentus; identical to SEQ ID NO: 547
  CDS (1)..(714)

SEQ ID NO: 58894 - protein, 237 aa, Caulobacter crescentus; identical to SEQ ID NO: 548

SEQ ID NO: 58895 - DNA, 756 bp, Treponema pallidum subsp. pallidum (syphilis spirochete); identical to SEQ ID NO: 549
  CDS (1)..(756)

SEQ ID NO: 58896 - protein, 251 aa, Treponema pallidum subsp. pallidum (syphilis spirochete); identical to SEQ ID NO: 550

SEQ ID NO: 58897 - DNA, 645 bp, Xylella fastidiosa; identical to SEQ ID NO: 551
  CDS (1)..(645)

SEQ ID NO: 58898 - protein, 214 aa, Xylella fastidiosa; identical to SEQ ID NO: 552

SEQ ID NO: 58899 - DNA, 2034 bp, Arabidopsis thaliana (mouse-ear cress); identical to SEQ ID NO: 553
  CDS (1)..(2034)

SEQ ID NO: 58900 - protein, 677 aa, Arabidopsis thaliana (mouse-ear cress); identical to SEQ ID NO: 554

SEQ ID NO: 58901 - DNA, 582 bp, Bacillus subtilis; identical to SEQ ID NO: 555
  CDS (1)..(582)

SEQ ID NO: 58902 - protein, 193 aa, Bacillus subtilis; identical to SEQ ID NO: 556

SEQ ID NO: 58903 - DNA, 606 bp, Thermotoga maritima; identical to SEQ ID NO: 557
  CDS (1)..(606)

SEQ ID NO: 58904 - protein, 201 aa, Thermotoga maritima; identical to SEQ ID NO: 558

SEQ ID NO: 58905 - DNA, 660 bp, Clostridium acetobutylicum; identical to SEQ ID NO: 559
  CDS (1)..(660)

SEQ ID NO: 58906 - protein, 219 aa, Clostridium acetobutylicum; identical to SEQ ID NO: 560

SEQ ID NO: 58907 - DNA, 744 bp, Saccharomyces cerevisiae; identical to SEQ ID NO: 561
  CDS (1)..(744)

SEQ ID NO: 58908 - protein, 247 aa, Saccharomyces cerevisiae; identical to SEQ ID NO: 562

SEQ ID NO: 58909 - DNA, 1050 bp, Synechocystis sp; identical to SEQ ID NO: 563
  CDS (1)..(1050)

SEQ ID NO: 58910 - protein, 349 aa, Synechocystis sp; identical to SEQ ID NO: 564

SEQ ID NO: 58911 - DNA, 875 bp, Arabidopsis thaliana (mouse-ear cress); identical to SEQ ID NO: 565
  CDS (30)..(722)

SEQ ID NO: 58912 - protein, 230 aa, Arabidopsis thaliana (mouse-ear cress); identical to SEQ ID NO: 566

SEQ ID NO: 58913 - DNA, 741 bp, Debaryomyces hansenii; identical to SEQ ID NO: 567
  CDS (1)..(741)

SEQ ID NO: 58914 - protein, 246 aa, Debaryomyces hansenii; identical to SEQ ID NO: 568

SEQ ID NO: 58915 - DNA, 741 bp, Yarrowia lipolytica; identical to SEQ ID NO: 569
  CDS (1)..(741)

SEQ ID NO: 58916 - protein, 246 aa, Yarrowia lipolytica; identical to SEQ ID NO: 570

SEQ ID NO: 58917 - DNA, 816 bp, Kluyveromyces lactis; identical to SEQ ID NO: 571
  CDS (1)..(816)

SEQ ID NO: 58918 - protein, 271 aa, Kluyveromyces lactis; identical to SEQ ID NO: 572

SEQ ID NO: 58919 - DNA, 687 bp, Kluyveromyces lactis; identical to SEQ ID NO: 573
  CDS (1)..(687)

SEQ ID NO: 58920 - protein, 228 aa, Kluyveromyces lactis; identical to SEQ ID NO: 574

SEQ ID NO: 58921 - DNA, 651 bp, Erwinia carotovora subsp; identical to SEQ ID NO: 575
  CDS (1)..(651)

SEQ ID NO: 58922 - protein, 216 aa, Erwinia carotovora subsp; identical to SEQ ID NO: 576

SEQ ID NO: 58923 - DNA, 840 bp, Candida glabrata; identical to SEQ ID NO: 577
  CDS (1)..(840)

SEQ ID NO: 58924 - protein, 279 aa, Candida glabrata; identical to SEQ ID NO: 578

SEQ ID NO: 58925 - DNA, 744 bp, Candida glabrata; identical to SEQ ID NO: 579
  CDS (1)..(744)

SEQ ID NO: 58926 - protein, 247 aa, Candida glabrata; identical to SEQ ID NO: 580

SEQ ID NO: 58927 - DNA, 621 bp, Bartonella quintana; identical to SEQ ID NO: 581
  CDS (1)..(621)

SEQ ID NO: 58928 - protein, 206 aa, Bartonella quintana; identical to SEQ ID NO: 582

SEQ ID NO: 58929 - DNA, 648 bp, Parachlamydia sp; identical to SEQ ID NO: 583
  CDS (1)..(648)

SEQ ID NO: 58930 - protein, 215 aa, Parachlamydia sp; identical to SEQ ID NO: 584

SEQ ID NO: 58931 - DNA, 636 bp, Listeria monocytogenes; identical to SEQ ID NO: 585
  CDS (1)..(636)

SEQ ID NO: 58932 - protein, 211 aa, Listeria monocytogenes; identical to SEQ ID NO: 586

SEQ ID NO: 58933 - DNA, 633 bp, Thermus thermophilus; identical to SEQ ID NO: 587
  CDS (1)..(633)

SEQ ID NO: 58934 - protein, 210 aa, Thermus thermophilus; identical to SEQ ID NO: 588

SEQ ID NO: 58935 - DNA, 654 bp, Mycobacterium paratuberculosis; identical to SEQ ID NO: 589
  CDS (1)..(654)

SEQ ID NO: 58936 - protein, 217 aa, Mycobacterium paratuberculosis; identical to SEQ ID NO: 590

SEQ ID NO: 58937 - DNA, 1134 bp, Mycobacterium paratuberculosis; identical to SEQ ID NO: 591
  CDS (1)..(1134)

SEQ ID NO: 58938 - protein, 377 aa, Mycobacterium paratuberculosis; identical to SEQ ID NO: 592

SEQ ID NO: 58939 - DNA, 627 bp, Lactobacillus johnsonii; identical to SEQ ID NO: 593
  CDS (1)..(627)

SEQ ID NO: 58940 - protein, 208 aa, Lactobacillus johnsonii; identical to SEQ ID NO: 594

SEQ ID NO: 58941 - DNA, 807 bp, Ashbya gossypii; identical to SEQ ID NO: 595
  CDS (1)..(807)

SEQ ID NO: 58942 - protein, 268 aa, Ashbya gossypii; identical to SEQ ID NO: 596

SEQ ID NO: 58943 - DNA, 687 bp, Mycobacterium tuberculosis; identical to SEQ ID NO: 597
  CDS (1)..(687)

SEQ ID NO: 58944 - protein, 228 aa, Mycobacterium tuberculosis; identical to SEQ ID NO: 598

SEQ ID NO: 58945 - DNA, 618 bp, Photorhabdus luminescens; identical to SEQ ID NO: 599
  CDS (1)..(618)

SEQ ID NO: 58946 - protein, 205 aa, Photorhabdus luminescens; identical to SEQ ID NO: 600

SEQ ID NO: 58947 - DNA, 588 bp, Anopheles gambiae str; identical to SEQ ID NO: 601
  CDS (1)..(588)

SEQ ID NO: 58948 - protein, 195 aa, Anopheles gambiae str; identical to SEQ ID NO: 602

SEQ ID NO: 58949 - DNA, 3762 bp, Neurospora crassa; identical to SEQ ID NO: 603
  CDS (1)..(3762)

SEQ ID NO: 58950 - protein, 1253 aa, Neurospora crassa; identical to SEQ ID NO: 604

SEQ ID NO: 58951 - DNA, 567 bp, Synechococcus sp; identical to SEQ ID NO: 605
  CDS (1)..(567)

SEQ ID NO: 58952 - protein, 188 aa, Synechococcus sp; identical to SEQ ID NO: 606

SEQ ID NO: 58953 - DNA, 612 bp, Rhodopirellula baltica; identical to SEQ ID NO: 607
  CDS (1)..(612)

SEQ ID NO: 58954 - protein, 203 aa, Rhodopirellula baltica; identical to SEQ ID NO: 608

SEQ ID NO: 58955 - DNA, 1329 bp, Prochlorococcus marinus subsp; identical to SEQ ID NO: 609
  CDS (1)..(1329)

SEQ ID NO: 58956 - protein, 442 aa, Prochlorococcus marinus subsp; identical to SEQ ID NO: 610

SEQ ID NO: 58957 - DNA, 1332 bp, Prochlorococcus marinus; identical to SEQ ID NO: 611
  CDS (1)..(1332)

SEQ ID NO: 58958 - protein, 443 aa, Prochlorococcus marinus; identical to SEQ ID NO: 612

SEQ ID NO: 58959 - DNA, 591 bp, Prochlorococcus marinus; identical to SEQ ID NO: 613
  CDS (1)..(591)

SEQ ID NO: 58960 - protein, 196 aa, Prochlorococcus marinus; identical to SEQ ID NO: 614

SEQ ID NO: 58961 - DNA, 618 bp, Streptomyces avermitilis; identical to SEQ ID NO: 615
  CDS (1)..(618)

SEQ ID NO: 58962 - protein, 205 aa, Streptomyces avermitilis; identical to SEQ ID NO: 616

SEQ ID NO: 58963 - DNA, 600 bp, Streptomyces avermitilis; identical to SEQ ID NO: 617
  CDS (1)..(600)

SEQ ID NO: 58964 - protein, 199 aa, Streptomyces avermitilis; identical to SEQ ID NO: 618

SEQ ID NO: 58965 - DNA, 612 bp, Streptomyces avermitilis; identical to SEQ ID NO: 619
  CDS (1)..(612)

SEQ ID NO: 58966 - protein, 203 aa, Streptomyces avermitilis; identical to SEQ ID NO: 620

SEQ ID NO: 58967 - DNA, 645 bp, Enterococcus faecalis; identical to SEQ ID NO: 621
  CDS (1)..(645)

SEQ ID NO: 58968 - protein, 214 aa, Enterococcus faecalis; identical to SEQ ID NO: 622

SEQ ID NO: 58969 - DNA, 666 bp, Lactobacillus plantarum; identical to SEQ ID NO: 623
  CDS (1)..(666)

SEQ ID NO: 58970 - protein, 221 aa, Lactobacillus plantarum; identical to SEQ ID NO: 624

SEQ ID NO: 58971 - DNA, 642 bp, Clostridium tetani; identical to SEQ ID NO: 625
  CDS (1)..(642)

SEQ ID NO: 58972 - protein, 213 aa, Clostridium tetani; identical to SEQ ID NO: 626

SEQ ID NO: 58973 - DNA, 600 bp, Bradyrhizobium japonicum; identical to SEQ ID NO: 627
  CDS (1)..(600)

SEQ ID NO: 58974 - protein, 199 aa, Bradyrhizobium japonicum; identical to SEQ ID NO: 628

SEQ ID NO: 58975 - DNA, 1407 bp, Synechococcus elongatus; identical to SEQ ID NO: 629
  CDS (1)..(1407)

SEQ ID NO: 58976 - protein, 468 aa, Synechococcus elongatus; identical to SEQ ID NO: 630

SEQ ID NO: 58977 - DNA, 582 bp, Oceanobacillus iheyensis; identical to SEQ ID NO: 631
  CDS (1)..(582)

SEQ ID NO: 58978 - protein, 193 aa, Oceanobacillus iheyensis; identical to SEQ ID NO: 632

SEQ ID NO: 58979 - DNA, 648 bp, Bifidobacterium longum; identical to SEQ ID NO: 633
  CDS (1)..(648)

SEQ ID NO: 58980 - protein, 215 aa, Bifidobacterium longum; identical to SEQ ID NO: 634

SEQ ID NO: 58981 - DNA, 1005 bp, Arabidopsis thaliana; identical to SEQ ID NO: 635
  CDS (1)..(1005)

SEQ ID NO: 58982 - protein, 334 aa, Arabidopsis thaliana; identical to SEQ ID NO: 636

SEQ ID NO: 58983 - DNA, 645 bp, Xanthomonas campestris; identical to SEQ ID NO: 637
  CDS (1)..(645)

SEQ ID NO: 58984 - protein, 214 aa, Xanthomonas campestris; identical to SEQ ID NO: 638

SEQ ID NO: 58985 - DNA, 645 bp, Xanthomonas axonopodis; identical to SEQ ID NO: 639
  CDS (1)..(645)

SEQ ID NO: 58986 - protein, 214 aa, Xanthomonas axonopodis; identical to SEQ ID NO: 640

SEQ ID NO: 58987 - DNA, 621 bp, Thermoanaerobacter tengcongensis; identical to SEQ ID NO: 641
  CDS (1)..(621)

SEQ ID NO: 58988 - protein, 206 aa, Thermoanaerobacter tengcongensis; identical to SEQ ID NO: 642

SEQ ID NO: 58989 - DNA, 582 bp, Rhizobium loti; identical to SEQ ID NO: 643
  CDS (1)..(582)

SEQ ID NO: 58990 - protein, 193 aa, Rhizobium loti; identical to SEQ ID NO: 644

SEQ ID NO: 58991 - DNA, 651 bp, Pasteurella multocida; identical to SEQ ID NO: 645
  CDS (1)..(651)

SEQ ID NO: 58992 - protein, 216 aa, Pasteurella multocida; identical to SEQ ID NO: 646

SEQ ID NO: 58993 - DNA, 597 bp, Streptomyces coelicolor; identical to SEQ ID NO: 647
  CDS (1)..(597)

SEQ ID NO: 58994 - protein, 198 aa, Streptomyces coelicolor; identical to SEQ ID NO: 648

SEQ ID NO: 58995 - DNA, 600 bp, Streptomyces coelicolor; identical to SEQ ID NO: 649
  CDS (1)..(600)

SEQ ID NO: 58996 - protein, 199 aa, Streptomyces coelicolor; identical to SEQ ID NO: 650

SEQ ID NO: 58997 - DNA, 660 bp, Gloeobacter violaceus; identical to SEQ ID NO: 651
  CDS (1)..(660)

SEQ ID NO: 58998 - protein, 219 aa, Gloeobacter violaceus; identical to SEQ ID NO: 652

SEQ ID NO: 58999 - DNA, 621 bp, Bartonella henselae; identical to SEQ ID NO: 653
  CDS (1)..(621)

SEQ ID NO: 59000 - protein, 206 aa, Bartonella henselae; identical to SEQ ID NO: 654

SEQ ID NO: 59001 - DNA, 681 bp, Parachlamydia sp; identical to SEQ ID NO: 655
  CDS (1)..(681)

SEQ ID NO: 59002 - protein, 226 aa, Parachlamydia sp; identical to SEQ ID NO: 656

SEQ ID NO: 59003 - DNA, 636 bp, Rhizobium meliloti; identical to SEQ ID NO: 657
  CDS (1)..(636)

SEQ ID NO: 59004 - protein, 211 aa, Rhizobium meliloti; identical to SEQ ID NO: 658

SEQ ID NO: 59005 - DNA, 648 bp, Escherichia coli O6; identical to SEQ ID NO: 659
  CDS (1)..(648)

SEQ ID NO: 59006 - protein, 215 aa, Escherichia coli O6; identical to SEQ ID NO: 660

SEQ ID NO: 59007 - DNA, 648 bp, Photorhabdus luminescens; identical to SEQ ID NO: 661
  CDS (1)..(648)

SEQ ID NO: 59008 - protein, 215 aa, Photorhabdus luminescens; identical to SEQ ID NO: 662

SEQ ID NO: 59009 - DNA, 648 bp, Salmonella typhimurium; identical to SEQ ID NO: 663
  CDS (1)..(648)

SEQ ID NO: 59010 - protein, 215 aa, Salmonella typhimurium; identical to SEQ ID NO: 664

SEQ ID NO: 59011 - DNA, 22 bp, Artificial sequence
  Primer sequence
atgccttcgctaacccccagat

SEQ ID NO: 59012 - DNA, 23 bp, Artificial sequence
  Primer sequence
ttacacatcgccatgctgggatt

SEQ ID NO: 59013 - protein, 289 aa, Artificial sequence; identical to SEQ ID NO: 34983
  Consensus
  Variant (2)..(2): Xaa in position 2 is any amino acid
  Variant (8)..(8): Xaa in position 8 is any amino acid
  Variant (10)..(10): Xaa in position 10 is any amino acid
  Variant (12)..(18): Xaa in position 12 to 18 is any amino acid
  Variant (20)..(21): Xaa in position 20 to 21 is any amino acid
  Variant (22)..(22): Xaa in position 22 is any or no amino acid
  Variant (24)..(25): Xaa in position 24 to 25 is any amino acid
  Variant (27)..(29): Xaa in position 27 to 29 is any amino acid
  Variant (31)..(33): Xaa in position 31 to 33 is any amino acid
  Variant (35)..(37): Xaa in position 35 to 37 is any amino acid
  Variant (39)..(40): Xaa in position 39 to 40 is any amino acid
  Variant (42)..(49): Xaa in position 42 to 49 is any amino acid
  Variant (50)..(60): Xaa in position 50 to 60 is any or no amino acid
  Variant (62)..(64): Xaa in position 62 to 64 is any amino acid
  Variant (66)..(68): Xaa in position 66 to 68 is any amino acid
  Variant (70)..(83): Xaa in position 70 to 83 is any amino acid
  Variant (84)..(116): Xaa in position 84 to 116 is any or no amino acid
  Variant (118)..(118): Xaa in position 118 is any amino acid
  Variant (120)..(122): Xaa in position 120 to 122 is any amino acid
  Variant (124)..(126): Xaa in position 124 to 126 is any amino acid
  Variant (128)..(153): Xaa in position 128 to 153 is any amino acid
  Variant (154)..(193): Xaa in position 154 to 193 is any or no amino acid
  Variant (195)..(206): Xaa in position 195 to 206 is any amino acid
  Variant (207)..(217): Xaa in position 207 to 217 is any or no amino acid
  Variant (221)..(221): Xaa in position 221 is any amino acid
  Variant (225)..(226): Xaa in position 225 to 226 is any amino acid
  Variant (228)..(229): Xaa in position 228 to 229 is any amino acid
  Variant (231)..(249): Xaa in position 231 to 249 is any amino acid
  Variant (250)..(285): Xaa in position 250 to 285 is any or no amino acid
  Variant (287)..(288): Xaa in position 287 to 288 is any amino acid

SEQ ID NO: 59014 - protein, 65 aa, Artificial sequence; identical to SEQ ID NO: 1307
  Consensus
  Variant (4)..(4): Xaa in position 4 is Glu, Gln, Lys or Ala
  Variant (5)..(5): Xaa in position 5 is Thr or Ser
  Variant (6)..(6): Xaa in position 6 is any amino acid
  Variant (7)..(7): Xaa in position 7 is Trp, Phe or Tyr
  Variant (8)..(8): Xaa in position 8 is Asn, Ser or Ala
  Variant (9)..(13): Xaa in position 9 to 13 is any amino acid
  Variant (14)..(14): Xaa in position 14 is Gln or Thr
  Variant (15)..(15): Xaa in position 15 is Gly or Ser
  Variant (16)..(16): Xaa in position 16 is any amino acid
  Variant (17)..(18): Xaa in position 17 to 18 is any or no amino acid
  Variant (19)..(19): Xaa in position 19 is Asp, Asn or Glu
  Variant (20)..(21): Xaa in position 20 to 21 is any amino acid
  Variant (23)..(25): Xaa in position 23 to 25 is any amino acid
  Variant (26)..(26): Xaa in position 26 is Gly or Ser
  Variant (27)..(29): Xaa in position 27 to 29 is any amino acid
  Variant (30)..(30): Xaa in position 30 is Ala, Met, Val or Ile
  Variant (31)..(36): Xaa in position 31 to 36 is any amino acid
  Variant (37)..(37): Xaa in position 37 is Leu, Ile, Val, Ala or Phe
  Variant (38)..(44): Xaa in position 38 to 44 is any amino acid
  Variant (45)..(55): Xaa in position 45 to 55 is any or no amino acid
  Variant (56)..(56): Xaa in position 56 is Thr, Ser, Ala or Val
  Variant (58)..(60): Xaa in position 58 to 60 is any amino acid
  Variant (62)..(62): Xaa in position 62 is Ala, Thr or Pro
  Variant (63)..(64): Xaa in position 63 to 64 is any amino acid

SEQ ID NO: 59015 - DNA, 1123 bp, Saccharomyces cerevisiae
  CDS (263)..(955)
tattccagccttcccaccacgtagctattatcggccctaatgatcttttattctaactgactcgcagattaattcacacatcggttgttaatcattgtttgaatttccaaaatatgcgatgagctgaatgaaaaattttggaacctgtcactatcgacgaacatcgaagtttgccatgacaaccatatatgaagaaagcttatgagactagctcgagtatatcatacgtatgcatgttaatcgcagttaagcggataacacaatgcgtaagccttctattacgataacaacagcaaaagctattataactccagactatactcttattaaatcgcattctaaataccaacttccttcacgttttcaaaagctagatgcagactcacctgagagaagtacagttgttaagctattttaccgccgatttatgaggcttaagcctttcatatcgaatgtgaaaatggttaaagatacttacagggattatgttcgatataagtttatgaaagaaaactacgaactcaaacgatacttggtattcaatcctgatggcttgaggtcgaaaatcaatcttgagcttctcagcaacacgaaatgttgtgaaaggatactccccgtgactgagatgcaaagaaccttggaatttgttctgaagagctgttcatacttgcccgaaacaaaagttcaaaagtgggatattgcaagggacaacacatattgcaggcaaattttaaagaaccttttaacaatgcaatatgaaaagtacagatcgattttgcatagaggaataggccatgatgagcttgacgtcaaattctctcatttgaaaactacttctagtccgctaactaagctaaataaaaccgaaaagaaaaagattccgcttttcaaagtatttagtgatttcgatacaacattgatatatctcaatgagacattaggtacaaggttataaagatcattatcgtaaaagaggagcggagcggagctttttagtatgtatggtaaaatatcaatcaaatactgtaatagatgcggatatgcgcaatgacatattttgtggtgtgcatatccattgaaaaggtgcgtagaacgttacaatactactgaacttttttccttc

SEQ ID NO: 59016 - protein, 230 aa, Saccharomyces cerevisiae
MRKPSITITTAKAIITPDYTLIKSHSKYQLPSRFQKLDADSPERSTVVKLFYRRFMRLKPFISNVKMVKDTYRDYVRYKFMKENYELKRYLVFNPDGLRSKINLELLSNTKCCERILPVTEMQRTLEFVLKSCSYLPETKVQKWDIARDNTYCRQILKNLLTMQYEKYRSILHRGIGHDELDVKFSHLKTTSSPLTKLNKTEKKKIPLFKVFSDFDTTLIYLNETLGTRL

SEQ ID NO: 59017 - DNA, 642 bp, Eremothecium gossypii
  CDS (1)..(642)
atgttaccgctcgcgatacctccgaataatatagtgcgagcaatgtcgtctcccaatgctaccggtccactcatgcggacctctaaggcaattataaccagtaactacactctgctaactgataagactccttacctgcttcccgtatgttttaatgagagttgcagggccgaacaagtgagaatgctctatcgtcgcttcttccggcttcgacctttggtagcccagcgtgcaatgataaaagagagctatacgaattatattagggtgaagtttagtgaggattatgcattaaaacgccggcaagcgttgccgcagaatacgtgcccggtactagatgccatagaggctggccgtcggtcgctgacctttatcctgaaggctgtatctgagatagaggatgcagacagcaatccggaacttgcatacgacaactatatatgtcggaagattctgaagaacgtacttactctggaataccagcgggagcgccttgagttcaaaaatcccaaaaggaagcagatactacgccaaaactacgaatacttagacgccaagtatcatgatcctaaatatacatcattaaggaatgctgacgtatccattatacattttaatgagacattgggaactaggctataa

SEQ ID NO: 59018 - protein, 213 aa, Eremothecium gossypii
MLPLAIPPNNIVRAMSSPNATGPLMRTSKAIITSNYTLLTDKTPYLLPVCFNESCRAEQVRMLYRRFFRLRPLVAQRAMIKESYTNYIRVKFSEDYALKRRQALPQNTCPVLDAIEAGRRSLTFILKAVSEIEDADSNPELAYDNYICRKILKNVLTLEYQRERLEFKNPKRKQILRQNYEYLDAKYHDPKYTSLRNADVSIIHFNETLGTRL

SEQ ID NO: 59019 - DNA, 636 bp, Candida glabrata CBS138
  CDS (1)..(636)
atggttaggaggggagtgggcacaattgagactgttaatgctttggtcaatgataattacgcgttgatacgcaacgttgcgaaatatatgctaaatgacaagggcctaaccaatgcggagttcctcagggcaagctatagacggttcatcaggcttcgaccatttgtatccaatagaagtatggtgaaggacacatatactgactatatcaggtataagtatcgatatgaagattatcctaagcgaatggctatgataggtgtgcaatgtgataatcaattgaatcgaagccaggttaagaacagtctatcttttgtagcaaaagcttgctcgtttatagatgagtctaaggggactaaatttgaagtggcgagagataatacgatgtgccgccagattctcaagaatttgttgactattcactacgagaaaacttcgcataccaacgagaaacgaaccccactgaggcatatattccaatattcatttgaacatatgaaggacataaacaaaagtacaaattctcaatcttatagcaagccagctagtcccaaatcatcacttatacttgatttgtacggtgaatttgacagagacatattactattgaacaaccttcttaacatgcgtttataa

SEQ ID NO: 59020 - protein, 211 aa, Candida glabrata CBS138
MVRRGVGTIETVNALVNDNYALIRNVAKYMLNDKGLTNAEFLRASYRRFIRLRPFVSNRSMVKDTYTDYIRYKYRYEDYPKRMAMIGVQCDNQLNRSQVKNSLSFVAKACSFIDESKGTKFEVARDNTMCRQILKNLLTIHYEKTSHTNEKRTPLRHIFQYSFEHMKDINKSTNSQSYSKPASPKSSLILDLYGEFDRDILLLNNLLNMRL

SEQ ID NO: 59021 - DNA, 567 bp, Kluyveromyces lactis NRRL Y-1140
  CDS (1)..(567)
atggtgctcatcaaatctaggaaatccattgtcactgccacgaatgtgtgcatcaattcatcttccaaattttaccttacagaagaacaggttcagtcacttggagacaaagagttcttgactgcatcttatagaagattccttcgaatgagacaattcatttccaaaaggcaaatggtgaaggagtcatatacgacataccttaggtacaagttcaagattgaggattttgaattaaagagaagtaaattactatctgtttctgggatgagtgctatggattttcgaagctcggtccagaaatccctctgttttcttatcaaggcgttctcgattagtgatgcctactctaaagacatgattgatgactctcataaatgtaaaaagattataaaaaatttgttgactgttgactatcatcggaatagaattatcaatcgatcaagcaatatgtatcaatattatagaaaggatttcacatttttcactgatggtcaaaatattgggttgaagcaattcgaagagaatctaatgcgacttaatgagtgcttaggaacaagattataa

SEQ ID NO: 59022 - protein, 188 aa, Kluyveromyces lactis NRRL Y-1140
MVLIKSRKSIVTATNVCINSSSKFYLTEEQVQSLGDKEFLTASYRRFLRMRQFISKRQMVKESYTTYLRYKFKIEDFELKRSKLLSVSGMSAMDFRSSVQKSLCFLIKAFSISDAYSKDMIDDSHKCKKIIKNLLTVDYHRNRIINRSSNMYQYYRKDFTFFTDGQNIGLKQFEENLMRLNECLGTRL

SEQ ID NO: 59023 - DNA, 642 bp, Debaryomyces hansenii CBS767
  CDS (1)..(642)
atgaataagacgaaacaggttgttactataggaaatgacctaatagtgaagtatcaggtttcgttgttggcaggtcttgaggggctaaatgaactttcctcgaagaaatctaagttcttatcgctttacaaaaaattctataagcttcgtaatatgatcgattccaaaccatataataaagaaacataccagaacataatacgacggaaattcaccatggaggattttaaccttaaacgaaacatactattggaaggatctgacaaattatcagaattacagctatttgaacgtatgataaacacattagcatttgtccataattcaacggtatatttaccgtcagaaggaaaagaaaagccggcattcttctttcaagacttgaaaattcctcaaagaatggaaaagctgataatattgaccttgctcaagatggatcaacagaagcccaatacgattaaatacgatcgaaaatacgaatggataccgcagatatacaacaaattgagccagttgcctgatgaccccgatgcgaaggagtataagtccattttcaaggatatcgatgctaatcttatagggtttcgggactacgagttgaacttgatgaggctaaacgaatgttatagactatgtttatag

SEQ ID NO: 59024 - protein, 213 aa, Debaryomyces hansenii CBS767
MNKTKQVVTIGNDLIVKYQVSLLAGLEGLNELSSKKSKFLSLYKKFYKLRNMIDSKPYNKETYQNIIRRKFTMEDFNLKRNILLEGSDKLSELQLFERMINTLAFVHNSTVYLPSEGKEKPAFFFQDLKIPQRMEKLIILTLLKMDQQKPNTIKYDRKYEWIPQIYNKLSQLPDDPDAKEYKSIFKDIDANLIGFRDYELNLMRLNECYRLCL

SEQ ID NO: 59025 - DNA, 25 bp, Artificial sequence
  Primer sequence
atgcgtaagccttctattacgataa

SEQ ID NO: 59026 - DNA, 26 bp, Artificial sequence
  Primer sequence
ttataaccttgtacctaatgtctcat

SEQ ID NO: 59027 - protein, 232 aa, Artificial sequence
  Consensus
  Variant (2)..(2): Xaa in position 2 is any amino acid
  Variant (4)..(4): Xaa in position 4 is any amino acid
  Variant (10)..(13): Xaa in position 10 to 13 is any amino acid
  Variant (16)..(20): Xaa in position 16 to 20 is any amino acid
  Variant (22)..(22): Xaa in position 22 is any amino acid
  Variant (24)..(33): Xaa in position 24 to 33 is any amino acid
  Variant (34)..(40): Xaa in position 34 to 40 is any or no amino acid
  Variant (42)..(44): Xaa in position 42 to 44 is any amino acid
  Variant (49)..(49): Xaa in position 49 is any amino acid
  Variant (53)..(54): Xaa in position 53 to 54 is any amino acid
  Variant (57)..(57): Xaa in position 57 is any amino acid
  Variant (59)..(59): Xaa in position 59 is any amino acid
  Variant (66)..(67): Xaa in position 66 to 67 is any amino acid
  Variant (71)..(71): Xaa in position 71 is any amino acid
  Variant (74)..(75): Xaa in position 74 to 75 is any amino acid
  Variant (77)..(77): Xaa in position 77 is any amino acid
  Variant (79)..(80): Xaa in position 79 to 80 is any amino acid
  Variant (83)..(84): Xaa in position 83 to 84 is any amino acid
  Variant (86)..(91): Xaa in position 86 to 91 is any amino acid
  Variant (92)..(108): Xaa in position 92 to 108 is any or no amino acid
  Variant (110)..(114): Xaa in position 110 to 114 is any amino acid
  Variant (116)..(117): Xaa in position 116 to 117 is any amino acid
  Variant (120)..(120): Xaa in position 120 is any amino acid
  Variant (123)..(123): Xaa in position 123 is any amino acid
  Variant (126)..(126): Xaa in position 126 is any amino acid
  Variant (128)..(128): Xaa in position 128 is any or no amino acid
  Variant (130)..(136): Xaa in position 130 to 136 is any amino acid
  Variant (137)..(142): Xaa in position 137 to 142 is any or no amino acid
  Variant (145)..(146): Xaa in position 145 to 146 is any amino acid
  Variant (149)..(150): Xaa in position 149 to 150 is any amino acid
  Variant (153)..(153): Xaa in position 153 is any amino acid
  Variant (162)..(162): Xaa in position 162 is any amino acid
  Variant (164)..(164): Xaa in position 164 is any amino acid
  Variant (166)..(196): Xaa in position 166 to 196 is any amino acid
  Variant (197)..(216): Xaa in position 197 to 216 is any or no amino acid
  Variant (219)..(220): Xaa in position 219 to 220 is any amino acid
  Variant (223)..(223): Xaa in position 223 is any amino acid
  Variant (227)..(227): Xaa in position 227 is any amino acid
  Variant (229)..(230): Xaa in position 229 to 230 is any amino acid
IXTXKAIVTXXXXLIXXXXXYXLXXXXXXXXXXXXXXXXXLXXXYRRFXRLRXXISXRXMVKETYXXYIRXKFXXEXFXXKRXXLXXXXXXXXXXXXXXXXXXXXXXXLXXXXXMXXSLXFVXKAXSXIXXXXXXXXXXXXXDLXXDNXXCRXILKNLLTMXYXKXXXXXXXXXXXXXXXXXXXXXXXXXXXXXXXXXXXXXXXXXXXXXXXXXXXFDXXLIXLNEXLXXRL

SEQ ID NO: 59028 - protein, 29 aa, Artificial sequence
  Consensus
  Variant (5)..(5): Xaa in position 5 is Phe, Ile, Leu or Met
  Variant (7)..(7): Xaa in position 7 is Leu or Met
  Variant (8)..(8): Xaa in position 8 is Lys or Arg
  Variant (9)..(9): Xaa in position 9 is Pro or Gln
  Variant (10)..(10): Xaa in position 10 is Phe or Leu
  Variant (11)..(11): Xaa in position 11 is Ile or Val
  Variant (12)..(12): Xaa in position 12 is Ala or Ser
  Variant (13)..(15): Xaa in position 13 to 15 is any amino acid
  Variant (17)..(17): Xaa in position 17 is Ile or Val
  Variant (19)..(19): Xaa in position 19 is Asp or Glu
  Variant (20)..(20): Xaa in position 20 is Ser or Thr
  Variant (22)..(22): Xaa in position 22 is any amino acid
  Variant (23)..(23): Xaa in position 23 is Asp, Asn or Thr
  Variant (25)..(25): Xaa in position 25 is Ile, Leu or Val
  Variant (27)..(27): Xaa in position 27 is any amino acid
  Variant (29)..(29): Xaa in position 29 is Phe or Tyr
YRRFXRXXXXXXXXXMXKXXYXXYXRXKX

SEQ ID NO: 59029 - protein, 9 aa, Artificial sequence
  Consensus
  Variant (2)..(2): Xaa in position 2 is any amino acid
  Variant (4)..(4): Xaa in position 4 is Ile, Leu or Val
  Variant (5)..(5): Xaa in position 5 is Ala, Ile or Leu
  Variant (7)..(7): Xaa in position 7 is Ala or Ser
  Variant (8)..(8): Xaa in position 8 is any amino acid
LXFXXKXXS

SEQ ID NO: 59030 - protein, 17 aa, Artificial sequence
  Consensus
  Variant (2)..(2): Xaa in position 2 is Asn or Ser
  Variant (3)..(4): Xaa in position 3 to 4 is any amino acid
  Variant (6)..(6): Xaa in position 6 is Lys or Arg
  Variant (7)..(7): Xaa in position 7 is any amino acid
  Variant (9)..(9): Xaa in position 9 is Ile or Leu
  Variant (12)..(12): Xaa in position 12 is Leu or Val
  Variant (15)..(15): Xaa in position 15 is Ile, Leu, Met or Val
  Variant (16)..(16): Xaa in position 16 is any amino acid
DXXXCXXIXKNXLTXXY

SEQ ID NO: 59031 - protein, 8 aa, Artificial sequence
  Consensus
  Variant (2)..(2): Xaa in position 2 is Glu or Asn
  Variant (3)..(3): Xaa in position 3 is any amino acid
  Variant (5)..(5): Xaa in position 5 is Gly or Asn
  Variant (6)..(6): Xaa in position 6 is any amino acid
NXXLXXRL

SEQ ID NO: 59032 - DNA, 3844 bp, Saccharomyces cerevisiae; identical to SEQ ID NO: 667
  CDS (1218)..(3269)

SEQ ID NO: 59033 - protein, 683 aa, Saccharomyces cerevisiae; identical to SEQ ID NO: 668

SEQ ID NO: 59034 - DNA, 1713 bp, Glycine max; identical to SEQ ID NO: 669
  CDS (1)..(1713)

SEQ ID NO: 59035 - protein, 570 aa, Glycine max; identical to SEQ ID NO: 670

SEQ ID NO: 59036 - DNA, 1644 bp, Glycine max; identical to SEQ ID NO: 671
  CDS (1)..(1644)

SEQ ID NO: 59037 - protein, 547 aa, Glycine max; identical to SEQ ID NO: 672

SEQ ID NO: 59038 - DNA, 1641 bp, Glycine max; identical to SEQ ID NO: 673
  CDS (1)..(1641)

SEQ ID NO: 59039 - protein, 546 aa, Glycine max; identical to SEQ ID NO: 674

SEQ ID NO: 59040 - DNA, 1668 bp, Zea mays; identical to SEQ ID NO: 675
  misc_feature (603)..(603): n is a, c, g, or t
  CDS (1)..(1668)

SEQ ID NO: 59041 - protein, 555 aa, Zea mays; identical to SEQ ID NO: 676

SEQ ID NO: 59042 - DNA, 1659 bp, Brassica napus; identical to SEQ ID NO: 677
  CDS (1)..(1659)

SEQ ID NO: 59043 - protein, 552 aa, Brassica napus; identical to SEQ ID NO: 678

SEQ ID NO: 59044 - DNA, 1689 bp, Glycine max; identical to SEQ ID NO: 679
  CDS (1)..(1689)

SEQ ID NO: 59045 - protein, 562 aa, Glycine max; identical to SEQ ID NO: 680

SEQ ID NO: 59046 - DNA, 3359 bp, Methanothrix soehngenii; identical to SEQ ID NO: 681
  CDS (310)..(2328)

SEQ ID NO: 59047 - protein, 672 aa, Methanothrix soehngenii [sequence omitted]

SEQ ID NO: 59048 - DNA, 3802 bp, Alcaligenes eutrophus; identical to SEQ ID NO: 683
  CDS (722)..(2704)

SEQ ID NO: 59049 - protein, 660 aa, Alcaligenes eutrophus [sequence omitted]

SEQ ID NO: 59050 - DNA, 1845 bp, Phanerochaete chrysosporium; identical to SEQ ID NO: 685
  CDS (1)..(1845)

SEQ ID NO: 59051 - protein, 614 aa, Phanerochaete chrysosporium; identical to SEQ ID NO: 686

SEQ ID NO: 59052 - DNA, 1938 bp, Pseudomonas aeruginosa; identical to SEQ ID NO: 687
  CDS (1)..(1938)

SEQ ID NO: 59053 - protein, 645 aa, Pseudomonas aeruginosa [sequence omitted]

SEQ ID NO: 59054 - DNA, 1668 bp, Pseudomonas aeruginosa; identical to SEQ ID NO: 689
  CDS (1)..(1668)

SEQ ID NO: 59055 - protein, 555 aa, Pseudomonas aeruginosa; identical to SEQ ID NO: 690

SEQ ID NO: 59056 - DNA, 1947 bp, Bacillus halodurans; identical to SEQ ID NO: 691
  CDS (1)..(1947)

SEQ ID NO: 59057 - protein, 648 aa, Bacillus halodurans; identical to SEQ ID NO: 692

SEQ ID NO: 59058 - DNA, 1707 bp, Staphylococcus aureus; identical to SEQ ID NO: 693
  CDS (1)..(1707)

SEQ ID NO: 59059 - protein, 568 aa, Staphylococcus aureus; identical to SEQ ID NO: 694

SEQ ID NO: 59060 - DNA, 1887 bp, Salmonella enterica subsp. enterica serovar Typhi; identical to SEQ ID NO: 695
  CDS (1)..(1887)

SEQ ID NO: 59061 - protein, 628 aa, Salmonella enterica subsp. enterica serovar Typhi; identical to SEQ ID NO: 696

SEQ ID NO: 59062 - DNA, 1575 bp, Nostoc sp. PCC 7120; identical to SEQ ID NO: 697
  CDS (1)..(1575)

SEQ ID NO: 59063 - protein, 524 aa, Nostoc sp. PCC 7120; identical to SEQ ID NO: 698

SEQ ID NO: 59064 - DNA, 1992 bp, Brucella melitensis; identical to SEQ ID NO: 699
  CDS (1)..(1992)

SEQ ID NO: 59065 - protein, 663 aa, Brucella melitensis; identical to SEQ ID NO: 700

SEQ ID NO: 59066 - DNA, 1707 bp, Brucella melitensis; identical to SEQ ID NO: 701
  CDS (1)..(1707)

SEQ ID NO: 59067 - protein, 568 aa, Brucella melitensis; identical to SEQ ID NO: 702

SEQ ID NO: 59068 - DNA, 1959 bp, Yersinia pestis; identical to SEQ ID NO: 703
  CDS (1)..(1959)

SEQ ID NO: 59069 - protein, 652 aa, Yersinia pestis; identical to SEQ ID NO: 704

SEQ ID NO: 59070 - DNA, 1716 bp, Bacillus halodurans; identical to SEQ ID NO: 705
  CDS (1)..(1716)

SEQ ID NO: 59071 - protein, 571 aa, Bacillus halodurans; identical to SEQ ID NO: 706

SEQ ID NO: 59072 - DNA, 2004 bp, Halobacterium sp. NRC-1; identical to SEQ ID NO: 707
  CDS (1)..(2004)

SEQ ID NO: 59073 - protein, 667 aa, Halobacterium sp. NRC-1; identical to SEQ ID NO: 708

SEQ ID NO: 59074 - DNA, 1944 bp, Caulobacter crescentus; identical to SEQ ID NO: 709
  CDS (1)..(1944)

SEQ ID NO: 59075 - protein, 647 aa, Caulobacter crescentus [sequence omitted]

SEQ ID NO: 59076 - DNA, 1716 bp, Sulfolobus solfataricus; identical to SEQ ID NO: 711
  CDS (1)..(1716)

SEQ ID NO: 59077 - protein, 571 aa, Sulfolobus solfataricus; identical to SEQ ID NO: 712

SEQ ID NO: 59078 - DNA, 2001 bp, Sulfolobus solfataricus; identical to SEQ ID NO: 713
  CDS (1)..(2001)

SEQ ID NO: 59079 - protein, 666 aa, Sulfolobus solfataricus; identical to SEQ ID NO: 714

SEQ ID NO: 59080 - DNA, 1959 bp, Escherichia coli; identical to SEQ ID NO: 715
  CDS (1)..(1959)

SEQ ID NO: 59081 - protein, 652 aa, Escherichia coli; identical to SEQ ID NO: 716

SEQ ID NO: 59082 - DNA, 1533 bp, Aquifex aeolicus; identical to SEQ ID NO: 717
  CDS (1)..(1533)

SEQ ID NO: 59083 - protein, 510 aa, Aquifex aeolicus; identical to SEQ ID NO: 718

SEQ ID NO: 59084 - DNA, 1950 bp, Deinococcus radiodurans; identical to SEQ ID NO: 719
  CDS (1)..(1950)

SEQ ID NO: 59085 - protein, 649 aa, Deinococcus radiodurans [sequence omitted]

SEQ ID NO: 59086 - DNA, 1929 bp, Deinococcus radiodurans; identical to SEQ ID NO: 721
  CDS (1)..(1929)

SEQ ID NO: 59087 - protein, 642 aa, Deinococcus radiodurans; identical to SEQ ID NO: 722

SEQ ID NO: 59088 - DNA, 1899 bp, Vibrio cholerae; identical to SEQ ID NO: 723
  CDS (1)..(1899)

SEQ ID NO: 59089 - protein, 632 aa, Vibrio cholerae; identical to SEQ ID NO: 724

SEQ ID NO: 59090 - DNA, 1956 bp, Pseudomonas aeruginosa; identical to SEQ ID NO: 725
  CDS (1)..(1956)

SEQ ID NO: 59091 - protein, 651 aa, Pseudomonas aeruginosa [sequence omitted]

SEQ ID NO: 59092 - DNA, 1497 bp, Sulfolobus solfataricus; identical to SEQ ID NO: 727
  CDS (1)..(1497)

SEQ ID NO: 59093 - protein, 498 aa, Sulfolobus solfataricus; identical to SEQ ID NO: 728

SEQ ID NO: 59094 - DNA, 1869 bp, Sulfolobus solfataricus; identical to SEQ ID NO: 729
  CDS (1)..(1869)

SEQ ID NO: 59095 - protein, 622 aa, Sulfolobus solfataricus; identical to SEQ ID NO: 730

SEQ ID NO: 59096 - DNA, 1989 bp, Helicobacter pylori; identical to SEQ ID NO: 731
  CDS (1)..(1989)

SEQ ID NO: 59097 - protein, 662 aa, Helicobacter pylori [sequence omitted]

SEQ ID NO: 59098 - DNA, 1989 bp, Archaeoglobus fulgidus; identical to SEQ ID NO: 733
  CDS (1)..(1989)

SEQ ID NO: 59099 - protein, 662 aa, Archaeoglobus fulgidus; identical to SEQ ID NO: 734

SEQ ID NO: 59100 - DNA, 1932 bp, Archaeoglobus fulgidus; identical to SEQ ID NO: 735
  CDS (1)..(1932)

SEQ ID NO: 59101 - protein, 643 aa, Archaeoglobus fulgidus; identical to SEQ ID NO: 736

SEQ ID NO: 59102 - DNA, 1542 bp, Aeropyrum pernix; identical to SEQ ID NO: 737
  CDS (1)..(1542)

SEQ ID NO: 59103 - protein, 513 aa, Aeropyrum pernix; identical to SEQ ID NO: 738

SEQ ID NO: 59104 - DNA, 1944 bp, Xylella fastidiosa; identical to SEQ ID NO: 739
  CDS (1)..(1944)

SEQ ID NO: 59105 - protein, 647 aa, Xylella fastidiosa [sequence omitted]

SEQ ID NO: 59106 - DNA, 1827 bp, Sulfolobus solfataricus; identical to SEQ ID NO: 741
  CDS (1)..(1827)

SEQ ID NO: 59107 - protein, 608 aa, Sulfolobus solfataricus; identical to SEQ ID NO: 742

SEQ ID NO: 59108 - DNA, 1959 bp, Sulfolobus solfataricus; identical to SEQ ID NO: 743
  CDS (1)..(1959)

SEQ ID NO: 59109 - protein, 652 aa, Sulfolobus solfataricus; identical to SEQ ID NO: 744

SEQ ID NO: 59110 - DNA, 2046 bp, Archaeoglobus fulgidus; identical to SEQ ID NO: 745
  CDS (1)..(2046)

SEQ ID NO: 59111 - protein, 681 aa, Archaeoglobus fulgidus; identical to SEQ ID NO: 746

SEQ ID NO: 59112 - DNA, 1761 bp, Archaeoglobus fulgidus; identical to SEQ ID NO: 747
  CDS (1)..(1761)

SEQ ID NO: 59113 - protein, 586 aa, Archaeoglobus fulgidus; identical to SEQ ID NO: 748

SEQ ID NO: 59114 - DNA, 1983 bp, Aeropyrum pernix; identical to SEQ ID NO: 749
  CDS (1)..(1983)

SEQ ID NO: 59115 - protein, 660 aa, Aeropyrum pernix; identical to SEQ ID NO: 750

SEQ ID NO: 59116 - DNA, 1677 bp, Methanobacterium thermoautotrophicum; identical to SEQ ID NO: 751
  CDS (1)..(1677)

SEQ ID NO: 59117 - protein, 558 aa, Methanobacterium thermoautotrophicum; identical to SEQ ID NO: 752

SEQ ID NO: 59118 - DNA, 1929 bp, Archaeoglobus fulgidus; identical to SEQ ID NO: 753
  CDS (1)..(1929)

SEQ ID NO: 59119 - protein, 642 aa, Archaeoglobus fulgidus; identical to SEQ ID NO: 754

SEQ ID NO: 59120 - DNA, 1974 bp, Campylobacter jejuni; identical to SEQ ID NO: 755
  CDS (1)..(1974)

SEQ ID NO: 59121 - protein, 657 aa, Campylobacter jejuni [sequence omitted]

SEQ ID NO: 59122 - DNA, 1956 bp, Pseudomonas aeruginosa; identical to SEQ ID NO: 757
  CDS (1)..(1956)

SEQ ID NO: 59123 - protein, 651 aa, Pseudomonas aeruginosa; identical to SEQ ID NO: 758

SEQ ID NO: 59124 - DNA, 1887 bp, Pseudomonas aeruginosa; identical to SEQ ID NO: 759
  CDS (1)..(1887)

SEQ ID NO: 59125 - protein, 628 aa, Pseudomonas aeruginosa [sequence omitted]

SEQ ID NO: 59126 - DNA, 1971 bp, Halobacterium sp. NRC-1; identical to SEQ ID NO: 761
  CDS (1)..(1971)

SEQ ID NO: 59127 - protein, 656 aa, Halobacterium sp. NRC-1; identical to SEQ ID NO: 762

SEQ ID NO: 59128 - DNA, 1719 bp, Bacillus subtilis; identical to SEQ ID NO: 763
  CDS (1)..(1719)

SEQ ID NO: 59129 - protein, 572 aa, Bacillus subtilis; identical to SEQ ID NO: 764

SEQ ID NO: 59130 - DNA, 2019 bp, Phycomyces blakesleeanus; identical to SEQ ID NO: 765
  CDS (1)..(2019)

SEQ ID NO: 59131 - protein, 672 aa, Phycomyces blakesleeanus [sequence omitted]

SEQ ID NO: 59132 - DNA, 2674 bp, Drosophila melanogaster; identical to SEQ ID NO: 767
  CDS (419)..(2164)

SEQ ID NO: 59133 - protein, 581 aa, Drosophila melanogaster; identical to SEQ ID NO: 768

SEQ ID NO: 59134 - DNA, 1962 bp, Synechocystis sp; identical to SEQ ID NO: 769
  CDS (1)..(1962)

SEQ ID NO: 59135 - protein, 653 aa, Synechocystis sp [sequence omitted]

SEQ ID NO: 59136 - DNA, 2013 bp, Emericella nidulans, Aspergillus nidulans; identical to SEQ ID NO: 771
  CDS (1)..(2013)

SEQ ID NO: 59137 - protein, 670 aa, Emericella nidulans, Aspergillus nidulans [sequence omitted]

SEQ ID NO: 59138 - DNA, 1881 bp, Neurospora crassa; identical to SEQ ID NO: 773
  CDS (1)..(1881)

SEQ ID NO: 59139 - protein, 626 aa, Neurospora crassa [sequence omitted]

SEQ ID NO: 59140 - DNA, 1971 bp, Rhodobacter capsulatus; identical to SEQ ID NO: 775
  CDS (1)..(1971)

SEQ ID NO: 59141 - protein, 656 aa, Rhodobacter capsulatus [sequence omitted]

SEQ ID NO: 59142 - DNA, 2043 bp, Caenorhabditis elegans; identical to SEQ ID NO: 777
  CDS (1)..(2043)

SEQ ID NO: 59143 - protein, 680 aa, Caenorhabditis elegans; identical to SEQ ID NO: 778

SEQ ID NO: 59144 - DNA, 1956 bp, Streptomyces coelicolor; identical to SEQ ID NO: 779
  CDS (1)..(1956)

SEQ ID NO: 59145 - protein, 651 aa, Streptomyces coelicolor; identical to SEQ ID NO: 780

SEQ ID NO: 59146 - DNA, 1989 bp, Schizosaccharomyces pombe; identical to SEQ ID NO: 781
  CDS (1)..(1989)

SEQ ID NO: 59147 - protein, 662 aa, Schizosaccharomyces pombe [sequence omitted]

SEQ ID NO: 59148 - DNA, 2013 bp, Pyrobaculum aerophilum; identical to SEQ ID NO: 783
  CDS (1)..(2013)

SEQ ID NO: 59149 - protein, 670 aa, Pyrobaculum aerophilum [sequence omitted]

SEQ ID NO: 59150 - DNA, 2010 bp, Penicillium chrysogenum; identical to SEQ ID NO: 785
  CDS (1)..(2010)

SEQ ID NO: 59151 - protein, 669 aa, Penicillium chrysogenum; identical to SEQ ID NO: 786

SEQ ID NO: 59152 - DNA, 2323 bp, Homo sapiens; identical to SEQ ID NO: 787
  CDS (92)..(2152)

SEQ ID NO: 59153 - protein, 686 aa, Homo sapiens; identical to SEQ ID NO: 788

SEQ ID NO: 59154 - DNA, 1950 bp, Pseudomonas putida; identical to SEQ ID NO: 789
  CDS (1)..(1950)

SEQ ID NO: 59155 - protein, 649 aa, Pseudomonas putida; identical to SEQ ID NO: 790

SEQ ID NO: 59156 - DNA, 2444 bp, Lysobacter; identical to SEQ ID NO: 791
  CDS (337)..(2232)

SEQ ID NO: 59157 - protein, 631 aa, Lysobacter; identical to SEQ ID NO: 792

SEQ ID NO: 59158 - DNA, 2016 bp, Debaryomyces hansenii; identical to SEQ ID NO: 793
  CDS (1)..(2016)

SEQ ID NO: 59159 - protein, 671 aa, Debaryomyces hansenii; identical to SEQ ID NO: 794

SEQ ID NO: 59160 - DNA, 2040 bp, Debaryomyces hansenii; identical to SEQ ID NO: 795
  CDS (1)..(2040)

SEQ ID NO: 59161 - protein, 679 aa, Debaryomyces hansenii; identical to SEQ ID NO: 796

SEQ ID NO: 59162 - DNA, 1974 bp, Yarrowia lipolytica; identical to SEQ ID NO: 797
  CDS (1)..(1974)

SEQ ID NO: 59163 - protein, 657 aa, Yarrowia lipolytica; identical to SEQ ID NO: 798

SEQ ID NO: 59164 - DNA, 2124 bp, Kluyveromyces lactis; identical to SEQ ID NO: 799
  CDS (1)..(2124)

SEQ ID NO: 59165 - protein, 707 aa, Kluyveromyces lactis; identical to SEQ ID NO: 800

SEQ ID NO: 59166 - DNA, 1962 bp, Pseudomonas putida; identical to SEQ ID NO: 801
  CDS (1)..(1962)

SEQ ID NO: 59167 - protein, 653 aa, Pseudomonas putida; identical to SEQ ID NO: 802

SEQ ID NO: 59168 - DNA, 1644 bp, Acinetobacter sp; identical to SEQ ID NO: 803
  CDS (1)..(1644)

SEQ ID NO: 59169 - protein, 547 aa, Acinetobacter sp; identical to SEQ ID NO: 804

SEQ ID NO: 59170 - DNA, 1644 bp, Acinetobacter sp; identical to SEQ ID NO: 805
  CDS (1)..(1644)

SEQ ID NO: 59171 - protein, 547 aa, Acinetobacter sp; identical to SEQ ID NO: 806

SEQ ID NO: 59172 - DNA, 2115 bp, Candida glabrata; identical to SEQ ID NO: 807
  CDS (1)..(2115)

SEQ ID NO: 59173 - protein, 704 aa, Candida glabrata; identical to SEQ ID NO: 808

SEQ ID NO: 59174 - DNA, 2052 bp, Candida glabrata; identical to SEQ ID NO: 809
  CDS (1)..(2052)

SEQ ID NO: 59175 - protein, 683 aa, Candida glabrata; identical to SEQ ID NO: 810

SEQ ID NO: 59176 - DNA, 1959 bp, Bartonella quintana; identical to SEQ ID NO: 811
  CDS (1)..(1959)

SEQ ID NO: 59177 - protein, 652 aa, Bartonella quintana; identical to SEQ ID NO: 812

SEQ ID NO: 59178 - DNA, 1959 bp, Bartonella henselae; identical to SEQ ID NO: 813
  CDS (1)..(1959)

SEQ ID NO: 59179 - protein, 652 aa, Bartonella henselae; identical to SEQ ID NO: 814

SEQ ID NO: 59180 - DNA, 2763 bp, Oryza sativa; identical to SEQ ID NO: 815
  CDS (355)..(2472)

SEQ ID NO: 59181 - protein, 705 aa, Oryza sativa; identical to SEQ ID NO: 816

SEQ ID NO: 59182 - DNA, 1941 bp, Bacillus thuringiensis serovar konkukian str; identical to SEQ ID NO: 817
  CDS (1)..(1941)

SEQ ID NO: 59183 - protein, 646 aa, Bacillus thuringiensis serovar konkukian str; identical to SEQ ID NO: 818

SEQ ID NO: 59184 - DNA, 1953 bp, Picrophilus torridus; identical to SEQ ID NO: 819
  CDS (1)..(1953)

SEQ ID NO: 59185 - protein, 650 aa, Picrophilus torridus; identical to SEQ ID NO: 820

SEQ ID NO: 59186 - DNA, 2994 bp, Plasmodium falciparum; identical to SEQ ID NO: 821
  CDS (1)..(2994)

SEQ ID NO: 59187 - protein, 997 aa, Plasmodium falciparum; identical to SEQ ID NO: 822

SEQ ID NO: 59188 - DNA, 2007 bp, Photobacterium profundum; identical to SEQ ID NO: 823
  CDS (1)..(2007)

SEQ ID NO: 59189 - protein, 668 aa, Photobacterium profundum; identical to SEQ ID NO: 824

SEQ ID NO: 59190 - DNA, 1899 bp, Photobacterium profundum; identical to SEQ ID NO: 825
  CDS (1)..(1899)

SEQ ID NO: 59191 - protein, 632 aa, Photobacterium profundum; identical to SEQ ID NO: 826

SEQ ID NO: 59192 - DNA, 1950 bp, Photobacterium profundum; identical to SEQ ID NO: 827
  CDS (1)..(1950)

SEQ ID NO: 59193 - protein, 649 aa, Photobacterium profundum; identical to SEQ ID NO: 828

SEQ ID NO: 59194 - DNA, 1674 bp, Methanococcus maripaludis; identical to SEQ ID NO: 829
  CDS (1)..(1674)

SEQ ID NO: 59195 - protein, 557 aa, Methanococcus maripaludis; identical to SEQ ID NO: 830

SEQ ID NO: 59196 - DNA, 1911 bp, Methanococcus maripaludis; identical to SEQ ID NO: 831
  CDS (1)..(1911)

SEQ ID NO: 59197 - protein, 636 aa, Methanococcus maripaludis; identical to SEQ ID NO: 832

SEQ ID NO: 59198 - DNA, 1938 bp, Bdellovibrio bacteriovorus; identical to SEQ ID NO: 833
  CDS (1)..(1938)

SEQ ID NO: 59199 - protein, 645 aa, Bdellovibrio bacteriovorus; identical to SEQ ID NO: 834

SEQ ID NO: 59200 - DNA, 1911 bp, Rhodopseudomonas palustris; identical to SEQ ID NO: 835
  CDS (1)..(1911)

SEQ ID NO: 59201 - protein, 636 aa, Rhodopseudomonas palustris; identical to SEQ ID NO: 836

SEQ ID NO: 59202 - DNA, 1692 bp, Rhodopseudomonas palustris; identical to SEQ ID NO: 837
  CDS (1)..(1692)

SEQ ID NO: 59203 - protein, 563 aa, Rhodopseudomonas palustris; identical to SEQ ID NO: 838

SEQ ID NO: 59204 - DNA, 1953 bp, Rhodopseudomonas palustris; identical to SEQ ID NO: 839
  CDS (1)..(1953)

SEQ ID NO: 59205 - protein, 650 aa, Rhodopseudomonas palustris; identical to SEQ ID NO: 840

SEQ ID NO: 59206 - DNA, 1959 bp, uncultured bacterium 314; identical to SEQ ID NO: 841
  CDS (1)..(1959)

SEQ ID NO: 59207 - protein, 652 aa, uncultured bacterium 314; identical to SEQ ID NO: 842

SEQ ID NO: 59208 - DNA, 1938 bp, uncultured bacterium 311; identical to SEQ ID NO: 843
  CDS (1)..(1938)

SEQ ID NO: 59209 - protein, 645 aa, uncultured bacterium 311; identical to SEQ ID NO: 844

SEQ ID NO: 59210 - DNA, 1743 bp, Rattus norvegicus; identical to SEQ ID NO: 845
  CDS (1)..(1743)

SEQ ID NO: 59211 - protein, 580 aa, Rattus norvegicus; identical to SEQ ID NO: 846

SEQ ID NO: 59212 - DNA, 1740 bp, Klebsiella pneumoniae; identical to SEQ ID NO: 847
  CDS (1)..(1740)

SEQ ID NO: 59213 - protein, 579 aa, Klebsiella pneumoniae; identical to SEQ ID NO: 848

SEQ ID NO: 59214 - DNA, 1821 bp, Homo sapiens; identical to SEQ ID NO: 849
  CDS (1)..(1821)

SEQ ID NO: 59215 - protein, 606 aa, Homo sapiens; identical to SEQ ID NO: 850

SEQ ID NO: 59216 - DNA, 1716 bp, Thermoproteus tenax; identical to SEQ ID NO: 851
  CDS (1)..(1716)

SEQ ID NO: 59217 - protein, 571 aa, Thermoproteus tenax; identical to SEQ ID NO: 852

SEQ ID NO: 59218 - DNA, 2118 bp, Agrobacterium vitis; identical to SEQ ID NO: 853
  CDS (1)..(2118)

SEQ ID NO: 59219 - protein, 705 aa, Agrobacterium vitis; identical to SEQ ID NO: 854

SEQ ID NO: 59220 - DNA, 1578 bp, Listeria monocytogenes; identical to SEQ ID NO: 855
  CDS (1)..(1578)

SEQ ID NO: 59221 - protein, 525 aa, Listeria monocytogenes; identical to SEQ ID NO: 856

SEQ ID NO: 59222 - DNA, 1986 bp, Desulfovibrio vulgaris; identical to SEQ ID NO: 857
  CDS (1)..(1986)

SEQ ID NO: 59223 - protein, 661 aa, Desulfovibrio vulgaris; identical to SEQ ID NO: 858

SEQ ID NO: 59224 - DNA, 1656 bp, Desulfovibrio vulgaris; identical to SEQ ID NO: 859
  CDS (1)..(1656)

SEQ ID NO: 59225 - protein, 551 aa, Desulfovibrio vulgaris; identical to SEQ ID NO: 860

SEQ ID NO: 59226 - DNA, 1947 bp, Desulfovibrio vulgaris; identical to SEQ ID NO: 861
  CDS (1)..(1947)

SEQ ID NO: 59227 - protein, 648 aa, Desulfovibrio vulgaris; identical to SEQ ID NO: 862

SEQ ID NO: 59228 - DNA, 1890 bp, Thermus thermophilus; identical to SEQ ID NO: 863
  CDS (1)..(1890)

SEQ ID NO: 59229 - protein, 629 aa, Thermus thermophilus; identical to SEQ ID NO: 864

SEQ ID NO: 59230 - DNA, 1884 bp, Thermus thermophilus; identical to SEQ ID NO: 865
  CDS (1)..(1884)

SEQ ID NO: 59231 - protein, 627 aa, Thermus thermophilus; identical to SEQ ID NO: 866

SEQ ID NO: 59232 - DNA, 2538 bp, Thermus thermophilus; identical to SEQ ID NO: 867
  CDS (1)..(2538)

SEQ ID NO: 59233 - protein, 845 aa, Thermus thermophilus; identical to SEQ ID NO: 868

SEQ ID NO: 59234 - DNA, 1947 bp, Thermus thermophilus; identical to SEQ ID NO: 869
  CDS (1)..(1947)

SEQ ID NO: 59235 - protein, 648 aa, Thermus thermophilus; identical to SEQ ID NO: 870

SEQ ID NO: 59236 - DNA, 1719 bp, Bacillus cereus; identical to SEQ ID NO: 871
  CDS (1)..(1719)

SEQ ID NO: 59237 - protein, 572 aa, Bacillus cereus; identical to SEQ ID NO: 872

SEQ ID NO: 59238 - DNA, 1653 bp, Treponema denticola; identical to SEQ ID NO: 873
  CDS (1)..(1653)

SEQ ID NO: 59239 - protein, 550 aa, Treponema denticola; identical to SEQ ID NO: 874

SEQ ID NO: 59240 - DNA, 1953 bp, Mycobacterium paratuberculosis; identical to SEQ ID NO: 875
  CDS (1)..(1953)

SEQ ID NO: 59241 - protein, 650 aa, Mycobacterium paratuberculosis; identical to SEQ ID NO: 876

SEQ ID NO: 59242 - DNA, 2064 bp, Ashbya gossypii; identical to SEQ ID NO: 877
  CDS (1)..(2064)

SEQ ID NO: 59243 - protein, 687 aa, Ashbya gossypii; identical to SEQ ID NO: 878

SEQ ID NO: 59244 - DNA, 2085 bp, Ashbya gossypii; identical to SEQ ID NO: 879
  CDS (1)..(2085)

SEQ ID NO: 59245 - protein, 694 aa, Ashbya gossypii; identical to SEQ ID NO: 880

SEQ ID NO: 59246 - DNA, 1977 bp, Dictyostelium discoideum; identical to SEQ ID NO: 881
  CDS (1)..(1977)

SEQ ID NO: 59247 - protein, 658 aa, Dictyostelium discoideum; identical to SEQ ID NO: 882

SEQ ID NO: 59248 - DNA, 2046 bp, Dictyostelium discoideum; identical to SEQ ID NO: 883
  CDS (1)..(2046)

SEQ ID NO: 59249 - protein, 681 aa, Dictyostelium discoideum; identical to SEQ ID NO: 884

SEQ ID NO: 59250 - DNA, 2316 bp, Oryza sativa; identical to SEQ ID NO: 885
  CDS (1)..(2316)

SEQ ID NO: 59251 - protein, 771 aa, Oryza sativa; identical to SEQ ID NO: 886

SEQ ID NO: 59252 - DNA, 1965 bp, Wolinella succinogenes; identical to SEQ ID NO: 887
  CDS (1)..(1965)

SEQ ID NO: 59253 - protein, 654 aa, Wolinella succinogenes; identical to SEQ ID NO: 888

SEQ ID NO: 59254 - DNA, 1956 bp, Photorhabdus luminescens; identical to SEQ ID NO: 889
  CDS (1)..(1956)

SEQ ID NO: 59255 - protein, 651 aa, Photorhabdus luminescens; identical to SEQ ID NO: 890

SEQ ID NO: 59256 - DNA, 2043 bp, Vibrio vulnificus; identical to SEQ ID NO: 891
  CDS (1)..(2043)

SEQ ID NO: 59257 - protein, 680 aa, Vibrio vulnificus; identical to SEQ ID NO: 892

SEQ ID NO: 59258 - DNA, 2013 bp, Vibrio vulnificus; identical to SEQ ID NO: 893
  CDS (1)..(2013)

SEQ ID NO: 59259 - protein, 670 aa, Vibrio vulnificus; identical to SEQ ID NO: 894

SEQ ID NO: 59260 - DNA, 1887 bp, Photorhabdus luminescens; identical to SEQ ID NO: 895
  CDS (1)..(1887)

SEQ ID NO: 59261 - protein, 628 aa, Photorhabdus luminescens; identical to SEQ ID NO: 896

SEQ ID NO: 59262 - DNA, 1944 bp, Gloeobacter violaceus; identical to SEQ ID NO: 897
  CDS (1)..(1944)

SEQ ID NO: 59263 - protein, 647 aa, Gloeobacter violaceus; identical to SEQ ID NO: 898

SEQ ID NO: 59264 - DNA, 1965 bp, Chromobacterium violaceum; identical to SEQ ID NO: 899
  CDS (1)..(1965)

SEQ ID NO: 59265 - protein, 654 aa, Chromobacterium violaceum; identical to SEQ ID NO: 900

SEQ ID NO: 59266 - DNA, 1962 bp, Chromobacterium violaceum; identical to SEQ ID NO: 901
  CDS (1)..(1962)

SEQ ID NO: 59267 - protein, 653 aa, Chromobacterium violaceum; identical to SEQ ID NO: 902

SEQ ID NO: 59268 - DNA, 1713 bp, Anopheles gambiae str; identical to SEQ ID NO: 903
  CDS (1)..(1713)

SEQ ID NO: 59269 - protein, 570 aa, Anopheles gambiae str; identical to SEQ ID NO: 904

SEQ ID NO: 59270 - DNA, 2856 bp, Plasmodium yoelii yoelii; identical to SEQ ID NO: 905
  CDS (1)..(2856)

SEQ ID NO: 59271 - protein, 951 aa, Plasmodium yoelii yoelii; identical to SEQ ID NO: 906

SEQ ID NO: 59272 - DNA, 2130 bp, Neurospora crassa; identical to SEQ ID NO: 907
  CDS (1)..(2130)

SEQ ID NO: 59273 - protein, 709 aa, Neurospora crassa; identical to SEQ ID NO: 908

SEQ ID NO: 59274 - DNA, 2070 bp, Synechococcus sp; identical to SEQ ID NO: 909
  CDS (1)..(2070)

SEQ ID NO: 59275 - protein, 689 aa, Synechococcus sp; identical to SEQ ID NO: 910

SEQ ID NO: 59276 - DNA, 1983 bp, Prochlorococcus marinus subsp; identical to SEQ ID NO: 911
  CDS (1)..(1983)

SEQ ID NO: 59277 - protein, 660 aa, Prochlorococcus marinus subsp; identical to SEQ ID NO: 912

SEQ ID NO: 59278 - DNA, 1977 bp, Prochlorococcus marinus; identical to SEQ ID NO: 913
  CDS (1)..(1977)

SEQ ID NO: 59279 - protein, 658 aa, Prochlorococcus marinus; identical to SEQ ID NO: 914

SEQ ID NO: 59280 - DNA, 1977 bp, Prochlorococcus marinus; identical to SEQ ID NO: 915
  CDS (1)..(1977)

SEQ ID NO: 59281 - protein, 658 aa, Prochlorococcus marinus; identical to SEQ ID NO: 916

SEQ ID NO: 59282 - DNA, 1902 bp, Helicobacter hepaticus; identical to SEQ ID NO: 917
  CDS (1)..(1902)

SEQ ID NO: 59283 - protein, 633 aa, Helicobacter hepaticus; identical to SEQ ID NO: 918

SEQ ID NO: 59284 - DNA, 1890 bp, Bordetella parapertussis; identical to SEQ ID NO: 919
  CDS (1)..(1890)

SEQ ID NO: 59285 - protein, 629 aa, Bordetella parapertussis; identical to SEQ ID NO: 920

SEQ ID NO: 59286 - DNA, 2046 bp, Bordetella parapertussis; identical to SEQ ID NO: 921
  CDS (1)..(2046)

SEQ ID NO: 59287 - protein, 681 aa, Bordetella parapertussis; identical to SEQ ID NO: 922

SEQ ID NO: 59288 - DNA, 1950 bp, Bordetella bronchiseptica; identical to SEQ ID NO: 923
  CDS (1)..(1950)

SEQ ID NO: 59289 - protein, 649 aa, Bordetella bronchiseptica; identical to SEQ ID NO: 924

SEQ ID NO: 59290 - DNA, 3626 bp, Homo sapiens; identical to SEQ ID NO: 925
  CDS (6)..(2069)

SEQ ID NO: 59291 - protein, 687 aa, Homo sapiens [sequence omitted]

SEQ ID NO: 59292 - DNA, 1941 bp, Bacillus cereus; identical to SEQ ID NO: 927
  CDS (1)..(1941)

SEQ ID NO: 59293 - protein, 646 aa, Bacillus cereus; identical to SEQ ID NO: 928

SEQ ID NO: 59294 - DNA, 1968 bp, Streptomyces avermitilis; identical to SEQ ID NO: 929
  CDS (1)..(1968)

SEQ ID NO: 59295 - protein, 655 aa, Streptomyces avermitilis; identical to SEQ ID NO: 930

SEQ ID NO: 59296 - DNA, 2019 bp, Streptomyces avermitilis; identical to SEQ ID NO: 931
  CDS (1)..(2019)

SEQ ID NO: 59297 - protein, 672 aa, Streptomyces avermitilis; identical to SEQ ID NO: 932

SEQ ID NO: 59298 - DNA, 1953 bp, Coxiella burnetii; identical to SEQ ID NO: 933
  CDS (1)..(1953)

SEQ ID NO: 59299 - protein, 650 aa, Coxiella burnetii; identical to SEQ ID NO: 934

SEQ ID NO: 59300 - DNA, 1968 bp, Dictyostelium discoideum; identical to SEQ ID NO: 935
  CDS (1)..(1968)

SEQ ID NO: 59301 - protein, 655 aa, Dictyostelium discoideum; identical to SEQ ID NO: 936

SEQ ID NO: 59302 - DNA, 1956 bp, Dictyostelium discoideum; identical to SEQ ID NO: 937
  CDS (1)..(1956)

SEQ ID NO: 59303 - protein, 651 aa, Dictyostelium discoideum; identical to SEQ ID NO: 938

SEQ ID NO: 59304 - DNA, 1968 bp, Dictyostelium discoideum; identical to SEQ ID NO: 939
  CDS (1)..(1968)

SEQ ID NO: 59305 - protein, 655 aa, Dictyostelium discoideum; identical to SEQ ID NO: 940

SEQ ID NO: 59306 - DNA, 1944 bp, Dictyostelium discoideum; identical to SEQ ID NO: 941
  CDS (1)..(1944)

SEQ ID NO: 59307 - protein, 647 aa, Dictyostelium discoideum; identical to SEQ ID NO: 942

SEQ ID NO: 59308 - DNA, 1941 bp, Dictyostelium discoideum; identical to SEQ ID NO: 943
  CDS (1)..(1941)

SEQ ID NO: 59309 - protein, 646 aa, Dictyostelium discoideum; identical to SEQ ID NO: 944

SEQ ID NO: 59310 - DNA, 2085 bp, Neurospora crassa; identical to SEQ ID NO: 945
  CDS (1)..(2085)

SEQ ID NO: 59311 - protein, 694 aa, Neurospora crassa; identical to SEQ ID NO: 946

SEQ ID NO: 59312 - DNA, 2034 bp, Vibrio parahaemolyticus; identical to SEQ ID NO: 947
  CDS (1)..(2034)

SEQ ID NO: 59313 - protein, 677 aa, Vibrio parahaemolyticus; identical to SEQ ID NO: 948

SEQ ID NO: 59314 - DNA, 1971 bp, Vibrio parahaemolyticus; identical to SEQ ID NO: 949
  CDS (1)..(1971)

SEQ ID NO: 59315 - protein, 656 aa, Vibrio parahaemolyticus; identical to SEQ ID NO: 950

SEQ ID NO: 59316 - DNA, 1905 bp, Vibrio parahaemolyticus; identical to SEQ ID NO: 951
  CDS (1)..(1905)

SEQ ID NO: 59317 - protein, 634 aa, Vibrio parahaemolyticus; identical to SEQ ID NO: 952

SEQ ID NO: 59318 - DNA, 1953 bp, Pseudomonas putida; identical to SEQ ID NO: 953
  CDS (1)..(1953)

SEQ ID NO: 59319 - protein, 650 aa, Pseudomonas putida; identical to SEQ ID NO: 954

SEQ ID NO: 59320 - DNA, 1890 bp, Pseudomonas putida; identical to SEQ ID NO: 955
  CDS (1)..(1890)

SEQ ID NO: 59321 - protein, 629 aa, Pseudomonas putida; identical to SEQ ID NO: 956

SEQ ID NO: 59322 - DNA, 1686 bp, Pseudomonas putida; identical to SEQ ID NO: 957
  CDS (1)..(1686)

SEQ ID NO: 59323 - protein, 561 aa, Pseudomonas putida; identical to SEQ ID NO: 958

SEQ ID NO: 59324 - DNA, 1689 bp, Bradyrhizobium japonicum; identical to SEQ ID NO: 959
  CDS (1)..(1689)

SEQ ID NO: 59325 - protein, 562 aa, Bradyrhizobium japonicum; identical to SEQ ID NO: 960

SEQ ID NO: 59326 - DNA, 2049 bp, Bradyrhizobium japonicum; identical to SEQ ID NO: 961
  CDS (1)..(2049)

SEQ ID NO: 59327 - protein, 682 aa, Bradyrhizobium japonicum; identical to SEQ ID NO: 962

SEQ ID NO: 59328 - DNA, 1911 bp, Bradyrhizobium japonicum; identical to SEQ ID NO: 963
  CDS (1)..(1911)

SEQ ID NO: 59329 - protein, 636 aa, Bradyrhizobium japonicum; identical to SEQ ID NO: 964

SEQ ID NO: 59330 - DNA, 1656 bp, Bacteroides thetaiotaomicron; identical to SEQ ID NO: 965
  CDS (1)..(1656)

SEQ ID NO: 59331 - protein, 551 aa, Bacteroides thetaiotaomicron; identical to SEQ ID NO: 966

SEQ ID NO: 59332 - DNA, 2495 bp, Mus musculus; identical to SEQ ID NO: 967
  CDS (87)..(1580)

SEQ ID NO: 59333 - protein, 497 aa, Mus musculus; identical to SEQ ID NO: 968

SEQ ID NO: 59334 - DNA, 1881 bp, Vibrio vulnificus; identical to SEQ ID NO: 969
  CDS (1)..(1881)

SEQ ID NO: 59335 - protein, 626 aa, Vibrio vulnificus; identical to SEQ ID NO: 970

SEQ ID NO: 59336 - DNA, 1986 bp, Oceanobacillus iheyensis; identical to SEQ ID NO: 971
  CDS (1)..(1986)

SEQ ID NO: 59337 - protein, 661 aa, Oceanobacillus iheyensis; identical to SEQ ID NO: 972

SEQ ID NO: 59338 - DNA, 1716 bp, Oceanobacillus iheyensis; identical to SEQ ID NO: 973
  CDS (1)..(1716)

SEQ ID NO: 59339 - protein, 571 aa, Oceanobacillus iheyensis; identical to SEQ ID NO: 974

SEQ ID NO: 59340 - DNA, 1887 bp, Escherichia coli O6; identical to SEQ ID NO: 975
  CDS (1)..(1887)

SEQ ID NO: 59341 - protein, 628 aa, Escherichia coli O6; identical to SEQ ID NO: 976

SEQ ID NO: 59342 - DNA, 1671 bp, Brucella suis; identical to SEQ ID NO: 977
  CDS (1)..(1671)

SEQ ID NO: 59343 - protein, 556 aa, Brucella suis; identical to SEQ ID NO: 978

SEQ ID NO: 59344 - DNA, 1989 bp, Brucella suis; identical to SEQ ID NO: 979
  CDS (1)..(1989)

SEQ ID NO: 59345 - protein, 662 aa, Brucella suis; identical to SEQ ID NO: 980

SEQ ID NO: 59346 - DNA, 2924 bp, Homo sapiens; identical to SEQ ID NO: 981
  CDS (34)..(2178)

SEQ ID NO: 59347 - protein, 714 aa, Homo sapiens [sequence omitted]

SEQ ID NO: 59348 - DNA, 1899 bp, Encephalitozoon cuniculi; identical to SEQ ID NO: 983
  CDS (1)..(1899)

SEQ ID NO: 59349 - protein, 632 aa, Encephalitozoon cuniculi; identical to SEQ ID NO: 984

SEQ ID NO: 59350 - DNA, 2004 bp, Neurospora crassa; identical to SEQ ID NO: 985
  CDS (1)..(2004)

SEQ ID NO: 59351 - protein, 667 aa, Neurospora crassa; identical to SEQ ID NO: 986

SEQ ID NO: 59352 - DNA, 1899 bp, Ralstonia solanacearum; identical to SEQ ID NO: 987
  CDS (1)..(1899)

SEQ ID NO: 59353 - protein, 632 aa, Ralstonia solanacearum; identical to SEQ ID NO: 988

SEQ ID NO: 59354 - DNA, 1956 bp, Pyrobaculum aerophilum; identical to SEQ ID NO: 989
  CDS (1)..(1956)

SEQ ID NO: 59355 - protein, 651 aa, Pyrobaculum aerophilum; identical to SEQ ID NO: 990

SEQ ID NO: 59356 - DNA, 1881 bp, Pyrobaculum aerophilum; identical to SEQ ID NO: 991
  CDS (1)..(1881)

SEQ ID NO: 59357 - protein, 626 aa, Pyrobaculum aerophilum; identical to SEQ ID NO: 992

SEQ ID NO: 59358 - DNA, 1848 bp, Pyrobaculum aerophilum; identical to SEQ ID NO: 993
  CDS (1)..(1848)

SEQ ID NO: 59359 - protein, 615 aa, Pyrobaculum aerophilum; identical to SEQ ID NO: 994

SEQ ID NO: 59360 - DNA, 1908 bp, Rhizobium meliloti; identical to SEQ ID NO: 995
  CDS (1)..(1908)

SEQ ID NO: 59361 - protein, 635 aa, Rhizobium meliloti; identical to SEQ ID NO: 996

SEQ ID NO: 59362 - DNA, 1647 bp, Rhizobium meliloti; identical to SEQ ID NO: 997
  CDS (1)..(1647)

SEQ ID NO: 59363 - protein, 548 aa, Rhizobium meliloti; identical to SEQ ID NO: 998

SEQ ID NO: 59364 - DNA, 2028 bp, Zygosaccharomyces bailii; identical to SEQ ID NO: 999
  CDS (1)..(2028)

SEQ ID NO: 59365 - protein, 675 aa, Zygosaccharomyces bailii; identical to SEQ ID NO: 1000

SEQ ID NO: 59366 - DNA, 1635 bp, Sulfolobus tokodaii; identical to SEQ ID NO: 1001
  CDS (1)..(1635)

SEQ ID NO: 59367 - protein, 544 aa, Sulfolobus tokodaii; identical to SEQ ID NO: 1002

SEQ ID NO: 59368 - DNA, 1731 bp, Sulfolobus tokodaii; identical to SEQ ID NO: 1003
  CDS (1)..(1731)

SEQ ID NO: 59369 - protein, 576 aa, Sulfolobus tokodaii; identical to SEQ ID NO: 1004

SEQ ID NO: 59370 - DNA, 1986 bp, Sulfolobus tokodaii; identical to SEQ ID NO: 1005
  CDS (1)..(1986)

SEQ ID NO: 59371 - protein, 661 aa, Sulfolobus tokodaii; identical to SEQ ID NO: 1006

SEQ ID NO: 59372 - DNA, 1866 bp, Sulfolobus tokodaii; identical to SEQ ID NO: 1007
  CDS (1)..(1866)

SEQ ID NO: 59373 - protein, 621 aa, Sulfolobus tokodaii; identical to SEQ ID NO: 1008

SEQ ID NO: 59374 - DNA, 1494 bp, Sulfolobus tokodaii; identical to SEQ ID NO: 1009
  CDS (1)..(1494)

SEQ ID NO: 59375 - protein, 497 aa, Sulfolobus tokodaii; identical to SEQ ID NO: 1010

SEQ ID NO: 59376 - DNA, 1980 bp, Sulfolobus tokodaii; identical to SEQ ID NO: 1011
  CDS (1)..(1980)

SEQ ID NO: 59377 - protein, 659 aa, Sulfolobus tokodaii; identical to SEQ ID NO: 1012

SEQ ID NO: 59378 - DNA, 1989 bp, Sulfolobus tokodaii; identical to SEQ ID NO: 1013
  CDS (1)..(1989)

SEQ ID NO: 59379 - protein, 662 aa, Sulfolobus tokodaii; identical to SEQ ID NO: 1014

SEQ ID NO: 59380 - DNA, 1689 bp, Sulfolobus tokodaii; identical to SEQ ID NO: 1015
  CDS (1)..(1689)

SEQ ID NO: 59381 - protein, 562 aa, Sulfolobus tokodaii; identical to SEQ ID NO: 1016

SEQ ID NO: 59382 - DNA, 1860 bp, Thermoplasma volcanium; identical to SEQ ID NO: 1017
  CDS (1)..(1860)

SEQ ID NO: 59383 - protein, 619 aa, Thermoplasma volcanium; identical to SEQ ID NO: 1018

SEQ ID NO: 59384 - DNA, 1926 bp, Thermoplasma volcanium; identical to SEQ ID NO: 1019
  CDS (1)..(1926)

SEQ ID NO: 59385 - protein, 641 aa, Thermoplasma volcanium; identical to SEQ ID NO: 1020

SEQ ID NO: 59386 - DNA, 1953 bp, Thermoplasma volcanium; identical to SEQ ID NO: 1021
  CDS (1)..(1953)

SEQ ID NO: 59387 - protein, 650 aa, Thermoplasma volcanium; identical to SEQ ID NO: 1022

SEQ ID NO: 59388 - DNA, 1959 bp, Rhizobium loti; identical to SEQ ID NO: 1023
  CDS (1)..(1959)

SEQ ID NO: 59389 - protein, 652 aa, Rhizobium loti; identical to SEQ ID NO: 1024

SEQ ID NO: 59390 - DNA, 1689 bp, Rhizobium loti; identical to SEQ ID NO: 1025
  CDS (1)..(1689)

SEQ ID NO: 59391 - protein, 562 aa, Rhizobium loti; identical to SEQ ID NO: 1026

SEQ ID NO: 59392 - DNA, 1929 bp, Rhizobium loti; identical to SEQ ID NO: 1027
  CDS (1)..(1929)

SEQ ID NO: 59393 - protein, 642 aa, Rhizobium loti; identical to SEQ ID NO: 1028

SEQ ID NO: 59394 - DNA, 1680 bp, Rhizobium loti; identical to SEQ ID NO: 1029
  CDS (1)..(1680)

SEQ ID NO: 59395 - protein, 559 aa, Rhizobium loti; identical to SEQ ID NO: 1030

SEQ ID NO: 59396 - DNA, 1686 bp, Pseudomonas putida; identical to SEQ ID NO: 1031
  CDS (1)..(1686)

SEQ ID NO: 59397 - protein, 561 aa, Pseudomonas putida; identical to SEQ ID NO: 1032

SEQ ID NO: 59398 - DNA, 2582 bp, Bos taurus; identical to SEQ ID NO: 1033
  CDS (1)..(2028)

SEQ ID NO: 59399 - protein, 675 aa, Bos taurus; identical to SEQ ID NO: 1034

SEQ ID NO: 59400 - DNA, 1800 bp, Thermoplasma acidophilum; identical to SEQ ID NO: 1035
  CDS (1)..(1800)

SEQ ID NO: 59401 - protein, 599 aa, Thermoplasma acidophilum; identical to SEQ ID NO: 1036

SEQ ID NO: 59402 - DNA, 1944 bp, Thermoplasma acidophilum; identical to SEQ ID NO: 1037
  CDS (1)..(1944)

SEQ ID NO: 59403 - protein, 647 aa, Thermoplasma acidophilum; identical to SEQ ID NO: 1038

SEQ ID NO: 59404 - DNA, 1860 bp, Thermoplasma acidophilum; identical to SEQ ID NO: 1039
  CDS (1)..(1860)

SEQ ID NO: 59405 - protein, 619 aa, Thermoplasma acidophilum; identical to SEQ ID NO: 1040

SEQ ID NO: 59406 - DNA, 1977 bp, Streptomyces coelicolor; identical to SEQ ID NO: 1041
  CDS (1)..(1977)

SEQ ID NO: 59407 - protein, 658 aa, Streptomyces coelicolor; identical to SEQ ID NO: 1042

SEQ ID NO: 59408 - DNA, 2113 bp, Arabidopsis thaliana; identical to SEQ ID NO: 1043
  CDS (1)..(2082)

SEQ ID NO: 59409 - protein, 693 aa, Arabidopsis thaliana; identical to SEQ ID NO: 1044

SEQ ID NO: 59410 - DNA, 2088 bp, Leishmania major; identical to SEQ ID NO: 1045
  CDS (1)..(2088)

SEQ ID NO: 59411 - protein, 695 aa, Leishmania major; identical to SEQ ID NO: 1046

SEQ ID NO: 59412 - DNA, 1956 bp, Tetrahymena pyriformis; identical to SEQ ID NO: 1047
  CDS (1)..(978)

SEQ ID NO: 59413 - protein, 325 aa, Tetrahymena pyriformis; identical to SEQ ID NO: 1048

SEQ ID NO: 59414 - DNA, 2267 bp, Drosophila melanogaster; identical to SEQ ID NO: 1049
  CDS (113)..(2137)

SEQ ID NO: 59415 - protein, 674 aa, Drosophila melanogaster; identical to SEQ ID NO: 1050

SEQ ID NO: 59416 - DNA, 2383 bp, Solanum tuberosum; identical to SEQ ID NO: 1051
  CDS (271)..(2166)

SEQ ID NO: 59417 - protein, 631 aa, Solanum tuberosum; identical to SEQ ID NO: 1052

SEQ ID NO: 59418 - DNA, 3584 bp, Mus musculus; identical to SEQ ID NO: 1053
  CDS (33)..(2081)

SEQ ID NO: 59419 - protein, 682 aa, Mus musculus; identical to SEQ ID NO: 1054

SEQ ID NO: 59420 - DNA, 2052 bp, Kluyveromyces lactis; identical to SEQ ID NO: 1055
  CDS (1)..(2052)

SEQ ID NO: 59421 - protein, 683 aa, Kluyveromyces lactis [sequence omitted]

SEQ ID NO: 59422 - DNA, 2492 bp, Saccharomyces cerevisiae; identical to SEQ ID NO: 1057
  CDS (162)..(2303)

SEQ ID NO: 59423 - protein, 713 aa, Saccharomyces cerevisiae [sequence omitted]

SEQ ID NO: 59424 - DNA, 3543 bp, Kluyveromyces lactis; identical to SEQ ID NO: 1059
  CDS (817)..(2871)

SEQ ID NO: 59425 - protein, 684 aa, Kluyveromyces lactis; identical to SEQ ID NO: 1060

SEQ ID NO: 59426 - DNA, 1935 bp, Pseudomonas putida; identical to SEQ ID NO: 1061
  CDS (1)..(1935)

SEQ ID NO: 59427 - protein, 644 aa, Pseudomonas putida [sequence omitted]

SEQ ID NO: 59428 - DNA, 1950 bp, Rhizobium meliloti; identical to SEQ ID NO: 1063
  CDS (1)..(1950)

SEQ ID NO: 59429 - protein, 649 aa, Rhizobium meliloti [sequence omitted]

SEQ ID NO: 59430 - DNA, 1959 bp, Agrobacterium rhizogenes; identical to SEQ ID NO: 1065
  CDS (1)..(1959)

SEQ ID NO: 59431 - protein, 652 aa, Agrobacterium rhizogenes; identical to SEQ ID NO: 1066

SEQ ID NO: 59432 - DNA, 1956 bp, Agrobacterium tumefaciens; identical to SEQ ID NO: 1067
  CDS (1)..(1956)

SEQ ID NO: 59433 - protein, 651 aa, Agrobacterium tumefaciens; identical to SEQ ID NO: 1068

SEQ ID NO: 59434 - DNA, 1947 bp, Bradyrhizobium japonicum; identical to SEQ ID NO: 1069
  CDS (1)..(1947)

SEQ ID NO: 59435 - protein, 648 aa, Bradyrhizobium japonicum [sequence omitted]

SEQ ID NO: 59436 - DNA, 1956 bp, Brucella suis; identical to SEQ ID NO: 1071
  CDS (1)..(1956)

SEQ ID NO: 59437 - protein, 651 aa, Brucella suis; identical to SEQ ID NO: 1072

SEQ ID NO: 59438 - DNA, 2028 bp, Candida albicans; identical to SEQ ID NO: 1073
  CDS (1)..(2028)

SEQ ID NO: 59439 - protein, 675 aa, Candida albicans [sequence omitted]

SEQ ID NO: 59440 - DNA, 1980 bp, Chlorobium tepidum; identical to SEQ ID NO: 1075
  CDS (1)..(1980)

SEQ ID NO: 59441 - protein, 659 aa, Chlorobium tepidum [sequence omitted]

SEQ ID NO: 59442 - DNA, 2041 bp, Coprinus cinereus; identical to SEQ ID NO: 1077
  CDS (20)..(2005)

SEQ ID NO: 59443 - protein, 661 aa, Coprinus cinereus [sequence omitted]

SEQ ID NO: 59444 - DNA, 2222 bp, Cryptosporidium parvum; identical to SEQ ID NO: 1079
  CDS (70)..(2154)

SEQ ID NO: 59445 - protein, 694 aa, Cryptosporidium parvum [sequence omitted]

SEQ ID NO: 59446 - DNA, 2874 bp, Drosophila melanogaster; identical to SEQ ID NO: 1081
  CDS (451)..(2463)

SEQ ID NO: 59447 - protein, 670 aa, Drosophila melanogaster [sequence omitted]

SEQ ID NO: 59448 - DNA, 1986 bp, Leptospira interrogans; identical to SEQ ID NO: 1083
  CDS (1)..(1986)

SEQ ID NO: 59449 - protein, 661 aa, Leptospira interrogans [sequence omitted]

SEQ ID NO: 59450 - DNA, 2535 bp, Mus musculus; identical to SEQ ID NO: 1085
  CDS (15)..(2120)

SEQ ID NO: 59451 - protein, 701 aa, Mus musculus; identical to SEQ ID NO: 1086

SEQ ID NO: 59452 - DNA, 1956 bp, Mycobacterium bovis; identical to SEQ ID NO: 1087
  CDS (1)..(1956)

SEQ ID NO: 59453 - protein, 651 aa, Mycobacterium bovis [sequence omitted]

SEQ ID NO: 59454 - DNA, 1968 bp, Nitrosomonas europaea; identical to SEQ ID NO: 1089
  CDS (1)..(1968)

SEQ ID NO: 59455 - protein, 655 aa, Nitrosomonas europaea [sequence omitted]

SEQ ID NO: 59456 - DNA, 1962 bp, Pasteurella multocida; identical to SEQ ID NO: 1091
  CDS (1)..(1962)

SEQ ID NO: 59457 - protein, 653 aa, Pasteurella multocida [sequence omitted]

SEQ ID NO: 59458 - DNA, 1926 bp, Gamma; identical to SEQ ID NO: 1093
  CDS (1)..(1926)

SEQ ID NO: 59459 - protein, 641 aa, Gamma [sequence omitted]

SEQ ID NO: 59460 - DNA, 1983 bp, Ralstonia solanacearum; identical to SEQ ID NO: 1095
  CDS (1)..(1983)

SEQ ID NO: 59461 - protein, 660 aa, Ralstonia solanacearum; identical to SEQ ID NO: 1096

SEQ ID NO: 59462 - DNA, 1956 bp, Rhizobium loti; identical to SEQ ID NO: 1097
  CDS (1)..(1956)

SEQ ID NO: 59463 - protein, 651 aa, Rhizobium loti; identical to SEQ ID NO: 1098

SEQ ID NO: 59464 - DNA, 2016 bp, Rhodopirellula baltica; identical to SEQ ID NO: 1099
  CDS (1)..(2016)

SEQ ID NO: 59465 - protein, 671 aa, Rhodopirellula baltica [sequence omitted]

SEQ ID NO: 59466 - DNA, 1959 bp, Salmonella typhimurium; identical to SEQ ID NO: 1101
  CDS (1)..(1959)

SEQ ID NO: 59467 - protein, 652 aa, Salmonella typhimurium; identical to SEQ ID NO: 1102

SEQ ID NO: 59468 - DNA, 1953 bp, Shewanella oneidensis; identical to SEQ ID NO: 1103
  CDS (1)..(1953)

SEQ ID NO: 59469 - protein, 650 aa, Shewanella oneidensis [sequence omitted]

SEQ ID NO: 59470 - DNA, 1959 bp, Streptomyces avermitilis; identical to SEQ ID NO: 1105
  CDS (1)..(1959)

SEQ ID NO: 59471 - protein, 652 aa, Streptomyces avermitilis [sequence omitted]

SEQ ID NO: 59472 - DNA, 1971 bp, Synechococcus elongatus; identical to SEQ ID NO: 1107
  CDS (1)..(1971)

SEQ ID NO: 59473 - protein, 656 aa, Synechococcus elongatus [sequence omitted]

SEQ ID NO: 59474 - DNA, 1950 bp, Vibrio cholerae; identical to SEQ ID NO: 1109
  CDS (1)..(1950)

SEQ ID NO: 59475 - protein, 649 aa, Vibrio cholerae [sequence omitted]

SEQ ID NO: 59476 - DNA, 1953 bp, Vibrio parahaemolyticus; identical to SEQ ID NO: 1111
  CDS (1)..(1953)

SEQ ID NO: 59477 - protein, 650 aa, Vibrio parahaemolyticus; identical to SEQ ID NO: 1112

SEQ ID NO: 59478 - DNA, 1944 bp, Xanthomonas axonopodis; identical to SEQ ID NO: 1113
  CDS (1)..(1944)

SEQ ID NO: 59479 - protein, 647 aa, Xanthomonas axonopodis [sequence omitted]

SEQ ID NO: 59480 - DNA, 1944 bp, Xanthomonas campestris; identical to SEQ ID NO: 1115
  CDS (1)..(1944)

SEQ ID NO: 59481 - protein, 647 aa, Xanthomonas campestris; identical to SEQ ID NO: 1116

SEQ ID NO: 59482 - DNA, 1944 bp, Xylella fastidiosa; identical to SEQ ID NO: 1117
  CDS (1)..(1944)

SEQ ID NO: 59483 - protein, 647 aa, Xylella fastidiosa; identical to SEQ ID NO: 1118

SEQ ID NO: 59484 - DNA, 26 bp, Artificial sequence
  Primer sequence
atgacaatcaaggaacataaagtagt

SEQ ID NO: 59485 - DNA, 28 bp, Artificial sequence
  Primer sequence
ttatttctttttttgagagaaaaattgg

SEQ ID NO: 59486 - protein, 695 aa, Artificial sequence
  Consensus
  Variant (2)..(7): Xaa in position 2 to 7 is any amino acid
  Variant (9)..(29): Xaa in position 9 to 29 is any amino acid
  Variant (31)..(54): Xaa in position 31 to 54 is any amino acid
  Variant (56)..(65): Xaa in position 56 to 65 is any amino acid
  Variant (67)..(74): Xaa in position 67 to 74 is any amino acid
  Variant (76)..(78): Xaa in position 76 to 78 is any amino acid
  Variant (81)..(81): Xaa in position 81 is any amino acid
  Variant (83)..(86): Xaa in position 83 to 86 is any amino acid
  Variant (88)..(96): Xaa in position 88 to 96 is any amino acid
  Variant (99)..(102): Xaa in position 99 to 102 is any amino acid
  Variant (105)..(109): Xaa in position 105 to 109 is any amino acid
  Variant (111)..(112): Xaa in position 111 to 112 is any amino acid
  Variant (114)..(120): Xaa in position 114 to 120 is any amino acid
  Variant (122)..(255): Xaa in position 122 to 255 is any amino acid
  Variant (260)..(260): Xaa in position 260 is any amino acid
  Variant (263)..(263): Xaa in position 263 is any amino acid
  Variant (267)..(306): Xaa in position 267 to 306 is any amino acid
  Variant (308)..(308): Xaa in position 308 is any amino acid
  Variant (311)..(321): Xaa in position 311 to 321 is any amino acid
  Variant (323)..(324): Xaa in position 323 to 324 is any amino acid
  Variant (326)..(332): Xaa in position 326 to 332 is any amino acid
  Variant (334)..(362): Xaa in position 334 to 362 is any amino acid
  Variant (365)..(366): Xaa in position 365 to 366 is any amino acid
  Variant (368)..(390): Xaa in position 368 to 390 is any amino acid
  Variant (392)..(397): Xaa in position 392 to 397 is any amino acid
  Variant (400)..(407): Xaa in position 400 to 407 is any amino acid
  Variant (409)..(431): Xaa in position 409 to 431 is any amino acid
  Variant (434)..(468): Xaa in position 434 to 468 is any amino acid
  Variant (470)..(478): Xaa in position 470 to 478 is any amino acid
  Variant (480)..(506): Xaa in position 480 to 506 is any amino acid
  Variant (508)..(517): Xaa in position 508 to 517 is any amino acid
  Variant (519)..(558): Xaa in position 519 to 558 is any amino acid
  Variant (561)..(564): Xaa in position 561 to 564 is any amino acid
  Variant (566)..(568): Xaa in position 566 to 568 is any amino acid
  Variant (570)..(574): Xaa in position 570 to 574 is any amino acid
  Variant (577)..(577): Xaa in position 577 is any amino acid
  Variant (580)..(584): Xaa in position 580 to 584 is any amino acid
  Variant (586)..(586): Xaa in position 586 is any amino acid
  Variant (588)..(591): Xaa in position 588 to 591 is any amino acid
  Variant (593)..(593): Xaa in position 593 is any amino acid
  Variant (595)..(604): Xaa in position 595 to 604 is any amino acid
  Variant (606)..(606): Xaa in position 606 is any amino acid
  Variant (608)..(609): Xaa in position 608 to 609 is any amino acid
  Variant (611)..(616): Xaa in position 611 to 616 is any amino acid
  Variant (618)..(625): Xaa in position 618 to 625 is any amino acid
  Variant (627)..(684): Xaa in position 627 to 684 is any amino acid
  Variant (689)..(689): Xaa in position 689 is any amino acid
  Variant (694)..(694): Xaa in position 694 is any amino acid
WXXXXXXNXXXXXXXXXXXXXXXXXXXXXAXXXXXXXXXXXXXXXXXXXXXXXXLXXXXXXXXXXLXXXXXXXXGXXXGDXVXXXXPXXXXXXXXXLAXXXXGAXXXXXFXXFXXXXXXXRXXXXXXXXXXXXXXXXXXXXXXXXXXXXXXXXXXXXXXXXXXXXXXXXXXXXXXXXXXXXXXXXXXXXXXXXXXXXXXXXXXXXXXXXXXXXXXXXXXXXXXXXXXXXXXXXXXXXXXXXXXXXXXXXXXXXXXYTSGXTGXPKGXXXXXXXXXXXXXXXXXXXXXXXXXXXXXXXXXXXXXXXXDXGWXXXXXXXXXXXLXXGXXXXXXXGXXXXXXXXXXXXXXXXXXXXXXXXXXXXXPTXXRXXXXXXXXXXXXXXXXXXXXXXXLXXXXXXGEXXXXXXXXWXXXXXXXXXXXXXXXXXXXXXXXTEXXXXXXXXXXXXXXXXXXXXXXXXXXXXXXXXXXXGXXXXXXXXXGXXXXXXXXXXXXXXXXXXXXXXXXXXXGXXXXXXXXXXPXXXXXXXXXXXXXXXXXXXXXXXXXXXXXXXXXXXXXXXXGDXXXXDXXXGXXXXXGRXDDXXXXXGXRXXXXEXEXXXXXXXXXXEXAXXGXXXXXXGXXXXXXXXLXXXXXXXXXXXXXXXXXXXXXXXXXXXXXXXXXXXXXXXXXXXXXXXXXXXXXXXXXXLPKTXSGKIXR

SEQ ID NO: 59487 - protein, 43 aa, Artificial sequence; identical to SEQ ID NO: 1308
  Consensus
  Variant (1)..(1): Xaa in position 1 is Gly, Asn or Asp
  Variant (2)..(2): Xaa in position 2 is Asp, Glu or Gln
  Variant (3)..(3): Xaa in position 3 is any amino acid
  Variant (4)..(4): Xaa in position 4 is Val or Ile
  Variant (5)..(7): Xaa in position 5 to 7 is any amino acid
  Variant (8)..(8): Xaa in position 8 is Met, Leu, Ile or Ala
  Variant (9)..(18): Xaa in position 9 to 18 is any amino acid
  Variant (19)..(19): Xaa in position 19 is Leu, Met, Gln, Phe or Tyr
  Variant (20)..(20): Xaa in position 20 is Ala, Gly or Ser
  Variant (21)..(23): Xaa in position 21 to 23 is any amino acid
  Variant (24)..(24): Xaa in position 24 is Ile, Leu, Val or Ala
  Variant (26)..(26): Xaa in position 26 is Ala, Gly, Val or no amino acid
  Variant (27)..(34): Xaa in position 27 to 34 is any amino acid
  Variant (35)..(35): Xaa in position 35 is Phe, Tyr or Leu
  Variant (36)..(39): Xaa in position 36 to 39 is any amino acid
  Variant (40)..(40): Xaa in position 40 is Leu, Ile or Val
  Variant (41)..(42): Xaa in position 41 to 42 is any amino acid
  Variant (43)..(43): Xaa in position 43 is Arg or Gln

SEQ ID NO: 59488 - protein, 14 aa, Artificial sequence
  Consensus
  Variant (1)..(1): Xaa in position 1 is Ile, Leu, Met or Val
  Variant (2)..(2): Xaa in position 2 is any amino acid
  Variant (3)..(3): Xaa in position 3 is Tyr, Phe or Ser
  Variant (4)..(4): Xaa in position 4 is Thr or Ser
  Variant (7)..(7): Xaa in position 7 is Thr or Ser
  Variant (10)..(10): Xaa in position 10 is any amino acid
  Variant (11)..(11): Xaa in position 11 is Pro, Ala or Ser
  Variant (13)..(13): Xaa in position 13 is any amino acid
  Variant (14)..(14): Xaa in position 14 is Val, Ile, Leu, Ala or Thr
XXXXSGXTGXXKXX

SEQ ID NO: 59489 - protein, 55 aa, Artificial sequence; identical to SEQ ID NO: 1310
  Consensus
  Variant (1)..(1): Xaa in position 1 is Tyr, Trp, Phe, Leu or His
  Variant (2)..(3): Xaa in position 2 to 3 is any amino acid
  Variant (4)..(4): Xaa in position 4 is Gly, Ala or Phe
  Variant (6)..(12): Xaa in position 6 to 12 is any amino acid
  Variant (13)..(13): Xaa in position 13 is any or no amino acid
  Variant (14)..(14): Xaa in position 14 is Gly, Asp or no amino acid
  Variant (15)..(19): Xaa in position 15 to 19 is any amino acid
  Variant (20)..(20): Xaa in position 20 is Gly, Ser, Ala or Asp
  Variant (22)..(22): Xaa in position 22 is any amino acid
  Variant (23)..(23): Xaa in position 23 is Asp or Lys
  Variant (24)..(24): Xaa in position 24 is Asp, Glu, Ser, Ala or Thr
  Variant (25)..(25): Xaa in position 25 is any amino acid
  Variant (26)..(26): Xaa in position 26 is Ile, Leu, Met or Val
  Variant (27)..(29): Xaa in position 27 to 29 is any amino acid
  Variant (31)..(31): Xaa in position 31 is any amino acid
  Variant (32)..(32): Xaa in position 32 is Arg, Lys, Gln or Leu
  Variant (33)..(33): Xaa in position 33 is Leu, Ile, Val or Met
  Variant (34)..(36): Xaa in position 34 to 36 is any amino acid
  Variant (37)..(37): Xaa in position 37 is Glu, Asp, Thr or Ala
  Variant (38)..(38): Xaa in position 38 is Ile, Val, Met or Leu
  Variant (39)..(39): Xaa in position 39 is Glu, Tyr or Asp
  Variant (40)..(41): Xaa in position 40 to 41 is any amino acid
  Variant (42)..(42): Xaa in position 42 is Leu, Ile, Val or Met
  Variant (43)..(47): Xaa in position 43 to 47 is any amino acid
  Variant (48)..(48): Xaa in position 48 is Val or Ile
  Variant (49)..(49): Xaa in position 49 is any amino acid
  Variant (50)..(50): Xaa in position 50 is Glu or Asp
  Variant (51)..(51): Xaa in position 51 is Ala, Cys, Ser, Val or Thr
  Variant (52)..(53): Xaa in position 52 to 53 is any amino acid
  Variant (54)..(54): Xaa in position 54 is Val, Ile, Leu, Thr or Phe
  Variant (55)..(55): Xaa in position 55 is Gly, Ala, Ser or Pro

SEQ ID NO: 59490 - protein, 14 aa, Artificial sequence
  Consensus
  Variant (1)..(1): Xaa in position 1 is Leu, Ile or Met
  Variant (3)..(3): Xaa in position 3 is Lys, Arg, Met or His
  Variant (4)..(4): Xaa in position 4 is Thr or Ser
  Variant (5)..(5): Xaa in position 5 is any amino acid
  Variant (6)..(6): Xaa in position 6 is Ser, Thr, Asn or Val
  Variant (7)..(7): Xaa in position 7 is Gly, Ala or Ser
  Variant (9)..(9): Xaa in position 9 is Ile, Val, Leu, Met, Lys or Arg
  Variant (10)..(10): Xaa in position 10 is any amino acid
  Variant (11)..(11): Xaa in position 11 is Arg or Glu
  Variant (12)..(13): Xaa in position 12 to 13 is any amino acid
  Variant (14)..(14): Xaa in position 14 is Leu, Ile, Val or Met
XPXXXXXKXXXXXX

SEQ ID NO: 59491 - DNA, 1239 bp, Saccharomyces cerevisiae; identical to SEQ ID NO: 5653
  CDS (1)..(1239)

SEQ ID NO: 59492 - protein, 412 aa, Saccharomyces cerevisiae; identical to SEQ ID NO: 5654

SEQ ID NO: 59493 - DNA, 1719 bp, Rattus norvegicus (Norway rat); identical to SEQ ID NO: 5655
  CDS (30)..(1274)

SEQ ID NO: 59494 - protein, 414 aa, Rattus norvegicus (Norway rat); identical to SEQ ID NO: 5656

SEQ ID NO: 59495 - DNA, 1212 bp, Caulobacter crescentus; identical to SEQ ID NO: 5657
  CDS (1)..(1212)

SEQ ID NO: 59496 - protein, 403 aa, Caulobacter crescentus; identical to SEQ ID NO: 5658

SEQ ID NO: 59497 - DNA, 1551 bp, Arabidopsis thaliana (mouse-ear cress); identical to SEQ ID NO: 5659
  CDS (21)..(1271)

SEQ ID NO: 59498 - protein, 416 aa, Arabidopsis thaliana (mouse-ear cress); identical to SEQ ID NO: 5660

SEQ ID NO: 59499 - DNA, 1368 bp, Agrobacterium tumefaciens; identical to SEQ ID NO: 5661
  CDS (1)..(1368)

SEQ ID NO: 59500 - protein, 455 aa, Agrobacterium tumefaciens; identical to SEQ ID NO: 5662

SEQ ID NO: 59501 - DNA, 1230 bp, Mycobacterium tuberculosis; identical to SEQ ID NO: 5663
  CDS (1)..(1230)

SEQ ID NO: 59502 - protein, 409 aa, Mycobacterium tuberculosis; identical to SEQ ID NO: 5664

SEQ ID NO: 59503 - DNA, 1608 bp, Saccharomyces cerevisiae; identical to SEQ ID NO: 5665
  CDS (111)..(1397)

SEQ ID NO: 59504 - protein, 428 aa, Saccharomyces cerevisiae; identical to SEQ ID NO: 5666

SEQ ID NO: 59505 - DNA, 1242 bp, Sulfolobus solfataricus; identical to SEQ ID NO: 5667
  CDS (1)..(1242)

SEQ ID NO: 59506 - protein, 413 aa, Sulfolobus solfataricus; identical to SEQ ID NO: 5668

SEQ ID NO: 59507 - DNA, 1200 bp, Thermotoga maritima; identical to SEQ ID NO: 5669
  CDS (1)..(1200)

SEQ ID NO: 59508 - protein, 399 aa, Thermotoga maritima; identical to SEQ ID NO: 5670

SEQ ID NO: 59509 - DNA, 1221 bp, Sphingomonas yanoikuyae; identical to SEQ ID NO: 5671
  CDS (1)..(1221)

SEQ ID NO: 59510 - protein, 406 aa, Sphingomonas yanoikuyae; identical to SEQ ID NO: 5672

SEQ ID NO: 59511 - DNA, 1740 bp, Bos primigenius taurus (cattle); identical to SEQ ID NO: 5673
  CDS (67)..(1425)

SEQ ID NO: 59512 - protein, 452 aa, Bos primigenius taurus (cattle); identical to SEQ ID NO: 5674

SEQ ID NO: 59513 - DNA, 1569 bp, Solanum tuberosum (potato); identical to SEQ ID NO: 5675
  CDS (69)..(1319)

SEQ ID NO: 59514 - protein, 416 aa, Solanum tuberosum (potato); identical to SEQ ID NO: 5676

SEQ ID NO: 59515 - DNA, 1850 bp, Saccharomyces cerevisiae; identical to SEQ ID NO: 5677
  CDS (461)..(1723)

SEQ ID NO: 59516 - protein, 420 aa, Saccharomyces cerevisiae; identical to SEQ ID NO: 5678

SEQ ID NO: 59517 - DNA, 1584 bp, Nicotiana tabacum (common tobacco); identical to SEQ ID NO: 5679
  CDS (85)..(1332)

SEQ ID NO: 59518 - protein, 415 aa, Nicotiana tabacum (common tobacco); identical to SEQ ID NO: 5680

SEQ ID NO: 59519 - DNA, 1722 bp, Nicotiana tabacum (common tobacco); identical to SEQ ID NO: 5681
  CDS (76)..(1524)

SEQ ID NO: 59520 - protein, 482 aa, Nicotiana tabacum (common tobacco); identical to SEQ ID NO: 5682

SEQ ID NO: 59521 - DNA, 1308 bp, Caenorhabditis elegans; identical to SEQ ID NO: 5683
  CDS (1)..(1308)

SEQ ID NO: 59522 - protein, 435 aa, Caenorhabditis elegans; identical to SEQ ID NO: 5684

SEQ ID NO: 59523 - DNA, 1239 bp, Caenorhabditis elegans; identical to SEQ ID NO: 5685
  CDS (1)..(1239)

SEQ ID NO: 59524 - protein, 412 aa, Caenorhabditis elegans; identical to SEQ ID NO: 5686

SEQ ID NO: 59525 - DNA, 1257 bp, Schizosaccharomyces pombe; identical to SEQ ID NO: 5687
  CDS (1)..(1257)

SEQ ID NO: 59526 - protein, 418 aa, Schizosaccharomyces pombe; identical to SEQ ID NO: 5688

SEQ ID NO: 59527 - DNA, 1827 bp, Glycine max; identical to SEQ ID NO: 5689
  CDS (289)..(1539)

SEQ ID NO: 59528 - protein, 416 aa, Glycine max; identical to SEQ ID NO: 5690

SEQ ID NO: 59529 - DNA, 1645 bp, Eucalyptus globulus; identical to SEQ ID NO: 5691
  CDS (161)..(1411)

SEQ ID NO: 59530 - protein, 416 aa, Eucalyptus globulus; identical to SEQ ID NO: 5692

SEQ ID NO: 59531 - DNA, 1596 bp, Homo sapiens; identical to SEQ ID NO: 5693
  CDS (44)..(1303)

SEQ ID NO: 59532 - protein, 419 aa, Homo sapiens [sequence omitted]

SEQ ID NO: 59533 - DNA, 1233 bp, Debaryomyces hansenii; identical to SEQ ID NO: 5695
  CDS (1)..(1233)

SEQ ID NO: 59534 - protein, 410 aa, Debaryomyces hansenii; identical to SEQ ID NO: 5696

SEQ ID NO: 59535 - DNA, 1296 bp, Debaryomyces hansenii; identical to SEQ ID NO: 5697
  CDS (1)..(1296)

SEQ ID NO: 59536 - protein, 431 aa, Debaryomyces hansenii; identical to SEQ ID NO: 5698

SEQ ID NO: 59537 - DNA, 1326 bp, Yarrowia lipolytica; identical to SEQ ID NO: 5699
  CDS (1)..(1326)

SEQ ID NO: 59538 - protein, 441 aa, Yarrowia lipolytica; identical to SEQ ID NO: 5700

SEQ ID NO: 59539 - DNA, 1248 bp, Kluyveromyces lactis; identical to SEQ ID NO: 5701
  CDS (1)..(1248)

SEQ ID NO: 59540 - protein, 415 aa, Kluyveromyces lactis; identical to SEQ ID NO: 5702

SEQ ID NO: 59541 - DNA, 1290 bp, Kluyveromyces lactis; identical to SEQ ID NO: 5703
  CDS (1)..(1290)

SEQ ID NO: 59542 - protein, 429 aa, Kluyveromyces lactis; identical to SEQ ID NO: 5704

SEQ ID NO: 59543 - DNA, 1257 bp, Candida glabrata; identical to SEQ ID NO: 5705
  CDS (1)..(1257)

SEQ ID NO: 59544 - protein, 418 aa, Candida glabrata; identical to SEQ ID NO: 5706

SEQ ID NO: 59545 - DNA, 1272 bp, Candida glabrata; identical to SEQ ID NO: 5707
  CDS (1)..(1272)

SEQ ID NO: 59546 - protein, 423 aa, Candida glabrata; identical to SEQ ID NO: 5708

SEQ ID NO: 59547 - DNA, 1236 bp, Candida glabrata; identical to SEQ ID NO: 5709
  CDS (1)..(1236)

SEQ ID NO: 59548 - protein, 411 aa, Candida glabrata; identical to SEQ ID NO: 5710

SEQ ID NO: 59549 - DNA, 1215 bp, Bartonella quintana; identical to SEQ ID NO: 5711
  CDS (1)..(1215)

SEQ ID NO: 59550 - protein, 404 aa, Bartonella quintana; identical to SEQ ID NO: 5712

SEQ ID NO: 59551 - DNA, 1215 bp, Bartonella henselae; identical to SEQ ID NO: 5713
  CDS (1)..(1215)

SEQ ID NO: 59552 - protein, 404 aa, Bartonella henselae; identical to SEQ ID NO: 5714

SEQ ID NO: 59553 - DNA, 1212 bp, Rhizobium leguminosarum; identical to SEQ ID NO: 5715
  CDS (1)..(1212)

SEQ ID NO: 59554 - protein, 403 aa, Rhizobium leguminosarum; identical to SEQ ID NO: 5716

SEQ ID NO: 59555 - DNA, 1230 bp, Bdellovibrio bacteriovorus; identical to SEQ ID NO: 5717
  CDS (1)..(1230)

SEQ ID NO: 59556 - protein, 409 aa, Bdellovibrio bacteriovorus; identical to SEQ ID NO: 5718

SEQ ID NO: 59557 - DNA, 1227 bp, Rhodopseudomonas palustris; identical to SEQ ID NO: 5719
  CDS (1)..(1227)

SEQ ID NO: 59558 - protein, 408 aa, Rhodopseudomonas palustris; identical to SEQ ID NO: 5720

SEQ ID NO: 59559 - DNA, 1564 bp, Pisum sativum; identical to SEQ ID NO: 5721
  CDS (79)..(1317)

SEQ ID NO: 59560 - protein, 412 aa, Pisum sativum; identical to SEQ ID NO: 5722

SEQ ID NO: 59561 - DNA, 2254 bp, Ovis aries; identical to SEQ ID NO: 5723
  CDS (167)..(1411)

SEQ ID NO: 59562 - protein, 414 aa, Ovis aries; identical to SEQ ID NO: 5724

SEQ ID NO: 59563 - DNA, 1197 bp, Leptospira interrogans; identical to SEQ ID NO: 5725
  CDS (1)..(1197)

SEQ ID NO: 59564 - protein, 398 aa, Leptospira interrogans; identical to SEQ ID NO: 5726

SEQ ID NO: 59565 - DNA, 1239 bp, Mycobacterium paratuberculosis; identical to SEQ ID NO: 5727
  CDS (1)..(1239)

SEQ ID NO: 59566 - protein, 412 aa, Mycobacterium paratuberculosis; identical to SEQ ID NO: 5728

SEQ ID NO: 59567 - DNA, 1278 bp, Ashbya gossypii; identical to SEQ ID NO: 5729
  CDS (1)..(1278)

SEQ ID NO: 59568 - protein, 425 aa, Ashbya gossypii; identical to SEQ ID NO: 5730

SEQ ID NO: 59569 - DNA, 1248 bp, Ashbya gossypii; identical to SEQ ID NO: 5731
  CDS (1)..(1248)

SEQ ID NO: 59570 - protein, 415 aa, Ashbya gossypii; identical to SEQ ID NO: 5732

SEQ ID NO: 59571 - DNA, 1287 bp, Dictyostelium discoideum; identical to SEQ ID NO: 5733
  CDS (1)..(1287)

SEQ ID NO: 59572 - protein, 428 aa, Dictyostelium discoideum; identical to SEQ ID NO: 5734

SEQ ID NO: 59573 - DNA, 1594 bp, Oryza sativa; identical to SEQ ID NO: 5735
  CDS (66)..(1304)

SEQ ID NO: 59574 - protein, 412 aa, Oryza sativa; identical to SEQ ID NO: 5736

SEQ ID NO: 59575 - DNA, 1230 bp, Gloeobacter violaceus; identical to SEQ ID NO: 5737
  CDS (1)..(1230)

SEQ ID NO: 59576 - protein, 409 aa, Gloeobacter violaceus; identical to SEQ ID NO: 5738

SEQ ID NO: 59577 - DNA, 1410 bp, Plasmodium yoelii yoelii; identical to SEQ ID NO: 5739
  CDS (1)..(1410)

SEQ ID NO: 59578 - protein, 469 aa, Plasmodium yoelii yoelii; identical to SEQ ID NO: 5740

SEQ ID NO: 59579 - DNA, 1389 bp, Neurospora crassa; identical to SEQ ID NO: 5741
  CDS (1)..(1389)

SEQ ID NO: 59580 - protein, 462 aa, Neurospora crassa; identical to SEQ ID NO: 5742

SEQ ID NO: 59581 - DNA, 1765 bp, Oryza sativa; identical to SEQ ID NO: 5743
  CDS (83)..(1489)

SEQ ID NO: 59582 - protein, 468 aa, Oryza sativa; identical to SEQ ID NO: 5744

SEQ ID NO: 59583 - DNA, 1794 bp, Lupinus albus; identical to SEQ ID NO: 5745
  CDS (58)..(1515)

SEQ ID NO: 59584 - protein, 485 aa, Lupinus albus; identical to SEQ ID NO: 5746

SEQ ID NO: 59585 - DNA, 1583 bp, Lupinus albus; identical to SEQ ID NO: 5747
  CDS (43)..(1281)

SEQ ID NO: 59586 - protein, 412 aa, Lupinus albus; identical to SEQ ID NO: 5748

SEQ ID NO: 59587 - DNA, 1627 bp, Lupinus albus; identical to SEQ ID NO: 5749
  CDS (79)..(1317)

SEQ ID NO: 59588 - protein, 412 aa, Lupinus albus; identical to SEQ ID NO: 5750

SEQ ID NO: 59589 - DNA, 2305 bp, Homo sapiens; identical to SEQ ID NO: 5751
  CDS (196)..(1440)

SEQ ID NO: 59590 - protein, 414 aa, Homo sapiens [sequence omitted]

SEQ ID NO: 59591 - DNA, 1215 bp, Bradyrhizobium japonicum; identical to SEQ ID NO: 5753
  CDS (1)..(1215)

SEQ ID NO: 59592 - protein, 404 aa, Bradyrhizobium japonicum; identical to SEQ ID NO: 5754

SEQ ID NO: 59593 - DNA, 1215 bp, Brucella suis; identical to SEQ ID NO: 5755
  CDS (1)..(1215)

SEQ ID NO: 59594 - protein, 404 aa, Brucella suis; identical to SEQ ID NO: 5756

SEQ ID NO: 59595 - DNA, 1221 bp, Bifidobacterium longum; identical to SEQ ID NO: 5757
  CDS (1)..(1221)

SEQ ID NO: 59596 - protein, 406 aa, Bifidobacterium longum; identical to SEQ ID NO: 5758

SEQ ID NO: 59597 - DNA, 1407 bp, Plasmodium falciparum; identical to SEQ ID NO: 5759
  CDS (1)..(1407)

SEQ ID NO: 59598 - protein, 468 aa, Plasmodium falciparum; identical to SEQ ID NO: 5760

SEQ ID NO: 59599 - DNA, 1514 bp, Arabidopsis thaliana; identical to SEQ ID NO: 5761
  CDS (1)..(1458)

SEQ ID NO: 59600 - protein, 485 aa, Arabidopsis thaliana; identical to SEQ ID NO: 5762

SEQ ID NO: 59601 - DNA, 1212 bp, Thermoanaerobacter tengcongensis; identical to SEQ ID NO: 5763
  CDS (1)..(1212)

SEQ ID NO: 59602 - protein, 403 aa, Thermoanaerobacter tengcongensis; identical to SEQ ID NO: 5764

SEQ ID NO: 59603 - DNA, 1551 bp, Cucumis sativus; identical to SEQ ID NO: 5765
  CDS (62)..(1294)

SEQ ID NO: 59604 - protein, 410 aa, Cucumis sativus; identical to SEQ ID NO: 5766

SEQ ID NO: 59605 - DNA, 1610 bp, Arabidopsis thaliana; identical to SEQ ID NO: 5767
  CDS (165)..(1397)

SEQ ID NO: 59606 - protein, 410 aa, Arabidopsis thaliana; identical to SEQ ID NO: 5768

SEQ ID NO: 59607 - DNA, 1215 bp, Rhizobium meliloti; identical to SEQ ID NO: 5769
  CDS (1)..(1215)

SEQ ID NO: 59608 - protein, 404 aa, Rhizobium meliloti; identical to SEQ ID NO: 5770

SEQ ID NO: 59609 - DNA, 1561 bp, Prunus persica; identical to SEQ ID NO: 5771
  CDS (1)..(1245)

SEQ ID NO: 59610 - protein, 414 aa, Prunus persica; identical to SEQ ID NO: 5772

SEQ ID NO: 59611 - DNA, 1242 bp, Emericella nidulans; identical to SEQ ID NO: 5773
  CDS (1)..(1242)

SEQ ID NO: 59612 - protein, 413 aa, Emericella nidulans; identical to SEQ ID NO: 5774

SEQ ID NO: 59613 - DNA, 1212 bp, Rhizobium loti; identical to SEQ ID NO: 5775
  CDS (1)..(1212)

SEQ ID NO: 59614 - protein, 403 aa, Rhizobium loti; identical to SEQ ID NO: 5776

SEQ ID NO: 59615 - DNA, 1679 bp, Mus musculus; identical to SEQ ID NO: 5777
  CDS (46)..(1404)

SEQ ID NO: 59616 - protein, 452 aa, Mus musculus; identical to SEQ ID NO: 5778

SEQ ID NO: 59617 - DNA, 1227 bp, Oryza sativa; identical to SEQ ID NO: 5779
  CDS (1)..(1227)

SEQ ID NO: 59618 - protein, 408 aa, Oryza sativa; identical to SEQ ID NO: 5780

SEQ ID NO: 59619 - DNA, 1554 bp, Solanum tuberosum; identical to SEQ ID NO: 5781
  CDS (61)..(1473)

SEQ ID NO: 59620 - protein, 470 aa, Solanum tuberosum; identical to SEQ ID NO: 5782

SEQ ID NO: 59621 - DNA, 1708 bp, Citrus limon; identical to SEQ ID NO: 5783
  misc_feature (1533)..(1533): n is a, c, g, or t
  CDS (155)..(1399)

SEQ ID NO: 59622 - protein, 414 aa, Citrus limon; identical to SEQ ID NO: 5784

SEQ ID NO: 59623 - DNA, 1782 bp, Drosophila melanogaster; identical to SEQ ID NO: 5785
  CDS (430)..(1782)

SEQ ID NO: 59624 - protein, 450 aa, Drosophila melanogaster; identical to SEQ ID NO: 5786

SEQ ID NO: 59625 - DNA, 1503 bp, Oryza sativa; identical to SEQ ID NO: 5787
  CDS (84)..(1322)

SEQ ID NO: 59626 - protein, 412 aa, Oryza sativa; identical to SEQ ID NO: 5788

SEQ ID NO: 59627 - DNA, 1859 bp, Oryza sativa; identical to SEQ ID NO: 5789
  CDS (201)..(1445)

SEQ ID NO: 59628 - protein, 414 aa, Oryza sativa; identical to SEQ ID NO: 5790

SEQ ID NO: 59629 - DNA, 1488 bp, Daucus carota; identical to SEQ ID NO: 5791
  CDS (91)..(1341)

SEQ ID NO: 59630 - protein, 416 aa, Daucus carota; identical to SEQ ID NO: 5792

SEQ ID NO: 59631 - DNA, 1512 bp, Daucus carota; identical to SEQ ID NO: 5793
  CDS (93)..(1331)

SEQ ID NO: 59632 - protein, 412 aa, Daucus carota; identical to SEQ ID NO: 5794

SEQ ID NO: 59633 - DNA, 1600 bp, Candida tropicalis; identical to SEQ ID NO: 5795
  CDS (201)..(1493)

SEQ ID NO: 59634 - protein, 430 aa, Candida tropicalis; identical to SEQ ID NO: 5796

SEQ ID NO: 59635 - DNA, 1560 bp, Glycine max; identical to SEQ ID NO: 5797
  CDS (87)..(1328)

SEQ ID NO: 59636 - protein, 413 aa, Glycine max; identical to SEQ ID NO: 5798

SEQ ID NO: 59637 - DNA, 1985 bp, Aspergillus niger; identical to SEQ ID NO: 5799
  CDS (288)..(1784)

SEQ ID NO: 59638 - protein, 498 aa, Aspergillus niger; identical to SEQ ID NO: 5800

SEQ ID NO: 59639 - DNA, 1727 bp, Homo sapiens; identical to SEQ ID NO: 5801
  CDS (67)..(1425)

SEQ ID NO: 59640 - protein, 452 aa, Homo sapiens; identical to SEQ ID NO: 5802

SEQ ID NO: 59641 - DNA, 1863 bp, Mus musculus; identical to SEQ ID NO: 5803
  CDS (24)..(1595)

SEQ ID NO: 59642 - protein, 523 aa, Mus musculus; identical to SEQ ID NO: 5804

SEQ ID NO: 59643 - DNA, 1740 bp, Brachydanio rerio; identical to SEQ ID NO: 5805
  CDS (80)..(1429)

SEQ ID NO: 59644 - protein, 449 aa, Brachydanio rerio; identical to SEQ ID NO: 5806

SEQ ID NO: 59645 - DNA, 25 bp, Artificial sequence
  Primer sequence
atgacaaagattaaggtagctaacc

SEQ ID NO: 59646 - DNA, 23 bp, Artificial sequence
  Primer sequence
ttacaatgcagctgcctcgaact

SEQ ID NO: 59647 - protein, 367 aa, Artificial sequence; identical to SEQ ID NO: 35141
  Consensus
  Variant (4)..(8): Xaa in position 4 to 8 is any amino acid
  Variant (10)..(29): Xaa in position 10 to 29 is any amino acid
  Variant (31)..(34): Xaa in position 31 to 34 is any amino acid
  Variant (36)..(37): Xaa in position 36 to 37 is any amino acid
  Variant (39)..(39): Xaa in position 39 is any amino acid
  Variant (41)..(42): Xaa in position 41 to 42 is any amino acid
  Variant (44)..(57): Xaa in position 44 to 57 is any amino acid
  Variant (65)..(67): Xaa in position 65 to 67 is any amino acid
  Variant (69)..(70): Xaa in position 69 to 70 is any amino acid
  Variant (72)..(73): Xaa in position 72 to 73 is any amino acid
  Variant (75)..(77): Xaa in position 75 to 77 is any amino acid
  Variant (79)..(79): Xaa in position 79 is any amino acid
  Variant (83)..(83): Xaa in position 83 is any amino acid
  Variant (85)..(85): Xaa in position 85 is any amino acid
  Variant (87)..(90): Xaa in position 87 to 90 is any amino acid
  Variant (92)..(93): Xaa in position 92 to 93 is any amino acid
  Variant (96)..(109): Xaa in position 96 to 109 is any amino acid
  Variant (111)..(113): Xaa in position 111 to 113 is any amino acid
  Variant (115)..(117): Xaa in position 115 to 117 is any amino acid
  Variant (121)..(122): Xaa in position 121 to 122 is any amino acid
  Variant (124)..(124): Xaa in position 124 is any amino acid
  Variant (126)..(173): Xaa in position 126 to 173 is any amino acid
  Variant (175)..(177): Xaa in position 175 to 177 is any amino acid
  Variant (179)..(181): Xaa in position 179 to 181 is any amino acid
  Variant (184)..(200): Xaa in position 184 to 200 is any amino acid
  Variant (203)..(203): Xaa in position 203 is any amino acid
  Variant (206)..(206): Xaa in position 206 is any amino acid
  Variant (208)..(208): Xaa in position 208 is any amino acid
  Variant (210)..(212): Xaa in position 210 to 212 is any amino acid
  Variant (214)..(216): Xaa in position 214 to 216 is any amino acid
  Variant (218)..(235): Xaa in position 218 to 235 is any amino acid
  Variant (237)..(239): Xaa in position 237 to 239 is any amino acid
  Variant (244)..(245): Xaa in position 244 to 245 is any amino acid
  Variant (247)..(252): Xaa in position 247 to 252 is any amino acid
  Variant (254)..(257): Xaa in position 254 to 257 is any amino acid
  Variant (259)..(261): Xaa in position 259 to 261 is any amino acid
  Variant (263)..(263): Xaa in position 263 is any amino acid
  Variant (265)..(267): Xaa in position 265 to 267 is any amino acid
  Variant (270)..(271): Xaa in position 270 to 271 is any amino acid
  Variant (273)..(275): Xaa in position 273 to 275 is any amino acid
  Variant (279)..(280): Xaa in position 279 to 280 is any amino acid
  Variant (282)..(282): Xaa in position 282 is any amino acid
  Variant (284)..(284): Xaa in position 284 is any amino acid
  Variant (286)..(289): Xaa in position 286 to 289 is any amino acid
  Variant (291)..(295): Xaa in position 291 to 295 is any amino acid
  Variant (298)..(298): Xaa in position 298 is any amino acid
  Variant (303)..(304): Xaa in position 303 to 304 is any amino acid
  Variant (306)..(314): Xaa in position 306 to 314 is any amino acid
  Variant (318)..(320): Xaa in position 318 to 320 is any amino acid
  Variant (322)..(322): Xaa in position 322 is any amino acid
  Variant (327)..(332): Xaa in position 327 to 332 is any amino acid
  Variant (334)..(336): Xaa in position 334 to 336 is any amino acid
  Variant (338)..(349): Xaa in position 338 to 349 is any amino acid
  Variant (351)..(366): Xaa in position 351 to 366 is any amino acid

SEQ ID NO: 59648 - protein, 410 aa, Artificial sequence; identical to SEQ ID NO: 35142
  Consensus
  Variant (3)..(3): Xaa in position 3 is any amino acid
  Variant (5)..(6): Xaa in position 5 to 6 is any amino acid
  Variant (8)..(8): Xaa in position 8 is any amino acid
  Variant (11)..(11): Xaa in position 11 is any amino acid
  Variant (19)..(19): Xaa in position 19 is any amino acid
  Variant (22)..(23): Xaa in position 22 to 23 is any amino acid
  Variant (26)..(26): Xaa in position 26 is any amino acid
  Variant (30)..(30): Xaa in position 30 is any amino acid
  Variant (32)..(38): Xaa in position 32 to 38 is any amino acid
  Variant (40)..(40): Xaa in position 40 is any amino acid
  Variant (43)..(46): Xaa in position 43 to 46 is any amino acid
  Variant (49)..(49): Xaa in position 49 is any amino acid
  Variant (51)..(51): Xaa in position 51 is any amino acid
  Variant (53)..(53): Xaa in position 53 is any amino acid
  Variant (56)..(58): Xaa in position 56 to 58 is any amino acid
  Variant (60)..(60): Xaa in position 60 is any amino acid
  Variant (62)..(63): Xaa in position 62 to 63 is any amino acid
  Variant (65)..(66): Xaa in position 65 to 66 is any amino acid
  Variant (68)..(69): Xaa in position 68 to 69 is any amino acid
  Variant (79)..(79): Xaa in position 79 is any amino acid
  Variant (82)..(82): Xaa in position 82 is any amino acid
  Variant (85)..(85): Xaa in position 85 is any amino acid
  Variant (88)..(88): Xaa in position 88 is any amino acid
  Variant (91)..(91): Xaa in position 91 is any amino acid
  Variant (102)..(102): Xaa in position 102 is any amino acid
  Variant (111)..(115): Xaa in position 111 to 115 is any amino acid
  Variant (121)..(121): Xaa in position 121 is any amino acid
  Variant (123)..(123): Xaa in position 123 is any amino acid
  Variant (127)..(127): Xaa in position 127 is any amino acid
  Variant (133)..(133): Xaa in position 133 is any amino acid
  Variant (138)..(138): Xaa in position 138 is any amino acid
  Variant (142)..(147): Xaa in position 142 to 147 is any amino acid
  Variant (149)..(168): Xaa in position 149 to 168 is any amino acid
  Variant (170)..(178): Xaa in position 170 to 178 is any amino acid
  Variant (181)..(183): Xaa in position 181 to 183 is any amino acid
  Variant (187)..(187): Xaa in position 187 is any amino acid
  Variant (189)..(189): Xaa in position 189 is any amino acid
  Variant (192)..(193): Xaa in position 192 to 193 is any amino acid
  Variant (196)..(207): Xaa in position 196 to 207 is any amino acid
  Variant (209)..(209): Xaa in position 209 is any amino acid
  Variant (211)..(211): Xaa in position 211 is any amino acid
  Variant (220)..(220): Xaa in position 220 is any amino acid
  Variant (230)..(237): Xaa in position 230 to 237 is any amino acid
  Variant (239)..(240): Xaa in position 239 to 240 is any amino acid
  Variant (242)..(247): Xaa in position 242 to 247 is any amino acid
  Variant (259)..(261): Xaa in position 259 to 261 is any amino acid
  Variant (263)..(264): Xaa in position 263 to 264 is any amino acid
  Variant (267)..(269): Xaa in position 267 to 269 is any amino acid
  Variant (271)..(271): Xaa in position 271 is any amino acid
  Variant (282)..(283): Xaa in position 282 to 283 is any amino acid
  Variant (287)..(287): Xaa in position 287 is any amino acid
  Variant (298)..(299): Xaa in position 298 to 299 is any amino acid
  Variant (304)..(305): Xaa in position 304 to 305 is any amino acid
  Variant (307)..(307): Xaa in position 307 is any amino acid
  Variant (318)..(318): Xaa in position 318 is any amino acid
  Variant (320)..(321): Xaa in position 320 to 321 is any amino acid
  Variant (323)..(323): Xaa in position 323 is any amino acid
  Variant (325)..(326): Xaa in position 325 to 326 is any amino acid
  Variant (331)..(331): Xaa in position 331 is any amino acid
  Variant (339)..(339): Xaa in position 339 is any amino acid
  Variant (343)..(344): Xaa in position 343 to 344 is any amino acid
  Variant (346)..(347): Xaa in position 346 to 347 is any amino acid
  Variant (350)..(356): Xaa in position 350 to 356 is any amino acid
  Variant (358)..(360): Xaa in position 358 to 360 is any amino acid
  Variant (363)..(367): Xaa in position 363 to 367 is any amino acid
  Variant (370)..(374): Xaa in position 370 to 374 is any amino acid
  Variant (381)..(398): Xaa in position 381 to 398 is any amino acid
  Variant (400)..(401): Xaa in position 400 to 401 is any amino acid
  Variant (403)..(409): Xaa in position 403 to 409 is any amino acid

SEQ ID NO: 59649 - protein, 137 aa, Artificial sequence; identical to SEQ ID NO: 6194
  Consensus
  Variant (1)..(1): Xaa in position 1 is Lys, Arg or Gln
  Variant (2)..(2): Xaa in position 2 is Ile, Lys, Val or Leu
  Variant (3)..(6): Xaa in position 3 to 6 is any amino acid
  Variant (7)..(7): Xaa in position 7 is Pro, Ser or Thr
  Variant (8)..(8): Xaa in position 8 is Ile, Val or Leu
  Variant (9)..(9): Xaa in position 9 is Val or Ala
  Variant (10)..(10): Xaa in position 10 is Glu or Asp
  Variant (11)..(11): Xaa in position 11 is Met, Leu, Ile or Val
  Variant (12)..(12): Xaa in position 12 is Asp, Gln or Leu
  Variant (16)..(16): Xaa in position 16 is Met or Gln
  Variant (17)..(17): Xaa in position 17 is Thr or Ala
  Variant (18)..(18): Xaa in position 18 is Arg or Lys
  Variant (19)..(19): Xaa in position 19 is Ile or Val
  Variant (20)..(20): Xaa in position 20 is Ile, Phe or Met
  Variant (22)..(23): Xaa in position 22 to 23 is any amino acid
  Variant (24)..(24): Xaa in position 24 is Ile or Val
  Variant (25)..(25): Xaa in position 25 is Lys, Arg or Gln
  Variant (26)..(27): Xaa in position 26 to 27 is any amino acid
  Variant (28)..(28): Xaa in position 28 is Leu or Phe
  Variant (29)..(29): Xaa in position 29 is Ile, Val or Leu
  Variant (30)..(30): Xaa in position 30 is any amino acid
  Variant (31)..(31): Xaa in position 31 is Pro or Thr
  Variant (32)..(32): Xaa in position 32 is Tyr, Phe, His or Asn
  Variant (33)..(33): Xaa in position 33 is Leu, Val or Met
  Variant (34)..(34): Xaa in position 34 is Asp, Glu or Asn
  Variant (35)..(35): Xaa in position 35 is Leu, Val, Ile or Met
  Variant (36)..(38): Xaa in position 36 to 38 is any amino acid
  Variant (39)..(39): Xaa in position 39 is Tyr, Phe, Ser or Thr
  Variant (40)..(40): Xaa in position 40 is Tyr or Phe
  Variant (41)..(41): Xaa in position 41 is Asp or Ser
  Variant (43)..(43): Xaa in position 43 is Gly or Ser
  Variant (44)..(44): Xaa in position 44 is Ile, Leu, Val or Met
  Variant (45)..(46): Xaa in position 45 to 46 is any amino acid
  Variant (48)..(48): Xaa in position 48 is Asp or Asn
  Variant (49)..(49): Xaa in position 49 is any amino acid
  Variant (51)..(51): Xaa in position 51 is any amino acid
  Variant (53)..(53): Xaa in position 53 is Gln, Lys or Arg
  Variant (54)..(54): Xaa in position 54 is Val or Ile
  Variant (56)..(56): Xaa in position 56 is any amino acid
  Variant (57)..(57): Xaa in position 57 is Asp or Glu
  Variant (58)..(58): Xaa in position 58 is Ser, Ala or Thr
  Variant (59)..(59): Xaa in position 59 is Ala or Ser
  Variant (60)..(60): Xaa in position 60 is any amino acid
  Variant (61)..(61): Xaa in position 61 is Ala or Glu
  Variant (62)..(62): Xaa in position 62 is any amino acid
  Variant (63)..(63): Xaa in position 63 is Lys, Leu, Gln or Met
  Variant (64)..(64): Xaa in position 64 is Lys, Glu, Gln or Arg
  Variant (65)..(65): Xaa in position 65 is Tyr, His or Val
  Variant (66)..(66): Xaa in position 66 is any amino acid
  Variant (67)..(67): Xaa in position 67 is Val, Met or Ile
  Variant (68)..(68): Xaa in position 68 is Gly or Ala
  Variant (69)..(69): Xaa in position 69 is Val or Ile
  Variant (77)..(77): Xaa in position 77 is Asp or Asn
  Variant (78)..(78): Xaa in position 78 is Glu, Ala, Ser or Gln
  Variant (79)..(79): Xaa in position 79 is any amino acid
  Variant (81)..(81): Xaa in position 81 is Val, Met, Ile or Leu
  Variant (82)..(82): Xaa in position 82 is any amino acid
  Variant (84)..(84): Xaa in position 84 is Phe or Tyr
  Variant (85)..(85): Xaa in position 85 is any amino acid
  Variant (88)..(88): Xaa in position 88 is any amino acid
  Variant (91)..(91): Xaa in position 91 is Lys, Arg or Leu
  Variant (95)..(95): Xaa in position 95 is Gly or Ala
  Variant (97)..(97): Xaa in position 97 is Ile or Leu
  Variant (99)..(99): Xaa in position 99 is Asn, Ser or Ala
  Variant (100)..(100): Xaa in position 100 is Ile, Ala or Tyr
  Variant (101)..(101): Xaa in position 101 is Leu or Ile
  Variant (102)..(102): Xaa in position 102 is Gly, Asn or Asp
  Variant (104)..(104): Xaa in position 104 is Thr or Val
  Variant (105)..(105): Xaa in position 105 is Val or Ile
  Variant (108)..(108): Xaa in position 108 is any amino acid
  Variant (109)..(109): Xaa in position 109 is Pro, Ala or Ser
  Variant (111)..(111): Xaa in position 111 is Ile, Val, Leu or Met
  Variant (112)..(112): Xaa in position 112 is Cys, Ile, Val or Met
  Variant (113)..(114): Xaa in position 113 to 114 is any amino acid
  Variant (115)..(115): Xaa in position 115 is Ile, Val or Leu
  Variant (117)..(117): Xaa in position 117 is Arg, Lys or Pro
  Variant (118)..(118): Xaa in position 118 is Leu, Ile, Ala or Tyr
  Variant (119)..(119): Xaa in position 119 is Val, Ile or Leu
  Variant (120)..(121): Xaa in position 120 to 121 is any amino acid
  Variant (123)..(124): Xaa in position 123 to 124 is any amino acid
  Variant (125)..(125): Xaa in position 125 is Pro or Ala
  Variant (127)..(127): Xaa in position 127 is Ile, Cys, Val or Thr
  Variant (128)..(128): Xaa in position 128 is Ile or Val
  Variant (129)..(129): Xaa in position 129 is Gly or Ala
  Variant (133)..(133): Xaa in position 133 is Phe, His or Tyr
  Variant (134)..(134): Xaa in position 134 is Gly or Ala
  Variant (136)..(136): Xaa in position 136 is Gln, Ile or Leu

SEQ ID NO: 59650 - protein, 166 aa, Artificial sequence; identical to SEQ ID NO: 6195
  Consensus
  Variant (1)..(1): Xaa in position 1 is Met or Gln
  Variant (2)..(2): Xaa in position 2 is Tyr, His or Phe
  Variant (4)..(6): Xaa in position 4 to 6 is any amino acid
  Variant (8)..(8): Xaa in position 8 is Ile or Val
  Variant (9)..(10): Xaa in position 9 to 10 is any amino acid
  Variant (13)..(13): Xaa in position 13 is any amino acid
  Variant (14)..(14): Xaa in position 14 is Ala or Ser
  Variant (15)..(15): Xaa in position 15 is Ser or Cys
  Variant (16)..(16): Xaa in position 16 is Phe, Met, Leu or Ile
  Variant (17)..(18): Xaa in position 17 to 18 is any amino acid
  Variant (19)..(19): Xaa in position 19 is Ala, Gly or Ser
  Variant (20)..(20): Xaa in position 20 is Leu, Tyr, Ile or Phe
  Variant (21)..(25): Xaa in position 21 to 25 is any amino acid
  Variant (26)..(26): Xaa in position 26 is Leu, Val or Ile
  Variant (27)..(27): Xaa in position 27 is Tyr, Phe or Trp
  Variant (28)..(28): Xaa in position 28 is Leu, Met, Phe or Ser
  Variant (29)..(29): Xaa in position 29 is Ser, Thr or Ala
  Variant (32)..(32): Xaa in position 32 is Asn, Asp or Ser
  Variant (35)..(35): Xaa in position 35 is Leu, Ser or Met
  Variant (37)..(37): Xaa in position 37 is any amino acid
  Variant (39)..(39): Xaa in position 39 is Asp or His
  Variant (40)..(40): Xaa in position 40 is Gly, Ala or His
  Variant (41)..(41): Xaa in position 41 is any amino acid
  Variant (43)..(43): Xaa in position 43 is Lys or Arg
  Variant (44)..(44): Xaa in position 44 is Asp or Ala
  Variant (45)..(45): Xaa in position 45 is Ile, Val, Leu or Thr
  Variant (47)..(49): Xaa in position 47 to 49 is any amino acid
  Variant (50)..(50): Xaa in position 50 is Tyr, Phe, Ala or Val
  Variant (51)..(56): Xaa in position 51 to 56 is any amino acid
  Variant (57)..(57): Xaa in position 57 is any or no amino acid
  Variant (58)..(58): Xaa in position 58 is Phe, Tyr or Leu
  Variant (59)..(61): Xaa in position 59 to 61 is any amino acid
  Variant (62)..(62): Xaa in position 62 is Gly, Lys, Asn or Ser
  Variant (63)..(63): Xaa in position 63 is Ile, Leu or Val
  Variant (64)..(64): Xaa in position 64 is any amino acid
  Variant (66)..(66): Xaa in position 66 is any amino acid
  Variant (67)..(67): Xaa in position 67 is His or Tyr
  Variant (68)..(68): Xaa in position 68 is any amino acid
  Variant (73)..(73): Xaa in position 73 is Met or Ala
  Variant (74)..(74): Xaa in position 74 is Val or Ala
  Variant (76)..(77): Xaa in position 76 to 77 is any amino acid
  Variant (78)..(78): Xaa in position 78 is Leu, Ile, Met or Val
  Variant (79)..(79): Xaa in position 79 is Lys or Arg
  Variant (80)..(80): Xaa in position 80 is Ser or Trp
  Variant (81)..(81): Xaa in position 81 is any amino acid
  Variant (83)..(83): Xaa in position 83 is Gly or Ala
  Variant (84)..(84): Xaa in position 84 is Tyr, Phe or Met
  Variant (85)..(85): Xaa in position 85 is Val, Ile or Leu
  Variant (86)..(86): Xaa in position 86 is Trp, Met, Ile or Leu
  Variant (88)..(88): Xaa in position 88 is Cys, Leu, Met or Phe
  Variant (89)..(89): Xaa in position 89 is Lys or Met
  Variant (92)..(92): Xaa in position 92 is Asp or Glu
  Variant (95)..(95): Xaa in position 95 is Val or Ile
  Variant (96)..(96): Xaa in position 96 is Gln, Met or Glu
  Variant (99)..(99): Xaa in position 99 is any amino acid
  Variant (100)..(100): Xaa in position 100 is Val, Leu or Ile
  Variant (102)..(102): Xaa in position 102 is Gln, Ser or Thr
  Variant (103)..(103): Xaa in position 103 is Gly or Ala
  Variant (104)..(104): Xaa in position 104 is Phe or Tyr
  Variant (108)..(108): Xaa in position 108 is Gly or Ala
  Variant (109)..(109): Xaa in position 109 is Leu or Met
  Variant (111)..(111): Xaa in position 111 is Thr or Ser
  Variant (113)..(113): Xaa in position 113 is Val, Ile, Thr or Ala
  Variant (115)..(116): Xaa in position 115 to 116 is any amino acid
  Variant (117)..(117): Xaa in position 117 is Pro, Ser or Ala
  Variant (118)..(118): Xaa in position 118 is Asp, Thr or Asn
  Variant (120)..(121): Xaa in position 120 to 121 is any amino acid
  Variant (122)..(122): Xaa in position 122 is any or no amino acid
  Variant (123)..(123): Xaa in position 123 is Glu, Ala, Ile or Val
  Variant (124)..(124): Xaa in position 124 is any amino acid
  Variant (127)..(127): Xaa in position 127 is Ala or Ser
  Variant (133)..(133): Xaa in position 133 is Arg or Lys
  Variant (135)..(135): Xaa in position 135 is Tyr or Phe
  Variant (136)..(136): Xaa in position 136 is Arg, Tyr or Met
  Variant (137)..(137): Xaa in position 137 is any amino acid
  Variant (138)..(138): Xaa in position 138 is His, Tyr or Trp
  Variant (139)..(139): Xaa in position 139 is Gln or Leu
  Variant (140)..(140): Xaa in position 140 is Lys, Gln, Ala or Arg
  Variant (141)..(141): Xaa in position 141 is Gly or Asn
  Variant (142)..(143): Xaa in position 142 to 143 is any amino acid
  Variant (148)..(148): Xaa in position 148 is Ser or Pro
  Variant (149)..(149): Xaa in position 149 is Ile or Val
  Variant (151)..(151): Xaa in position 151 is Ser or Thr
  Variant (156)..(156): Xaa in position 156 is Thr, Ser or Ala
  Variant (157)..(157): Xaa in position 157 is any amino acid
  Variant (158)..(158): Xaa in position 158 is Gly or Ala
  Variant (159)..(159): Xaa in position 159 is Leu or Ile
  Variant (160)..(161): Xaa in position 160 to 161 is any amino acid
  Variant (163)..(163): Xaa in position 163 is Ala or Gly
  Variant (164)..(164): Xaa in position 164 is any amino acid
  Variant (165)..(165): Xaa in position 165 is Leu, Phe or Val

SEQ ID NO: 59651 - DNA, 2066 bp, Saccharomyces cerevisiae
  CDS (328)..(1800)
gcttaatctgttcggcgtattacagtgctcaactttccctttctcaatattttgttatgtgaattaggtcactaaaaattaaaacatttaagaaaaataaaagttccttccacagacgaaacactgtatatgcttcctcccagctctatttacctaattagtgacctgattaaacttttggaaagaagcattttcctcgagatttccaaacggtgcgggaaaatggcaagtgaggaaaaaaaaaactggcctaaaatattcgatgaggttaagagaagagctggttcttcaccaagtgtttcactgagaagttagctacgaaaaagcatgaatttctacagggatgcaacatgggtgctagaagatattgagaaggaggctgcaaaagaaaggatttccggctctatgcagacgctggtactgaaaagctgtaaaagatataagctgaaaagtaatccaaaacatatttatgcagttctcgattcgtgttggaaatataaaccatatttggagaaagtgatgaaaaaggcacacatattggaagatatacccaagaaaaagggcaaaccactcttttcaaggctaactttgttattgctttgccatgatttgctgttgtctaagcagaaaagaattcaaatgggcaaacaccccatcaaagattatgttttgaagtttaagagcccattgcatagcgaaatggtcaaattgaaactcaaattgaaagtaagagagctatctgagttggtattaagcgaggatatttccaatgaccttcctcctgttagatggattagaatcaatccattaaaatgccatccaaatggtgagactgagccggtgttagccgaattgaggaagaagtttactttaaaggtagacaaatggtctgaactagttcctgggtctatctattatgatgagtttattccaaacttgtttggaattcatccgtctgacaaaattacagcacatgagctttataagcatgggaagattatcattcaagatcgtgcttcttgttttccagcccacattttgaatccaggaccaagtgatattgtgatagattcctgctctgctccaggtaataagactacccatacggcctcttatatatatcccgaaccaccgaaggacaataatactcgaatatacgctttcgagaaggatcctgaaagagcaaaagttttacaaaaaatgatcaagatagctggctgttctcccaacatcagtgtcaatgtaggtgattttacaaagctcgctactcctgaaaaatataaggacgttacttgttttattgtagatccgagctgctccggtagcggtatatttggtcgtaagttttttgactcatttaatagaaggaaaattgatgataaagatgacgatggtggcattgtgccggatgagcaagaggagtttatagcaaaggaagaactacagacaaggttagcgaagctgagttcatttcagttccagatggtaaagcatgcaatgagtttcccagcggctaaaaaaatagtatacagcacatgttccattcatgcggaagaaaatgaacgagtcgtcatagaccttcttttagataagtcagttagagaatggggttggaaagtagcgccaaaaagagaagttattccttcttggcctagaagaggcaaggtagaagagttcgaagaggtttttagagatggagtcacctatgaccctcaacagcttgccgagggttgtatcagggcactaccaaaaagtgacggtggtattggtttctttgctgtctgttttgaaagagattaaactttcagaacattcatgtatatatgtgtatatctgatatgtattattgcatttttgctgtagtactacggaaaagacatttcaataatctatacatcccgcacataaaggaagattttcgggtaatatactattataaaaattatcgatgagctctgtgaaaaggtcgtaaatataaaagttctttcttgcgacagtggcaacaaccaagtgaaacagcgtgagacgagactgctctaatctatttgcagtcgtaggcattacaa

SEQ ID NO: 59652 - protein, 490 aa, Saccharomyces cerevisiae
MNFYRDATWVLEDIEKEAAKERISGSMQTLVLKSCKRYKLKSNPKHIYAVLDSCWKYKPYLEKVMKKAHILEDIPKKKGKPLFSRLTLLLLCHDLLLSKQKRIQMGKHPIKDYVLKFKSPLHSEMVKLKLKLKVRELSELVLSEDISNDLPPVRWIRINPLKCHPNGETEPVLAELRKKFTLKVDKWSELVPGSIYYDEFIPNLFGIHPSDKITAHELYKHGKIIIQDRASCFPAHILNPGPSDIVIDSCSAPGNKTTHTASYIYPEPPKDNNTRIYAFEKDPERAKVLQKMIKIAGCSPNISVNVGDFTKLATPEKYKDVTCFIVDPSCSGSGIFGRKFFDSFNRRKIDDKDDDGGIVPDEQEEFIAKEELQTRLAKLSSFQFQMVKHAMSFPAAKKIVYSTCSIHAEENERVVIDLLLDKSVREWGWKVAPKREVIPSWPRRGKVEEFEEVFRDGVTYDPQQLAEGCIRALPKSDGGIGFFAVCFERD

SEQ ID NO: 59653 - DNA, 1290 bp, Homo sapiens
  CDS (1)..(1290)
atggggctgtatgctgcagctgcaggcgtgttggccggcgtggagagccgccagggctctatcaaggggttggtgtactccagcaacttccagaacgtgaagcagctgtacgcgctggtgtgcgaaacgcagcgctactccgccgtgctggatgctgtgatcgccagcgccggcctcctccgtgcggagaagaagctgcggccgcacctggccaaggtgctagtgtatgagttgttgttgggaaagggctttcgagggggtgggggccgatggaaggctctgttgggccggcaccaggcgaggctcaaggctgagttggctcggctcaaggttcatcggggtgtgagccggaatgaggacctgttggaagtgggatccaggcctggtccagcctcccagctgcctcgatttgtgcgtgtgaacactctcaagacctgctccgatgatgtagttgattatttcaagagacaaggtttctcctatcagggtcgggcttccagcctcgatgacttacgagccctcaaggggaagcattttctcctggaccccttgatgccggagctgctggtgtttcccgcccagacagatctgcatgaacacccactgtaccgggccggacacctcattctgcaggacagggccagctgtctcccagccatgctgctggaccccccgccaggctcccatgtcatcgatgcctgtgccgccccaggcaataagaccagtcacttggctgctcttctgaagaaccaagggaagatctttgcctttgacctggatgccaagcggctggcatccatggccacgctgctggcccgggctggcgtctcttgctgtgaactggctgaggaggacttcctggcggtctccccctcggatccacgctaccatgaggtccactacatcctgctggatccttcctgcagtggctcgggtatgccgagcagacagctggaggagcccggggcaggcacacctagcccggtgcgtctgcatgccctggcagggttccagcagcgagccctgtgccacgcgctcactttcccttccctgcagcggctcgtctactccacgtgctccctctgccaggaggagaatgaagacgtggtgcgagatgcgctgcagcagaacccgggcgccttcaggctagctcccgccctgcctgcctggccccaccgaggcctgagcacgttcccgggtgccgagcactgcctccgggcctcccctgagaccacactcagcagtggcttcttcgttgctgtaattgaacgggtcgaggtgccaaggtga

SEQ ID NO: 59654 - protein, 429 aa, Homo sapiens
MGLYAAAAGVLAGVESRQGSIKGLVYSSNFQNVKQLYALVCETQRYSAVLDAVIASAGLLRAEKKLRPHLAKVLVYELLLGKGFRGGGGRWKALLGRHQARLKAELARLKVHRGVSRNEDLLEVGSRPGPASQLPRFVRVNTLKTCSDDVVDYFKRQGFSYQGRASSLDDLRALKGKHFLLDPLMPELLVFPAQTDLHEHPLYRAGHLILQDRASCLPAMLLDPPPGSHVIDACAAPGNKTSHLAALLKNQGKIFAFDLDAKRLASMATLLARAGVSCCELAEEDFLAVSPSDPRYHEVHYILLDPSCSGSGMPSRQLEEPGAGTPSPVRLHALAGFQQRALCHALTFPSLQRLVYSTCSLCQEENEDVVRDALQQNPGAFRLAPALPAWPHRGLSTFPGAEHCLRASPETTLSSGFFVAVIERVEVPR

SEQ ID NO: 59655 - DNA, 1314 bp, Archaeoglobus fulgidus DSM 4304
  CDS (1)..(1314): transl_table=11
atgtccgcacgctcagatggtagtaatgtgattcccacccaggagattgctgcaaaggttctggccgaggtcgagaggagcagaatttcggtaaagtcggctgttcagaagcttgccgggggctttgactacaaggtaaggggtagcgttcacgcctacagcgttgaaactctcaagaggctcaacgcaatagactacttccttaaatcaaccctcaaaaaattcgacgggctcgacccgtttaccagaaacctgctcaggattgccgtttacgagatgaagtacaaaggcgtgcatccagctctcgccacagattctgctgtgagaattgcaagggaaaggggaaaggcctctcttgttaatgcggttctccgcaaagtggaaaagcttgatattcaggcagagggcaggctgaaggaactttccctcacatacttccacccagagtggtttgtaaagtacgccatcgaacttctcggtgaggatggggcgctgaagctgatgaaggcaaacctgaggaatcccccaacttacgtgagggttaatgagctgaaagggtctgtggaatctgttagagagtatctggagaagaacggcgtcattctggaggagacttttctggatgaggttttccgcgttaaaggttacgaaaagcatccagcctcacttgactggcactcggaaggaaagtacgttatacaggacctggcatcgtgcttcgtttcgcatgccctcaacccatctccgggagacgtggtcatcgaccttgccgccgctccaggaatgaagaccgcccacatggcgatgctgatgcaaaatgaaggaagaatcgtggcggttgacaactctccgagcagggtgcgaaggatgaggagcaagctgaagcagcttggtgtcaaaaacgttgagataaagctcggcgatggatgcgtttttgagtgtgaggctgacaaggctctcgtcgatgcaccgtgctcctcaactggcaactacgcatcccagccaaacgtcaagtggacgttcgacgaaagaaagttcagagctacaatgaaggttcagaggaagatgattgccaacgccctgaggaatgccgatgaagtcgtttatgcaacctgcagcataaccttcgaggagaatgaggagaatctgctcaaaaccggggcgaagattctgcccctcccctcgcccttcggaaggggtgtaagggagtttagaggtgtgctgttcagggactgggaaaaggtcgtgagaagctttccacatctccacgatactgcggggttcttcatctcaaagctgacccgcgatggttag

SEQ ID NO: 59656 - protein, 437 aa, Archaeoglobus fulgidus DSM 4304
MSARSDGSNVIPTQEIAAKVLAEVERSRISVKSAVQKLAGGFDYKVRGSVHAYSVETLKRLNAIDYFLKSTLKKFDGLDPFTRNLLRIAVYEMKYKGVHPALATDSAVRIARERGKASLVNAVLRKVEKLDIQAEGRLKELSLTYFHPEWFVKYAIELLGEDGALKLMKANLRNPPTYVRVNELKGSVESVREYLEKNGVILEETFLDEVFRVKGYEKHPASLDWHSEGKYVIQDLASCFVSHALNPSPGDVVIDLAAAPGMKTAHMAMLMQNEGRIVAVDNSPSRVRRMRSKLKQLGVKNVEIKLGDGCVFECEADKALVDAPCSSTGNYASQPNVKWTFDERKFRATMKVQRKMIANALRNADEVVYATCSITFEENEENLLKTGAKILPLPSPFGRGVREFRGVLFRDWEKVVRSFPHLHDTAGFFISKLTRDG

SEQ ID NO: 59657 - DNA, 1704 bp, Arabidopsis thaliana
  CDS (1)..(1704)
atggtggcgcgtcgtaacaaaccaaaagcgccgctggtgaaacaccgattttccggcggcgacagtcacaaaccaaaaccaccaccggctactaaacaaccattttccggcgtcgagagccacaaaccaaaaacatcaccagctacaaagcaaaagttttccggcgtcgagagtcacaaaccaaaaacgccgccgggaaaacaacgattttccggcgccgagagtcgcaaaccaaaaacaccaccagctactaagcaaaagttttccagcttagagagatcagctctctacgccagaagagaagcagctaatatactccgtaccgttctccgtggtgacgccgagcgacgagccgttgcttccatcaaatcactcgtcttaagtccttccgttcgcaacaaacgcggcactttcgctcttgtctgcgagactctcaaatatcttactgtgattaaagatgttcttgatatagctaatgtattgaatagtaaatggaagaggcaagagccattggtcttcatcgtttgctacgatatcctctttggcaaggatactccatcaattggtgatgcagagaagtttcttatgcggcataaagaggcgttattgtcaggtttagctacgcttttagtgaggaagaaagtcgatagtgttgatcagttgttgggttctaagcttactggtcatttgaaaccacggtatgttcgtgttaatacgcttaagatggatgtggattctgcagtgcaggagctggagaagcattacacggtgcagaaggacgagacagttcctgacttgttggtgttgccccctggcagcgatttgcatgctcatcgtttggttgcgaatggacgtatatttttgcaggggaaagcaagttcaatggtagcagcagcactgcagccacaagcaggatgggaggttcttgatgcctgttcagctccaggaaacaaaactattcatcttgctgctcttatggaaggacaaggaaaaatcatagcatgtgagctaaatgaagaacgagttaagcgtttggaacatactataaagctctctggtgcctccaatatcgaagtctgtcatggtgattttttgggcctaaatccgaaagatccttcttttgcgaagattcgggctatattgttggatccttcttgctctggctctggcacgattacagatcgtttggaccatctccttccttctcattcagaagataataacatgaactatgactccatgagactgcacaagctcgctgttttccagaaaaaggctcttgcccatgcactctcctttccaaaggttgagagagtcgtatacagcacatgctccatctaccaaatagaaaacgaagatgtcgtctcctctgttttacctctggcatcatccttgggcttcaaacttgctaccccctttcctcagtggcagcgtcgtggtctccctgtatttgcaggatctgaacatctacttaggatggatccggtggaggacaaagaagggttcttcatcgctttattcgtcagggcaaacaaactcgataacccaaaatcgtctgaacttcccgatagagtgtgtagacgaagacccaaagaaagaaccatgcagttacatccctatctttgtcccaaaatgttcagagcttggagtgggaccttgcacaggctcaagactaggttcctgttatcacgtaatggttgttga

SEQ ID NO: 59658 - protein, 567 aa, Arabidopsis thaliana
MVARRNKPKAPLVKHRFSGGDSHKPKPPPATKQPFSGVESHKPKTSPATKQKFSGVESHKPKTPPGKQRFSGAESRKPKTPPATKQKFSSLERSALYARREAANILRTVLRGDAERRAVASIKSLVLSPSVRNKRGTFALVCETLKYLTVIKDVLDIANVLNSKWKRQEPLVFIVCYDILFGKDTPSIGDAEKFLMRHKEALLSGLATLLVRKKVDSVDQLLGSKLTGHLKPRYVRVNTLKMDVDSAVQELEKHYTVQKDETVPDLLVLPPGSDLHAHRLVANGRIFLQGKASSMVAAALQPQAGWEVLDACSAPGNKTIHLAALMEGQGKIIACELNEERVKRLEHTIKLSGASNIEVCHGDFLGLNPKDPSFAKIRAILLDPSCSGSGTITDRLDHLLPSHSEDNNMNYDSMRLHKLAVFQKKALAHALSFPKVERVVYSTCSIYQIENEDVVSSVLPLASSLGFKLATPFPQWQRRGLPVFAGSEHLLRMDPVEDKEGFFIALFVRANKLDNPKSSELPDRVCRRRPKERTMQLHPYLCPKMFRAWSGTLHRLKTRFLLSRNGC

SEQ ID NO: 59659 - DNA, 2103 bp, Caenorhabditis elegans
  CDS (1)..(2103)
atgaaagacgagccaatcatggcctgcgccgaagagaatcccgacgaaaaacccaaatgcaaccccttcggaacccgatttttgaccgatgacaccaaagttttcgagcacaacgcatgggacgacgtggaatggtccccagagcaacaggaagaagctcagcggattgtgcaaggtcaaaagtcgatgaaggttgatgaggagaaggcgatgcggcttttaagcaccccagcggatcaatgggatgctttttatgctcataatgagaatagattcttcaaagacaggaattggctgttaaaagagttcccagagcttaatgtggaggatgagagtaatttacagaaagaaaagatagaaatactggaagttggctgtggcgtcggaaataccacgttcccactgctccaagtgaacaattccagctcccggctcatgctgcacagctgtgattatgctccaaacgcgattcgagtcctgaaatcccaggacgcctacgatccggagaaaatgaacgcatttgtgtgggatatcacgcaaccggcttcccaggaggctccaaacgtcggatctctagactatattgtgtgtatctacgtgctgtcggctatccatccggataatatcaaaaatgctctgaaaaatctcgtccggctgctcaaacccggtggaagtctgctgctcaaagactacgggagatacgatttaacgcagttgcgattcaaaaaagatcgactaatcgacggaaatttgtactgccgaggagacggaaccctggtctatttcttcgatatggaagagttggagacgctgctcgccgagcacgggcttcagaagaaagtgatgcacgtggatcgacggctcattgtgaatcgagcgaaacaaaacaaaaaggcgcttctccgactttcgtgtgaatcgctcaaatttcggccggttttcgatgaaattctacaagataaggagctaaaatcgatgaaacgcgatgcgaatatcggtggatccgtcgagctgctctatgtgctcatgtatgagacacttgttggctccggattgaccagatgctctcaggagttgaaatctgtaatttcaaggagaattcagaggattaaggaggtggagcacgcgatgcaagacgagggaagaggaattaaggcgatgaaagaagcggacgatggaatgaaaaagatccaaatcccccgatatgcgcgtatcaatacactgaaatggactgcagatgaagctatgaagactctcgaaaccgaaaaatggaagattctcgggacactgaaacccgagaatttcgcggaaatggtgacaaaaatgaaggatgatgaggtgtatgtggatccgcatgtcgagaatttgattatttttgcgccgaatattcagaatttttatgaatattggatggttgagcagagatatttgattttacaggataaggcttcatgtctcccggccttcctgctcaatccacgtcccggctcccaagtattcgacacgtgtgcagctcctggaatgaagacgagccatgcggcggcaattatggagaatcagggaaaagtatgggcgatggatcgtgcggcggaccgtgtagccactatgaagcagctccttgacgcctcgaaagtcgcaatcgccagctcattttgtggagattttctgaaaactgacgtcactgataagaaattttcaaaggtcaaattcgcgattgtagaccctccgtgctctggatcaggaattgttaagcgaatggatgagattacaggaggaaatgcggagaaggagcgcctcgagaagcttaaaaatttgcaggcaatgatcctaaagcacgctctgaagcttcccggcctgaaacgagccgtctactcaacatgctctgtacacgaagaagaaaatgagcaagttgttgatgaagtgctcctggacacgtatgtccgtcaaaattatgtgctcaagaagaatgtgctcccagaatggacatatcgcggactgaagacctatgaagttggagaacattgtttgagagcaaatccgaaggtcacacttaccaatggattttttgtcgctgtttttgaacgggtcaagagctcggaataa

SEQ ID NO: 59660 - protein, 700 aa, Caenorhabditis elegans
MKDEPIMACAEENPDEKPKCNPFGTRFLTDDTKVFEHNAWDDVEWSPEQQEEAQRIVQGQKSMKVDEEKAMRLLSTPADQWDAFYAHNENRFFKDRNWLLKEFPELNVEDESNLQKEKIEILEVGCGVGNTTFPLLQVNNSSSRLMLHSCDYAPNAIRVLKSQDAYDPEKMNAFVWDITQPASQEAPNVGSLDYIVCIYVLSAIHPDNIKNALKNLVRLLKPGGSLLLKDYGRYDLTQLRFKKDRLIDGNLYCRGDGTLVYFFDMEELETLLAEHGLQKKVMHVDRRLIVNRAKQNKKALLRLSCESLKFRPVFDEILQDKELKSMKRDANIGGSVELLYVLMYETLVGSGLTRCSQELKSVISRRIQRIKEVEHAMQDEGRGIKAMKEADDGMKKIQIPRYARINTLKWTADEAMKTLETEKWKILGTLKPENFAEMVTKMKDDEVYVDPHVENLIIFAPNIQNFYEYWMVEQRYLILQDKASCLPAFLLNPRPGSQVFDTCAAPGMKTSHAAAIMENQGKVWAMDRAADRVATMKQLLDASKVAIASSFCGDFLKTDVTDKKFSKVKFAIVDPPCSGSGIVKRMDEITGGNAEKERLEKLKNLQAMILKHALKLPGLKRAVYSTCSVHEEENEQVVDEVLLDTYVRQNYVLKKNVLPEWTYRGLKTYEVGEHCLRANPKVTLTNGFFVAVFERVKSSE

SEQ ID NO: 59661 - DNA, 1320 bp, Caenorhabditis elegans
  CDS (1)..(1320)
atggcaaccgatgcgctgtacaacgaggtcgccgaaattatccgctgcgttttggccaaggagaaaagtgtgagaaatgcggtctacgggagttcgtataaaaacaaaaaggcgcttctccgactttcgtgtgaatcgctcaaatttcggccggttttcgatgaaattctacaagataaggagctaaaatcgatgaaacgcgatgcgaatatcggtggatccgtcgagctgctctatgtgctcatgtatgagacacttgttggctccggattgaccagatgctctcaggagttgaaatctgtaatttcaaggagaattcagaggattaaggaggtggagcacgcgatgcaagacgagggaagaggaattaaggcgatgaaagaagcggacgatggaatgaaaaagatccaaatcccccgatatgcgcgtatcaatacactgaaatggactgcagatgaagctatgaagactctcgaaaccgaaaaatggaagattctcgggacactgaaacccgagaatttcgcggaaatggtgacaaaaatgaaggatgatgaggtgtatgtggatccgcatgtcgagaatttgattatttttgcgccgaatattcagaatttttatgaatattggatggttgagcagagatatttgattttacaggataaggcttcatgtctcccggccttcctgctcaatccacgtcccggctcccaagtattcgacacgtgtgcagctcctggaatgaagacgagccatgcggcggcaattatggagaatcagggaaaagtatgggcgatggatcgtgcggcggaccgtgtagccactatgaagcagctccttgacgcctcgaaagtcgcaatcgccagctcattttgtggagattttctgaaaactgacgtcactgataagaaattttcaaaggtcaaattcgcgattgtagaccctccgtgctctggatcaggaattgttaagcgaatggatgagattacaggaggaaatgcggagaaggagcgcctcgagaagcttaaaaatttgcaggcaatgatcctaaagcacgctctgaagcttcccggcctgaaacgagccgtctactcaacatgctctgtacacgaagaagaaaatgagcaagttgttgatgaagtgctcctggacacgtatgtccgtcaaaattatgtgctcaagaagaatgtgctcccagaatggacatatcgcggactgaagacctatgaagttggagaacattgtttgagagcaaatccgaaggtcacacttaccaatggattttttgtcgctgtttttgaacgggtcaagagctcggaataa

SEQ ID NO: 59662 - protein, 439 aa, Caenorhabditis elegans
MATDALYNEVAEIIRCVLAKEKSVRNAVYGSSYKNKKALLRLSCESLKFRPVFDEILQDKELKSMKRDANIGGSVELLYVLMYETLVGSGLTRCSQELKSVISRRIQRIKEVEHAMQDEGRGIKAMKEADDGMKKIQIPRYARINTLKWTADEAMKTLETEKWKILGTLKPENFAEMVTKMKDDEVYVDPHVENLIIFAPNIQNFYEYWMVEQRYLILQDKASCLPAFLLNPRPGSQVFDTCAAPGMKTSHAAAIMENQGKVWAMDRAADRVATMKQLLDASKVAIASSFCGDFLKTDVTDKKFSKVKFAIVDPPCSGSGIVKRMDEITGGNAEKERLEKLKNLQAMILKHALKLPGLKRAVYSTCSVHEEENEQVVDEVLLDTYVRQNYVLKKNVLPEWTYRGLKTYEVGEHCLRANPKVTLTNGFFVAVFERVKSSE

SEQ ID NO: 59663 - DNA, 1368 bp, Schizosaccharomyces pombe 972h-
  CDS (1)..(1368)
atggatttttataatcatgctgccaacatactttcagatttaagtaaaaaaaaaggatcaattaagcaattagcatttaattcaaaaaaacatgatccaaaacgcacttatgctttggtttgcgaaactctcaaatataaacctgttttggatgaaataattgcgcgatccgattgtttcttaaaagaaaatttggctagagtccttgtccatgatttactgatgtcaaagcgagggttatccatttcaaatggtcctatcaaggaatgcattcttcgtcacaagacacgcctgaacgccgagtttgtcaaactcaaggtgaaaaaaggggttaagagccatgaggagctggcattgaaaaatcctgtgtcgctccctcgctggcttcgaataaataccattaaaagcacaaaagacgaggttttgcaaggtttaggcttggataaagtcagttcaattgaggaactgggccccgacaaattttatattgatgattgtgttgaaaacttaatagccatcgatccatcatttcctatagttgaaaattcattgtacaaggaggggaaagtgattattcaggacaaggcatcttgttttcctgctgctgtattggccgggctaactggtcacgttggtgatataatagatggatgtgctgctccagggaacaaaactactcatttagctgcttgttttccaaaatctcatatatttgcatttgaacgtgacgcgaaaagagtgcagacacttcgaaaaatggtgggaatatcaggcgctaataatgtcaccatcgaacatcaagattttaccctaactgatcccaagagtgatctttaccgaaatgtcactcatatcctgcttgatccttcttgttctggttctggaattgtgagtcgtcaagactatctgctgggtaatgaacaagacgttacggaagataccgaaagacttgaaaatttgtgtagttttcagtctaccattttaaagcatgctttacaatttcctaactgccgccatgtcacatattctacatgttcagtgcaccgtttagaaaacgaacaagtagtatgtgaggttttgtcgcaagaacctgactggaaatgtaactctttgacaaaaactctacccaactggaaaactcgaggaattccagagtattgtgctcaaccttcaatggctgaaggaatgattcggtgtaaaccaggagccggaggtactattggtttttttgtagccaatttgtatcaccctcaaagagagcaagaaactttcaaaatgtataaaaatgatgatgataccaaaaagcgtaagcgcaaaaagaaaaagaaggaagtgaagaaaaaggctcgcatacaaggtgaagagtaa

SEQ ID NO: 59664 - protein, 455 aa, Schizosaccharomyces pombe 972h-
MDFYNHAANILSDLSKKKGSIKQLAFNSKKHDPKRTYALVCETLKYKPVLDEIIARSDCFLKENLARVLVHDLLMSKRGLSISNGPIKECILRHKTRLNAEFVKLKVKKGVKSHEELALKNPVSLPRWLRINTIKSTKDEVLQGLGLDKVSSIEELGPDKFYIDDCVENLIAIDPSFPIVENSLYKEGKVIIQDKASCFPAAVLAGLTGHVGDIIDGCAAPGNKTTHLAACFPKSHIFAFERDAKRVQTLRKMVGISGANNVTIEHQDFTLTDPKSDLYRNVTHILLDPSCSGSGIVSRQDYLLGNEQDVTEDTERLENLCSFQSTILKHALQFPNCRHVTYSTCSVHRLENEQVVCEVLSQEPDWKCNSLTKTLPNWKTRGIPEYCAQPSMAEGMIRCKPGAGGTIGFFVANLYHPQREQETFKMYKNDDDTKKRKRKKKKKEVKKKARIQGEE

SEQ ID NO: 59665 - DNA, 1302 bp, Drosophila melanogaster
  CDS (1)..(1302)
atgagtaaaaaaccgcattccataaaagttcccacccaatacagggcgactgccaagattttgaaggcggcactggagcagcagaagtgcatcaagaccctaatatttgcagagaagcatgcccgtacacgctctttgcatacggttctgaaaaaatttagcgaaaatcgtgtggcactggaaaaggccatcgaagagacaggactgctcagggacaatcccagttttgatcccagtttggccaagattctagtcaccgaactgctgtttggcaggaaggagctgaacggcgaaagcaaacccgtgcaaacggtgcgaagttacaaggatcgactgctaaattccatcagagatttcggtgtccagcgaaaagaacccaatcctcgatatgtgcgcatcaacacaaatctatacagcttggcggaggccttggactacctgcataaaagcgactggcggcgcaaggagctgcctgcggacgccagctatgcggattttctgactgccatcaaatcgctggcggagaacgagttcatgaccgatctgcacgttgagggtgtgctcatttttcctgccaagtggtccaactactgggtccgccatccgttggtgcacagcaagaggtttatactgcagaacaaggccacctgtttggccgccgaactacttgctccgccgtctggggccactgtgctggatatgtgcgcagctcccggtatgaagacagtgcacatatgcaatgtgatgcagaacaagggatgcatctactccgtggagcaggaccacgtacgctacaatacgctgtgcgaaataacaaaggatgctggttgcgatattgtaaaacccattttgggagacgccttgaacctaacacccgaacgctttccggacgtagagtacatcctggtggaccctagttgctctggcagcggaatgcaaaaccgcatgaccgtgtgcgacgagccgaaggaggacaagcggctgcaaaagctgcagggtttgcaaattaagatcctgtcgcacgcgatgggcgcctttccgaacgtcaaacgcattgcctactgcacgtgttcgctgtggaaggaggaaaacgagcaggtggtgcagcgttgtcttcagctaaatccatccttcaagctgctcagctgcaagaaggccttgcgcaacaagtggcacaatgtgggcgacaaggactatcccaatattggcaagaacgtcctgtattgccagccggacagtgatcttaccgatggcatcttcctggcccttttcgagaaacgccgcgagggcgaaaaggattag

SEQ ID NO: 59666 - protein, 433 aa, Drosophila melanogaster
MSKKPHSIKVPTQYRATAKILKAALEQQKCIKTLIFAEKHARTRSLHTVLKKFSENRVALEKAIEETGLLRDNPSFDPSLAKILVTELLFGRKELNGESKPVQTVRSYKDRLLNSIRDFGVQRKEPNPRYVRINTNLYSLAEALDYLHKSDWRRKELPADASYADFLTAIKSLAENEFMTDLHVEGVLIFPAKWSNYWVRHPLVHSKRFILQNKATCLAAELLAPPSGATVLDMCAAPGMKTVHICNVMQNKGCIYSVEQDHVRYNTLCEITKDAGCDIVKPILGDALNLTPERFPDVEYILVDPSCSGSGMQNRMTVCDEPKEDKRLQKLQGLQIKILSHAMGAFPNVKRIAYCTCSLWKEENEQVVQRCLQLNPSFKLLSCKKALRNKWHNVGDKDYPNIGKNVLYCQPDSDLTDGIFLALFEKRREGEKD

SEQ ID NO: 59667 - DNA, 1398 bp, Mus musculus
  CDS (1)..(1398)
atggggctgtacgcggccgccgcggcggtgctggccggcgtggaaagccgccagggctccctcaaggggttggtgtattccagcaacttccagaacctgaagcagttgtacgctctggtgtgcgagacgcagcgctactcggccgtgctggacgctgtcatcgccagtgctgggctccttcgcgccgagaagaagctgagaccgcaccttgccaaggtgctagtgtatgaattattgctggggaaggggtttcgagggggtggaggccgatggaaggctctgctgggccggcaccaggcaaggctcaaggctgagctggcccgactcaaggttcatcggggtgtgagccgaaatgaggacctgttgcaagagagctccagacctggccatgcctaccaggtaccacggttcgtgcgtgtgaacacgctcaagacccgccctgaggatgcaatcgattatttcaagagacaaggtttctcctaccagggtcgggcttccagcctggaagacttgcgagctctcaaggggcagcattttcttttggatcccttgctgcctgagcttcttgtatttcctgcacagacagatctgcacgagcatccactctaccgtgctggccatctcatcctgcaggacaaggccagctgcctcccagccatgctgctgtcccccccgccaggctcccatgtcattgatgcctgtgctgcccctggtaacaagaccagctacattgcagcccttctaaagaaccaggggaagatctttgctttcgaccaggacgctaagcggctggcagccatggcgacgttggtggctcgggctggggtctcttgctgcgagttagcagagaaggacttcctgacagtctctccctctgaccagcgttacagccaggtccagtacatcttgctggatccttcttgtagtggctctggcatgctgagccggcagctggaggaacatggggaaggcacacctagcaaggagcgcttgcaggccttggccgggttccagcagcgggctctgtgccatgcacttaggttcccctctctgcagcgcctagtctactccacgtgttccctttgccaagaagagaatgaagacgtggtccaggaggctctacagcacaactcggggacattcaggttggctcctgtcctacccacatggcctcaccgaggtctgagtacctttccagggtctgaacactgcctccgggcttcccctgagaccacgctcactggtggcttcttcattgctgtgtttgaacgtgcagaggtggtaccaaccccagccccacagaccgatgcaatggatccagaacctctcagccaagtcccaaagagaaagagaagacgcaaagcagcagttggtgccagcatgcagccaagcacatag

SEQ ID NO: 59668 - protein, 465 aa, Mus musculus
MGLYAAAAAVLAGVESRQGSLKGLVYSSNFQNLKQLYALVCETQRYSAVLDAVIASAGLLRAEKKLRPHLAKVLVYELLLGKGFRGGGGRWKALLGRHQARLKAELARLKVHRGVSRNEDLLQESSRPGHAYQVPRFVRVNTLKTRPEDAIDYFKRQGFSYQGRASSLEDLRALKGQHFLLDPLLPELLVFPAQTDLHEHPLYRAGHLILQDKASCLPAMLLSPPPGSHVIDACAAPGNKTSYIAALLKNQGKIFAFDQDAKRLAAMATLVARAGVSCCELAEKDFLTVSPSDQRYSQVQYILLDPSCSGSGMLSRQLEEHGEGTPSKERLQALAGFQQRALCHALRFPSLQRLVYSTCSLCQEENEDVVQEALQHNSGTFRLAPVLPTWPHRGLSTFPGSEHCLRASPETTLTGGFFIAVFERAEVVPTPAPQTDAMDPEPLSQVPKRKRRRKAAVGASMQPST

SEQ ID NO: 59669 - DNA, 1401 bp, Homo sapiens
  CDS (1)..(1401)
atggggctgtatgctgcagctgcaggcgtgttggccggcgtggagagccgccagggctctatcaaggggttggtgtactccagcaacttccagaacgtgaagcagctgtacgcgctggtgtgcgaaacgcagcgctactccgccgtgctggatgctgtgatcgccagcgccggcctcctccgtgcggagaagaagctgcggccgcacctggccaaggtgctagtgtatgagttgttgttgggaaagggctttcgagggggtgggggccgatggaaggctctgttgggccggcaccaggcgaggctcaaggctgagttggctcggctcaaggttcatcggggtgtgagccggaatgaggacctgttggaagtgggatccaggcctggtccagcctcccagctgcctcgatttgtgcgtgtgaacactctcaagacctgctccgatgatgtagttgattatttcaagagacaaggtttctcctatcagggtcgggcttccagcctcgatgacttacgagccctcaaggggaagcattttctcctggaccccttgatgccggagctgctggtgtttcccgcccagacagatctgcatgaacacccactgtaccgggccggacacctcattctgcaggacagggccagctgtctcccagccatgctgctggaccccccgccaggctcccatgtcatcgatgcctgtgccgccccaggcaataagaccagtcacttggctgctcttctgaagaaccaagggaagatctttgcctttgacctggatgccaagcggctggcatccatggccacgctgctggcccgggctggcgtctcttgctgtgaactggctgaggaggacttcctggcggtctccccctcggatccacgctaccatgaggtccactacatcctgctggatccttcctgcagtggctcgggtatgccgagcagacagctggaggagcccggggcaggcacacctagcccggtgcgtctgcatgccctggcagggttccagcagcgagccctgtgccacgcgctcactttcccttccctgcagcggctcgtctactccacgtgctccctctgccaggaggagaatgaagacgtggtgcgagatgcgctgcagcagaacccgggcgccttcaggctagctcccgccctgcctgcctggccccaccgaggcctgagcacgttcccgggtgccgagcactgcctccgggcctcccctgagaccacactcagcagtggcttcttcgttgctgtaattgaacgggtcgaggtgccaagctcagcctcacaggccaaagcatcagcaccagaacgcacacccagcccagccccaaagagaaagaagagacagcaaagagccgcagccggtgcttgcacaccgccttgcacatag

SEQ ID NO: 59670 - protein, 466 aa, Homo sapiens
MGLYAAAAGVLAGVESRQGSIKGLVYSSNFQNVKQLYALVCETQRYSAVLDAVIASAGLLRAEKKLRPHLAKVLVYELLLGKGFRGGGGRWKALLGRHQARLKAELARLKVHRGVSRNEDLLEVGSRPGPASQLPRFVRVNTLKTCSDDVVDYFKRQGFSYQGRASSLDDLRALKGKHFLLDPLMPELLVFPAQTDLHEHPLYRAGHLILQDRASCLPAMLLDPPPGSHVIDACAAPGNKTSHLAALLKNQGKIFAFDLDAKRLASMATLLARAGVSCCELAEEDFLAVSPSDPRYHEVHYILLDPSCSGSGMPSRQLEEPGAGTPSPVRLHALAGFQQRALCHALTFPSLQRLVYSTCSLCQEENEDVVRDALQQNPGAFRLAPALPAWPHRGLSTFPGAEHCLRASPETTLSSGFFVAVIERVEVPSSASQAKASAPERTPSPAPKRKKRQQRAAAGACTPPCT

SEQ ID NO: 59671 - DNA, 1455 bp, Eremothecium gossypii
  CDS (1)..(1455)
atggagttctacagagatgccagttgggtgctagaatatatcgagcaagagtttgcacggaaaagcaaggtagctggatcgctgcacagccttgtactgcagagccataagaagtacaagctaaaaagcgacgtgcggcatgtgtacgctatcgttgcatcattctggaagtacaaggcatacctggatcgtattattgagaaaagtggcctgctgaaggacgtgcctcggaagaaaggggagccagcgttcaagcgctcgacgctgggcctggtggtacacgatctgctgctgtcgaagaagaagcggatccacatgggcaagcacccgctcaaggcgtttgtgctgaagcaccagaccaggctgcggggggagtacgcaaagcagctggtgaagctcggcgtcgcggacctgtcggtgctggtgcaggacgagcgggaggacgctacgcctgtccgctggataaggctgaacccgttccggatccgcgggcagcgcgaagaggtactacaggagctgcagaagaagtttcctcgccgcgttgcggactggagagagctcacccccggaagcatatacgaagatgaatatgtggcgggcctctatggagtacatcctgcggacaaaattacctcacacgagctgtacaagagagggaagatcatcatacaggaccgtgcatcgtgctttcccgcgcagatccttgcccctgggcgctcggacgttattatcgatgcatgtgctgctcctggtaataagacgactcacgtcgcagcgcatatctttccagagggaggggcagatcatgctcagatccacgcctttgagcgtgacccgcagcgtgcaaagacattgaggaagatgattgctacagcaggatgtgacaatgccattgaggtccatgttggcgacttcacacgagatgcgcaaccggagatattcaagaatgtgacgggattcattgtagaccccagctgctctggcagcggcatttttggtcgccaacttgtagatgccacgcaggagactcagaaggggacagagaccgatccttctgcggatgtgccggaagaggaaacgtttgaggccacaaagagcgcagtagagctgaagaacagactggcgaagttatcctcgttccaatttcaaatagtcaaacatgcgatgagctttcctagcgccaaaaagctaatttatagcacctgctccgtacatgccgaggagaatgaacgagtagtaattgatctccttctggatagtaaggtccagaaaggtggctggaaggttgcttcgcgctccaaggttatacctgcctggcctagaagaggacaccaagctgagtttgaggaagtcttccctgatcaggccgaggaattggccggcggttgcatcagagtgctgccgaaggaagacggtgggatcggcttctttgcggtgtgttttgagagagaataa

SEQ ID NO: 59672 - protein, 484 aa, Eremothecium gossypii
MEFYRDASWVLEYIEQEFARKSKVAGSLHSLVLQSHKKYKLKSDVRHVYAIVASFWKYKAYLDRIIEKSGLLKDVPRKKGEPAFKRSTLGLVVHDLLLSKKKRIHMGKHPLKAFVLKHQTRLRGEYAKQLVKLGVADLSVLVQDEREDATPVRWIRLNPFRIRGQREEVLQELQKKFPRRVADWRELTPGSIYEDEYVAGLYGVHPADKITSHELYKRGKIIIQDRASCFPAQILAPGRSDVIIDACAAPGNKTTHVAAHIFPEGGADHAQIHAFERDPQRAKTLRKMIATAGCDNAIEVHVGDFTRDAQPEIFKNVTGFIVDPSCSGSGIFGRQLVDATQETQKGTETDPSADVPEEETFEATKSAVELKNRLAKLSSFQFQIVKHAMSFPSAKKLIYSTCSVHAEENERVVIDLLLDSKVQKGGWKVASRSKVIPAWPRRGHQAEFEEVFPDQAEELAGGCIRVLPKEDGGIGFFAVCFERE

SEQ ID NO: 59673 - DNA, 1308 bp, Danio rerio
  CDS (1)..(1308)
atggcactttatttaaaagcggcagagattcttgagaaagtggagcagaaaagaggagcggtgaaaactctggtttatgacagtaaatttccaaatatcaagcagctctttgcacttgtgtgtgaaacacagaaatactcctcagttctgcaggagatcatcaacagcacaaagcttttaaaagaaaccaaactccggattcatttagccaaggtactggtgtatgacctgctcattggtcatggggtaaaatgcggaggcgcctggaagacgacgatgttaaagcatcgcgccagactacaagctgctctggccagaatcaaaatcaagaggaaagtgagtcgaaatcaggaccttctgccctccagcatccagcagacacagaatgatgtaattcctcgatatgtgcgagtgaacacgctgaaaacatctctggaagatgtcatcgactatttaaaacgagagggcttttcgtatcaagggacgccaggacggcttgaggatctcgatcgtctgtcggggaagatgtttctgtgtgatctccacctcaaagatcttctggtcttcagtggaaaaacagacttccatgatcacttcctgtataaagcaggacacattatattacaaggcaaggccagttgtcttcctgctttcctcttaaaccctccagtcggcagtcatgtcattgatgcttgcgcagctccaggaaacaaaaccagccatctagcagccataatgaaaaataaagggaagttgtttgccttcgatctggatgccaaacgtctgtccaccatgagcactcttctgctccgtgctggagtcacatgtcacaaactggccaatcaggatttcctcaaagtagatccacaaaactctgagtacaaggaggtcaagtacatccttctggacccgtcctgcagcggatcagggatggtttgtctgcgggacgagctccccgagacacaggaggacggtcgtctgcaggctctggctgcgtttcagcttcactgtctgtatcatgctctgcagtttcctcagctggagcggatcgtctattcaacctgctccatccactcgcaggagaacgaggaggttgtgacggcctgcttacagcggaaccctggattcagattagtgcatcttcttccagactggcctgagaggggtcatgagcctttgacccagtgtcttcgcgcgagcacagcaaaaacccgcactcatgggttcttcgtggccatgctggagagacgccctgcgcagtcagataaagaaacccccccctgtcaacacaccattgtcatctgctag

SEQ ID NO: 59674 - protein, 435 aa, Danio rerio
MALYLKAAEILEKVEQKRGAVKTLVYDSKFPNIKQLFALVCETQKYSSVLQEIINSTKLLKETKLRIHLAKVLVYDLLIGHGVKCGGAWKTTMLKHRARLQAALARIKIKRKVSRNQDLLPSSIQQTQNDVIPRYVRVNTLKTSLEDVIDYLKREGFSYQGTPGRLEDLDRLSGKMFLCDLHLKDLLVFSGKTDFHDHFLYKAGHIILQGKASCLPAFLLNPPVGSHVIDACAAPGNKTSHLAAIMKNKGKLFAFDLDAKRLSTMSTLLLRAGVTCHKLANQDFLKVDPQNSEYKEVKYILLDPSCSGSGMVCLRDELPETQEDGRLQALAAFQLHCLYHALQFPQLERIVYSTCSIHSQENEEVVTACLQRNPGFRLVHLLPDWPERGHEPLTQCLRASTAKTRTHGFFVAMLERRPAQSDKETPPCQHTIVIC

SEQ ID NO: 59675 - DNA, 1452 bp, Danio rerio
  CDS (1)..(1452)
atggcactttatttaaaagcggcagagattcttgagaaagtggagcagaaaagaggagcggtgaaaactctggtttatgacagtaaatttccaaatatcaagcagctctttgcacttgtgtgtgaaacacagaaatactcctcagttctgcaggagatcatcgacagcacaaagcttttaaaagaaaccaaactccggattcatttagccaaggtactggtgtatgacctgctcattggtcatggggtaaaatgcggaggcgcctggaagatgacgatgttaaagcatcgcgccagactacaagctgctctggccagaatcaaaatcaagaggaaagtgagtcgaaatcaggaccttctgccctccagcatccagcagacacagaatgatgtaattcctcgatatgtgcgagtgaacacgctgaaaacatctctggaagatgtcattgactatttaaaacgagagggcttttcgtatcaagggacgccaggacggcttgaggatctcgatcgtctgtcggggaagatgtttctgtgtgatctccacctcaaagatcttctggtcttcagtggaaaaacagacttccatgatcacttcctgtataaagcaggacacattatattacaagacaaggccagttgtcttcctgctttcctcttaaaccctccagtcggcagtcatgtcattgatgcttgcgcagctccaggaaacaaaaccagccatctagcagccataatgaaaaataaagggaagttgtttgcctttgatctggatgccaaacgtctgtccaccatgagcactcttctgctccgtgctggagtcacatgtcacaaactggccaatcaggatttcctcaaagtagatccacaaaactctgagtacaaggaggtcaagtacatccttctggacccgtcctgcagcggatcagggatggtttgtctgctggacgagctccccgagacacaggaggacggtcgtctgcaggctctggctgcgtttcagcttcactgtctgaatcatgcgctgcagtttcctcagctggagcggatcgtctattcaacctgctccatccactcgcaggagaacgaggaggttgtgacggcctgcttacagcagaaccctggattcagattagtgcatcttcttccagactggcctgagaggggtcatgagcctttgacccagtgtcttcgcgcgagcacagcaaaaacccgcactcatgggttcttcgtggccatgctggagagacgccctgcgcagtcagataaagaaaacccccctgtcaacacaccattgtcatctgctagtcaggaaaaacaggacaaacctcaatcaaatccatctgatgaagaacaggagaacatggagacctcaaatgagcaaccggctaatccaagctcaaagaagaagcggaagaggaacagaaagaagcacaaaaagcaggaatcctga

SEQ ID NO: 59676 - protein, 483 aa, Danio rerio
MALYLKAAEILEKVEQKRGAVKTLVYDSKFPNIKQLFALVCETQKYSSVLQEIIDSTKLLKETKLRIHLAKVLVYDLLIGHGVKCGGAWKMTMLKHRARLQAALARIKIKRKVSRNQDLLPSSIQQTQNDVIPRYVRVNTLKTSLEDVIDYLKREGFSYQGTPGRLEDLDRLSGKMFLCDLHLKDLLVFSGKTDFHDHFLYKAGHIILQDKASCLPAFLLNPPVGSHVIDACAAPGNKTSHLAAIMKNKGKLFAFDLDAKRLSTMSTLLLRAGVTCHKLANQDFLKVDPQNSEYKEVKYILLDPSCSGSGMVCLLDELPETQEDGRLQALAAFQLHCLNHALQFPQLERIVYSTCSIHSQENEEVVTACLQQNPGFRLVHLLPDWPERGHEPLTQCLRASTAKTRTHGFFVAMLERRPAQSDKENPPVNTPLSSASQEKQDKPQSNPSDEEQENMETSNEQPANPSSKKKRKRNRKKHKKQES

SEQ ID NO: 59677 - DNA, 2193 bp, Neurospora crassa
  CDS (1)..(2193)
atgtccctctaccacgagacagccgccatcctgacggccgctggtcccaacgccacccacggcggcagtctcaagtctcgcattttcaaagacaaatccctcaagtcgcctcccgcccaagtctacgcactagcccttgaaaccagcaaatggtccgccatcctcaaagaagtcgtcgaggcctcggacctgctcaagcacgagcgaaaactcacgcccgctctctccctcttgctcgtgcacgatttgctgctttccaaatcgggtatcgccctgcccgccacccacggcttgcgggtctccattgaacgacacaaggcccgtttgaactcggagtttgtccgcgcgcgcatacggcgcaaatgtgctacactggatgcgctgcggacgcaggtagagattggcgctaggggaggatgtcccgtgcatccgcggtggatcagggtgaacacgctgaaatcgacggtggaagaacagttggctacgacgttcaaggggtgggaggtggtggagagcgtggccgaggtgatccaggcggccgatgctttcgatgggcagggaaagaagggaaaaaaggtgattcacattgatggacacattcccaatctcattgccgcctgtcccggggtagcggatttcacaaagacggaggcgtacaagtccggcaagattatcttgcaggataaagcttcgtgtttccccgcttatctgctggatcctagaccggagagagatggagatgtcatggatacgtgcgcggcgccggggaacaagacgacgcatttggcagcgattgtgcattcacgggtggaggacaataaggcgattgtctttgatggtaaaactggcaagaaaggaaacaagaagaagaggggagaagaagagcaaaaggggacgacgacgacgaccatattcgcattcgaaaaagaccctcaccgcgccaaaaccttacagaagatggtcaaaaccgccggatccgacaccttcactgtcgtcaacgccggtaaagactttctcaaggtcaaccctttggatgccaagtaccgaaacgtcggggctttacttcttgatccttcctgctctggttcgggaattgtggggagggatgatgctcccactctccaccttccctctgctccttcctcctcttcctcttcctcttcctcttcctcttcctcctcctccaccaacaccaacaccaaagccaatcccaaaggcaaacaaaataacaacaagcgcaagtctccgccaactaccacaggtacaacagagacccaagaacccccagccaaggtcctgatcgacgacgacggcgtcgccatccccgtctcctcccaggccgacctcgaagcgcgcatcgcctcgctcgcctcgtttcagctgaccctgctgcaacacgccatgtcgtttcctgctgccagacgcatcacgtacagcacttgctcgatccacgcgggggagaacgagcacgtggttttgcgggctttggcttcggatgttgcgaaaaggagagggtggagggtgttgaaacgccaagagcaggtggaggggatgaggaggtgggatgttcggggagaagccgaggcgatgaccttggaggagggaatcacaacagaaggggtaatggaagaaaaagaaaaagaaaaggaggaggtcagggatgcggttatcagggcttattatcgggatgatggtaggggcgtcatggggttctttgtggcggggtttgtgagggacgggactattgatgatccggtctatcttctagatggtgtggagcagcagcagcagcagcaagagggcgaagaggaggaagaagaacaagaagaccccgaaggaccgtttgtgagggatgagcaaggacggattgtcagagacgaaaatgggattcctacgttgaagagcacggggaagaaggcggtggatttgaaagagttggagggcgatgaagagagttcggtggagtatcgtattgaggggcaagaagaggaagatgaagaggagccgtaccagagggatgggaaggggaatcttgtgagggatgacgaggggttgccggttttgaaggaggggaggagatggaaggttgtcaagggggggaaggggcagaaagcagagggggtgagtgatgagagcgaggaggaggaggagggtagtgaggatggtgatgaatggggtggttttgatgattag

SEQ ID NO: 59678 - protein, 730 aa, Neurospora crassa
MSLYHETAAILTAAGPNATHGGSLKSRIFKDKSLKSPPAQVYALALETSKWSAILKEVVEASDLLKHERKLTPALSLLLVHDLLLSKSGIALPATHGLRVSIERHKARLNSEFVRARIRRKCATLDALRTQVEIGARGGCPVHPRWIRVNTLKSTVEEQLATTFKGWEVVESVAEVIQAADAFDGQGKKGKKVIHIDGHIPNLIAACPGVADFTKTEAYKSGKIILQDKASCFPAYLLDPRPERDGDVMDTCAAPGNKTTHLAAIVHSRVEDNKAIVFDGKTGKKGNKKKRGEEEQKGTTTTTIFAFEKDPHRAKTLQKMVKTAGSDTFTVVNAGKDFLKVNPLDAKYRNVGALLLDPSCSGSGIVGRDDAPTLHLPSAPSSSSSSSSSSSSSSSTNTNTKANPKGKQNNNKRKSPPTTTGTTETQEPPAKVLIDDDGVAIPVSSQADLEARIASLASFQLTLLQHAMSFPAARRITYSTCSIHAGENEHVVLRALASDVAKRRGWRVLKRQEQVEGMRRWDVRGEAEAMTLEEGITTEGVMEEKEKEKEEVRDAVIRAYYRDDGRGVMGFFVAGFVRDGTIDDPVYLLDGVEQQQQQQEGEEEEEEQEDPEGPFVRDEQGRIVRDENGIPTLKSTGKKAVDLKELEGDEESSVEYRIEGQEEEDEEEPYQRDGKGNLVRDDEGLPVLKEGRRWKVVKGGKGQKAEGVSDESEEEEEGSEDGDEWGGFDD

SEQ ID NO: 59679 - DNA, 1758 bp, Magnaporthe grisea 70-15
  CDS (1)..(1758)
atgcggaggatggacgccacgcattcgttcagcgtggcggataagcttagtggcaaagaaaaggaaccgcttgagtactcggacaagaccgaaggctatgatgctcaataccgaacaagcacctacctaggcggaagtctcaagtctcgggtgtttggcgcaaaaaacctcaagtcaccccccgcccaagtctatgccttggcgctggagacgtgcaaatggagcgccatactcaaggaggttgttgacagctcacagctgctaaatcatgagcgcaagctgacgccccctttggccctcctcctcgcccatgaccttctactcgccaaaggcggcgtcgctctgccggcctcgcacggtctgcgcgtcaccattgagcgccacaaggcccgcctgtcatcagagctcacgcgcgcccgcatcaggagaaaggcccctacgctcgacgctctcaaggcccaggtcgatgaggcgacgtcgtccgaagccggccatccacgctgggtgcgcgtaaacaccttgaggtcgacgcttgctgagcagctcgagatcactttttctcgctactcaaaggtcgactccgtactggatgtcgtcactaagggtagcggtaacggcgggccttcttgcaaccgcatctacctggatgagcacgtgccaaacctggtggccatctcgcctgggtcggatatcaccaagacagaggcgtacaagtctggcgccgtaattttacaggacaaggcgtcgtgctttcctgcttacctgctggatccgcgaccagaggatggagatgtcattgacgcatgcgctgcccctggaaacaagacgacgcacgcggccgcggttctagaggagtaccgtactgcggtaaacgtgaaggaatccaaggggtctcgatctacggtacatgcctttgaaaaggactcgaggcgcgccgagatcttggccaagatggtcaagatcgcaggctcagattcgttcaccgtcgtgaataagggcaaggactttatgaaggcagacccaaacagccctctctacaaagacgtggccgctctgctcctagacccgagctgttccggcagcggtattgtaggccgtgacgacgccccggagctgcatctccctgatgctcccgggtcggcaaaaaagagtcagagcaacagcaaaggaggcaaacggaagcgccaagatgagcaggaccgcaagagcaaaaagaataaacccaatgaacaggaaggcgagcaagaggaagcgggtcgtacctttgtagatgacgagggacagacgacaatggcatcgtcggcagccgacctcgccgcgcgcctggccgcgctctcgtccttccaggccacgctgctcgagcacgccatgaaattcccaagcgccaagcgcatcacctactcgacctgctctattcacgccgaggagaacgagggcgtagtgctcagaacgttgaagagaaacccaggctggaggatcatgaagagggaagagcaggtcgacggcatgcagaggtggcccgtacggggagaggtgcagttttgtgagggcgacaaggagatcgccgaaggatgcatcagggcgtacaagggtgatgggcatggtgtcatgggattctttgtcgccgctttcgtgcggaacgaagacgggcaagccacacctgcacctgcaccagtgcctacgccagatacccacagtggtgcggtggatgaggaaaacgatagggacgacgacgaatggggtggctgtagtgactag

SEQ ID NO: 59680 - protein, 585 aa, Magnaporthe grisea 70-15
MRRMDATHSFSVADKLSGKEKEPLEYSDKTEGYDAQYRTSTYLGGSLKSRVFGAKNLKSPPAQVYALALETCKWSAILKEVVDSSQLLNHERKLTPPLALLLAHDLLLAKGGVALPASHGLRVTIERHKARLSSELTRARIRRKAPTLDALKAQVDEATSSEAGHPRWVRVNTLRSTLAEQLEITFSRYSKVDSVLDVVTKGSGNGGPSCNRIYLDEHVPNLVAISPGSDITKTEAYKSGAVILQDKASCFPAYLLDPRPEDGDVIDACAAPGNKTTHAAAVLEEYRTAVNVKESKGSRSTVHAFEKDSRRAEILAKMVKIAGSDSFTVVNKGKDFMKADPNSPLYKDVAALLLDPSCSGSGIVGRDDAPELHLPDAPGSAKKSQSNSKGGKRKRQDEQDRKSKKNKPNEQEGEQEEAGRTFVDDEGQTTMASSAADLAARLAALSSFQATLLEHAMKFPSAKRITYSTCSIHAEENEGVVLRTLKRNPGWRIMKREEQVDGMQRWPVRGEVQFCEGDKEIAEGCIRAYKGDGHGVMGFFVAAFVRNEDGQATPAPAPVPTPDTHSGAVDEENDRDDDEWGGCSD

SEQ ID NO: 59681 - DNA, 1737 bp, Gibberella zeae PH-1
  CDS (1)..(1737)
atgtctctttatcatgaggctgctgagatcctgacagggtcttcttctgaaggcggaagtctcaagtcccgtgttttcaaaaagaagggcctcaagtctgctcccaaccaggtctacgccttagtcttggagagctgcaaatggagtcctatcctcaaagaagtgattgagaaatcagaacttctcaaattagagcgaaagcttacaccaacattgtcattgcttcttgtccatgacctcctgctggccaagaagggaattgcgcttccacaaggccatggcctacgcgcatctatcgagaggcacaaagcgcgcattagctcagaatttaagcttgcgcgacttcgcagaaagatgcccacactcgaggctctaaaagggcaggttgagagggaatgcgcaggcgaggaaacgaactaccctcgatgggttcgtgtcaacgccgtgaagagcacattggaagagcagctcgagaccactttctccaagtacaccagagctagatctatcaacgaggttgttaccaatgctggaagactcatatacatcgactcacacgtaccgaatctcgtggcaatcaccgcaggtatcgatctcaccaaaacagaggcctatacatctggcaaaatcattctccaagataaagcatcctgctttccggcctacctcttggatcctaggtcagaagatggagatctgatcgatgcgtgctccgcccctggcaataagacaacacatctggcagctatcgtcaagcaacatacacccgaattcgacacaccagcgcaaaccatttatgcattcgagaaagattccagaagatcgcaggtacttcacaagatggtcaaaatagctggctcagattatatgacaaagattggatttggtcaagatttcatgcaggtgaaacccacagcagacaactacaagtcagtcggagcattgctactagatcccagttgttcaggaagtggaatcgttggccgagattcgatgcctgatcttcatctgccagagccttacagcggtaacggaaaaacgccaccagcaaaaccaaacaaccgtaagaggaaacacgaaaaggtcgagccagcccctgaaaatgtcatgatagatgacgatggaaatgaaatggcgatcaaatccgagaaggacctagaaacacgtctcgaggctttatcatccttccagttggtccttctattacatgctttccggttcccatcagcaaagaagatcacatactcaacttgttctgttcacgtgcaagaaaacgagcgcgttgtcatgagagctctcgaatctgacattgccaaaagaagaggctggcgtattcttcaacgaaaggaccaggtttctggcatgagagaatggcctgttcgtggactacccgaagcatgcgaaggagacaaggaaatagcggaaggctgcattcgctcttacaaggatgatggacagggtgtaatgggattcttcgtcgctggctttgtccgatctggcgagcaagatgatgctcctgccgatgatgagggtccttatatgagagatgacagcggtgtcatcattcgtgatgtggttggcatgcccgtgttgacgtcgacaggcgaggccgtttctttgaccccaagaaatgagaagagcaatgacagcgatgaggagagtagtgaagaggaggaatctgcaagtgagagtaacagcagtgatgaggatgatgaatggggtggtttcgacgattga

SEQ ID NO: 59682 - protein, 578 aa, Gibberella zeae PH-1
MSLYHEAAEILTGSSSEGGSLKSRVFKKKGLKSAPNQVYALVLESCKWSPILKEVIEKSELLKLERKLTPTLSLLLVHDLLLAKKGIALPQGHGLRASIERHKARISSEFKLARLRRKMPTLEALKGQVERECAGEETNYPRWVRVNAVKSTLEEQLETTFSKYTRARSINEVVTNAGRLIYIDSHVPNLVAITAGIDLTKTEAYTSGKIILQDKASCFPAYLLDPRSEDGDLIDACSAPGNKTTHLAAIVKQHTPEFDTPAQTIYAFEKDSRRSQVLHKMVKIAGSDYMTKIGFGQDFMQVKPTADNYKSVGALLLDPSCSGSGIVGRDSMPDLHLPEPYSGNGKTPPAKPNNRKRKHEKVEPAPENVMIDDDGNEMAIKSEKDLETRLEALSSFQLVLLLHAFRFPSAKKITYSTCSVHVQENERVVMRALESDIAKRRGWRILQRKDQVSGMREWPVRGLPEACEGDKEIAEGCIRSYKDDGQGVMGFFVAGFVRSGEQDDAPADDEGPYMRDDSGVIIRDVVGMPVLTSTGEAVSLTPRNEKSNDSDEESSEEEESASESNSSDEDDEWGGFDD

SEQ ID NO: 59683 - DNA, 1773 bp, Ustilago maydis 521
  CDS (1)..(1773)
atggcggacttttatgttcggtcggctcaagcgcttgaccaggtgcttggggatgagtgttcggtgaaagcagcagctggggcgcatgctgattcggggcgggtgttggcgatcgtgatcaactcgttggcgtatcgaagtgcacttatgcacgcaatcgatgagtgccgggtggcgaagctcgaggaacgcatttttacgcttgctgctactcctgctcgtgctcgtgcgtcgagtgtcaaagacaagaacaagccaggcaaacagcaaggtaagaaggcggctggcaagtatcctagcaagcaagcacttttgctggttctgtgccacgatctgctgtttcaagcgcgaggcattcaggcgagcaagacgtggccacccaagctcacactcgagcggtatcgaccttcgcttcacagcgcgttggtcaaacttcagatccgactcggcaaatcgcggatacaggacctgcgttctggcgcgctgtacgagcagatgaccgcacgcatcccgcgatggattcgcatcaacccgctacgcgcaactcgcgaccaagtgttgcagtggctctcggacaaccgctacacgcaggtggatgtgcgagatgacgagatcggcggtatcaaacagtttgccgagtcaactcatgttgctggattgctcgcgtttcatccgaaagctaccagtgctctgctgaaaagcgaaatgtaccgcgaaaactggatcgtgatgcaagacctggcgagctgcttcccggcctacatcctggatccgcctgcgggcagtagtgtgattgacgctaccagtgctccgggcaacaagacaagccatctttctgccatcatgcattccaaatctggctcgacaagagaaaacggccgtattgatgcgtttgaacgagacgcggcccgatacaaaacgctcgtcaaacgactcgatgcagtgggtgcgcttgcattgcctcggccacagccaacacagcacggaaacgtaactgcacacagaagagactttctcacaaccaacccggacgactttccgaatgtaacgcacatgctgctcgatcccagttgcagcggtagtggcatcgtcaaccgtctcgactttctcaaagaagacgatgatgtcgaacacgatcccctagacgccgatgctctcgattccgacaccaccaccaagctcgccagacggcttcgacagctctcggaattccagcaactcatgattcgacatgctttcaaattccccgcgctgcgaaaggtggtgtacagcacctgcagcgtgcatgcgcaagagaacgagctggtggtcatcaacgcactacagacgcatgaggcacaaagccgaggttggaaattagcaccacgcaaacacgtgatcccaacttggccggtcagaggcgataccgacgcgtgtacaggcaaacaccatgtggcggagagtgtgattcggtgcatacctggaggtaaaggggaaggcgacaagccgaatgtcgaaagctgcaacggctttttcgtcgcctgctttattcgagacgaccaaatccaacatgacgagcaagagactgctgcaaacaagaggcctttccaggagcaagatgacgtcgatgacgacggacaggcggaggacgaagcgcaagagccgcagcagcagcagcagcagcagcagcagcaaccacagtcaaagaacgccaacgcagccgccaaccgaaagaaaaagctacagaaacgacgcaagaagcagcgtcttgaatttcaacagcaacagttgtaa

SEQ ID NO: 59684 - protein, 590 aa, Ustilago maydis 521
MADFYVRSAQALDQVLGDECSVKAAAGAHADSGRVLAIVINSLAYRSALMHAIDECRVAKLEERIFTLAATPARARASSVKDKNKPGKQQGKKAAGKYPSKQALLLVLCHDLLFQARGIQASKTWPPKLTLERYRPSLHSALVKLQIRLGKSRIQDLRSGALYEQMTARIPRWIRINPLRATRDQVLQWLSDNRYTQVDVRDDEIGGIKQFAESTHVAGLLAFHPKATSALLKSEMYRENWIVMQDLASCFPAYILDPPAGSSVIDATSAPGNKTSHLSAIMHSKSGSTRENGRIDAFERDAARYKTLVKRLDAVGALALPRPQPTQHGNVTAHRRDFLTTNPDDFPNVTHMLLDPSCSGSGIVNRLDFLKEDDDVEHDPLDADALDSDTTTKLARRLRQLSEFQQLMIRHAFKFPALRKVVYSTCSVHAQENELVVINALQTHEAQSRGWKLAPRKHVIPTWPVRGDTDACTGKHHVAESVIRCIPGGKGEGDKPNVESCNGFFVACFIRDDQIQHDEQETAANKRPFQEQDDVDDDGQAEDEAQEPQQQQQQQQQQPQSKNANAAANRKKKLQKRRKKQRLEFQQQQL

SEQ ID NO: 59685 - DNA, 1737 bp, Aspergillus nidulans FGSC A4
  CDS (1)..(1737)
atgtcgctatactacgacgccgcgtcaattctcacgacgccctccactgctggtggttcatttaagtctcggctctacaactcccgcaaccttaaagcttctcccgcacaggtttacgcgctcatcaccgaagcagccaaatgggacatcctgctcaaggaagtaatcgaccaggctggaattctgaaacttgaacccaaggttgtccctcaccattgccctgtcctgctcaccccattgcttgctcttctcctcgtccacgaccatctcctcgcaaagaatggcatcgccgcgcccgcatcccacccgctccgtcaagcagttgaaaggcacaagattcgactgaagggggaattcacaaaagcgcgcgtgcggcgcgcctgcgcgacaattccggaactgaaggaggctgttcggaaagaaaaattagctgcgctgggggccaagggtagtagtggcgcggtctatccacgctgggttcgggtcaacaatgtacggacaacgatggaggcgcagttgaagaccacctttgcggcgttcgagaatgtcgagtcactggacggtctagtggttggtggagacgataagcagaagagaatgcggttagacccgcatatcccggaccttgtggctgttgcgcctggtgttgagttctcgagtacgccggcgtacaagaatggagagattatcctgcaagataaggcatcttgtttccctgcctatctgttgcttggcgatgactgggatgggcaaggtgatttggtagatggatgcgccgcgccaggcaataagactacgcatatggcttcgttgctccgcaaagctaagtccaagaagaaggcggagtcatcccgcatcatatccatggatgcctcctcaatccgcgcaaagaccctcaagaaaatggtctctatcgctggcgcagatagcttcaccagcgtccttcagggacaggactttctcgcacttgacccgcaagaccctcgctttaaggatgtcacaggccttcttctggacccttcctgctcagggagcggcatcatcggccgcgacgatgtcccccagctcgtcctccctgcgcctgggagacccaccccagcatcaggatcgaagaaccaaacccaaggtaaaaagcgcaagcgcaacgactcatctggatcctcctccaaccaaccctccacaccctcatcattaacatcagcagcaacgccgtcaacatccgaaaacgacactcccatttccgaaataactcaagatcgcctcctcaaactctcaaaccttcagttccgaatcgtcacacatgcactcgccttccccgccgctaggaaggtgacatacagcacgtgctcaatccatcttctcgagaacgaggccgtcgtgcaacggatactggaaagtgatattgcgaagcggagaggatggagagttctcaggcgggatgagcagcctgaaggcttgaagaagtggattcatcgcggtgtgaagcgagaggagccgagtgcggatggtgccattgagggtggtgaggtgaatttgtcggatgaggagttagggggttgtttgagatgttggcctggggatgaggaggggacaggcgggttctttgttgcggggtttgtgagggagggagatgatgatggttcaatggtagatgccgagaacgagagtgaggaccaggatagcattgaacaagagaatgaagatgaggatgaggaatgggagggattctccgattaa

SEQ ID NO: 59686 - protein, 578 aa, Aspergillus nidulans FGSC A4
MSLYYDAASILTTPSTAGGSFKSRLYNSRNLKASPAQVYALITEAAKWDILLKEVIDQAGILKLEPKVVPHHCPVLLTPLLALLLVHDHLLAKNGIAAPASHPLRQAVERHKIRLKGEFTKARVRRACATIPELKEAVRKEKLAALGAKGSSGAVYPRWVRVNNVRTTMEAQLKTTFAAFENVESLDGLVVGGDDKQKRMRLDPHIPDLVAVAPGVEFSSTPAYKNGEIILQDKASCFPAYLLLGDDWDGQGDLVDGCAAPGNKTTHMASLLRKAKSKKKAESSRIISMDASSIRAKTLKKMVSIAGADSFTSVLQGQDFLALDPQDPRFKDVTGLLLDPSCSGSGIIGRDDVPQLVLPAPGRPTPASGSKNQTQGKKRKRNDSSGSSSNQPSTPSSLTSAATPSTSENDTPISEITQDRLLKLSNLQFRIVTHALAFPAARKVTYSTCSIHLLENEAVVQRILESDIAKRRGWRVLRRDEQPEGLKKWIHRGVKREEPSADGAIEGGEVNLSDEELGGCLRCWPGDEEGTGGFFVAGFVREGDDDGSMVDAENESEDQDSIEQENEDEDEEWEGFSD

SEQ ID NO: 59687 - DNA, 1509 bp, Gallus gallus
  CDS (1)..(1509)
atggcgctgtacagcgcggccgctgctgtgctgagcgggctggagcgtggcgagggaggcctcaagaacctggtgtacggcagcgactttcctgtgcgcagcgggcacgcccggcagctgtacgcgctggtggccgagactctgcgctacggcccggtgctggaggcgctgctggacggagccgcgctgctgcgcgtcgagaagaaactgccgccgccgctggccaaggtgctggtgtacgacctgctcttcggcaagggtctcaagtgcggcggccgctggaaggcgttggcccggcggcaccgtgcacggctggaggccgagctggcccggctgaaggtgcggcgtggggtgccgcgttacgtccgggtgaacgtgctgaaaacgagcgtggatgatgtggtggaattcttcaagcgccatggttactccttcctgggcagagcgaacagagatgtgggatggagggatttctgcacctgggctctggagagctctggtgctgaatgtggcaaggctgagctgtgctcgtcctctgtccacgtgggcagtgtggaagagctgaaaacgctttctgggaagaaattcatgttggatcttcatctcccggagctgctcgtcttccctccgcagacggacttccacgacagccggctctatacatcaggacacatcatcctgcaggacaaggccagctgcttgccagccttcctcctcagcccttctgctggctcccatgtgattgatgcctgtgctgcccctgggaacaaaaccagccacctggctgccatcctgaagaacaaggggcatatctttgcttttgatgtggacaccaagcgcctggctaccatgaacaccatgctgatgcgggcaggggtcaccagcttcaagctggcccagcaggacttcctgacagttgatccccacgatcccaagtacagcaaagtgaaatatatcctcctggacccttcatgcagtggctcagggatggtggcccggctgccactggatgaggctgccccgagtgcggagcggctgcaggctctgtctggcttccagcgcaggatcctgagccacgcgcttcgcttcccggcggtgcagcgcctcgtctactctacctgttcagtgcaccaggaggagaacgaggatgtggtgcacgcagtgctacaggagcagggatcggccttcaggctagcaaacgtcttcccatcctggccctgccgaggacttgctaccttcccgggggctgaatgctgcctccgtgcctctcctgcagatacactcacacagggcttctttgtggctgtcctggagcgctgcggggaggaaactgctgtccccaggatggccacactcatggggccgggtgctaacacagccttgtgctctgcggagatggcaacgagtggctcgaagcagagggagtgcgttcaccaggccatgagattcaacagtggggaaagatttttgggcctggtgaagaccacatcccacggcagagaactgtga

SEQ ID NO: 59688 - protein, 502 aa, Gallus gallus
MALYSAAAAVLSGLERGEGGLKNLVYGSDFPVRSGHARQLYALVAETLRYGPVLEALLDGAALLRVEKKLPPPLAKVLVYDLLFGKGLKCGGRWKALARRHRARLEAELARLKVRRGVPRYVRVNVLKTSVDDVVEFFKRHGYSFLGRANRDVGWRDFCTWALESSGAECGKAELCSSSVHVGSVEELKTLSGKKFMLDLHLPELLVFPPQTDFHDSRLYTSGHIILQDKASCLPAFLLSPSAGSHVIDACAAPGNKTSHLAAILKNKGHIFAFDVDTKRLATMNTMLMRAGVTSFKLAQQDFLTVDPHDPKYSKVKYILLDPSCSGSGMVARLPLDEAAPSAERLQALSGFQRRILSHALRFPAVQRLVYSTCSVHQEENEDVVHAVLQEQGSAFRLANVFPSWPCRGLATFPGAECCLRASPADTLTQGFFVAVLERCGEETAVPRMATLMGPGANTALCSAEMATSGSKQRECVHQAMRFNSGERFLGLVKTTSHGREL

SEQ ID NO: 59689 - DNA, 1479 bp, Candida glabrata CBS138
  CDS (1)..(1479)
atggaattttatagggatagcacctgggttcttgagtacttggaaggccagatagaaaagacaggtagagtgtcaggttctttacaaacgattgtgctgcgatgctgtaagcagtacaggataaagaccaacccaaaacacatatatgcgattgtatcatcatgttggaagtacaagccttatttggataagataatgaaaaagtctggtctcttggatgctattcctaggaagaaaggtaagcctgcattctcgaaactaactttactcctactatgccatgatcttttgctgtctaaagctaaaagaattcagatgggtaaacacccgattaagaattatgtgctgaagtacaaaaatgcacttaatgcagaatttgtgaaactaaaaattaaattaaagatcacagatctaagtcaagtagttgacaaagatgatgccgcagatgatatgaccccagttcgttggattagaataaatccactaagaataagcaaccatgatactgatcaggttctcaacgaactgaagaaaaaatttcctaccagagtaaacacttggaaggatattataccagggtctatatactacgacgaatttatcccaaatttatatggtatacatatcagtgataaaattacgtctcatgaactatacaaacagggtaaaattattattcaagatagagcatcctgcttcccagcacatatattaaatccttctgctgatgacgttgttatcgatgcttgttctgctccaggtaacaagactactcatgttgccgcacacatattcggcgatcctgagaacccaaggaatgataatgtacagatttatgcgtttgagaaggatccggaaagggcccaaattctacaaaaaatgattaaaactgctggttgtcacaagaatattgatgtgaatgttggagacttcactcaaattgcgactccttctaaatattctgatgtcactgggttcatattggatcctagttgttctggaagtggtatatttggtagaaaatctgtggacatacttaataatcacggcaagaagtccaacgatgaagtacctgacgagaacgatgccgaggagactactgactctaaaaacgaacaattgaaggaaagactaagtaaattagcttcattccaatttcaaattgtcagacatgctatgagtttcccaaatgccaagaaaattgtatacagcacctgttctatccatgcagaggaaaacgaaagagttgttattgatttgcttctggataagaaagtgcaatcttggggctggagagtagcgaaaaaggaattagtattaccaacgtggtacagaagagggtttaaagaagaattccaagaggtattcactgacaaaacagaacaagaatgtcaggaattggcagatggttgtgttagggctttaccaaaagaggacggtggaatcggtttttttgctgtatgttttgttagggactga

SEQ ID NO: 59690 - protein, 492 aa, Candida glabrata CBS138
MEFYRDSTWVLEYLEGQIEKTGRVSGSLQTIVLRCCKQYRIKTNPKHIYAIVSSCWKYKPYLDKIMKKSGLLDAIPRKKGKPAFSKLTLLLLCHDLLLSKAKRIQMGKHPIKNYVLKYKNALNAEFVKLKIKLKITDLSQVVDKDDAADDMTPVRWIRINPLRISNHDTDQVLNELKKKFPTRVNTWKDIIPGSIYYDEFIPNLYGIHISDKITSHELYKQGKIIIQDRASCFPAHILNPSADDVVIDACSAPGNKTTHVAAHIFGDPENPRNDNVQIYAFEKDPERAQILQKMIKTAGCHKNIDVNVGDFTQIATPSKYSDVTGFILDPSCSGSGIFGRKSVDILNNHGKKSNDEVPDENDAEETTDSKNEQLKERLSKLASFQFQIVRHAMSFPNAKKIVYSTCSIHAEENERVVIDLLLDKKVQSWGWRVAKKELVLPTWYRRGFKEEFQEVFTDKTEQECQELADGCVRALPKEDGGIGFFAVCFVRD

SEQ ID NO: 59691 - DNA, 1476 bp, Kluyveromyces lactis NRRL Y-1140
  CDS (1)..(1476)
atggaattctaccgtgatgcaacctgggtattggaattcgtggaacaggagctctctaaagacaagagagttgcaggttcgttacagaccttggtacttactagttgtaaaagatataagctgaagacaaatcctcgtcacatttatgccattgttagtagtacatggcagtatagggaatatctagataaaatcattaagaagagcgggatcttggaggacgtaccgaaaaagaaagggaaaccgctgttcaataaggataccataaggctcctagtacacgaccttttactttcaaaatcgaagcggattcagatgggtaagcatcctatcaaaactttcattttgaagcatcagactaggttaaaggctgagttgacaaagctcaaagttaaacttaaagtcaccagtctgtcgcagttaatcaaaaccgatgatggagaagatgttacaccggttcgttggatcagaattaaccctatccttgtcaaggaaagatatgacgatgttcttgctgaattaaacaagaaattcccacaaagagtgaactcttggaaacaaatcgttcctgggagcatatattacgatgagtatattccaaacttgtttggcattcatccaggtgataagatcacttcgcatgagcaatataagagggggaaaattatcattcaagacagggcatcctgtttccccgcccacatcctcaatccaaacagtactgacgttgttatcgatgcatgtgcggctcccggcaataaaaccacacacgttgcggcacatatctttggagacgttgacaccaaggtcgattcagtcaagatacatgcttttgagaaggatcctgagcgtgcaaaaactttacagatgatggttgccaccgcgggttgtgctaagggggtcaagatacatgttggtgatttcacaaaacttggtaaaccagaacttttccagaatgtaactggattcatcgttgatccaagttgttctggctctggtatatttggccgtaaggcaattgataaagtaaacttgagcaagactgggtcatcaaacaccgatgaagatcagacctcggttgaacctgtggagcaagaaaaagaattgtttgaaaaggaacaagatttgaagaatagattagccaaattatcatctttccaataccaaattgtgaaacacgccatgtctttcccatctgctaagaaaatatgctatagtacttgttctattcatgctgaagaaaacgaaagagttgtcattgatttgctcttagactcaaaggtcaaggaatggggttggaaagtaagaaagagaaccggtgtaattccaacatggcctagaagaggatggaccagtgaatttgaagaggtgtttccgaaagaggaagcaaaagagttggcagaagggtgcatcagggctttaccgaaggaagatggtggcattggctttttcgccgtatgctttgagcgagattag

SEQ ID NO: 59692 - protein, 491 aa, Kluyveromyces lactis NRRL Y-1140
MEFYRDATWVLEFVEQELSKDKRVAGSLQTLVLTSCKRYKLKTNPRHIYAIVSSTWQYREYLDKIIKKSGILEDVPKKKGKPLFNKDTIRLLVHDLLLSKSKRIQMGKHPIKTFILKHQTRLKAELTKLKVKLKVTSLSQLIKTDDGEDVTPVRWIRINPILVKERYDDVLAELNKKFPQRVNSWKQIVPGSIYYDEYIPNLFGIHPGDKITSHEQYKRGKIIIQDRASCFPAHILNPNSTDVVIDACAAPGNKTTHVAAHIFGDVDTKVDSVKIHAFEKDPERAKTLQMMVATAGCAKGVKIHVGDFTKLGKPELFQNVTGFIVDPSCSGSGIFGRKAIDKVNLSKTGSSNTDEDQTSVEPVEQEKELFEKEQDLKNRLAKLSSFQYQIVKHAMSFPSAKKICYSTCSIHAEENERVVIDLLLDSKVKEWGWKVRKRTGVIPTWPRRGWTSEFEEVFPKEEAKELAEGCIRALPKEDGGIGFFAVCFERD

SEQ ID NO: 59693 - DNA, 1482 bp, Debaryomyces hansenii CBS767
  CDS (1)..(1482)
atgaaactatactttgaagcggagcaatttttgagtccttataaaggaaagggtataggtggaagcttgcagtctcgtatttttaatgaggcgaagttagtgaactctccaaaacacatttatgcattggtttattctactttaaagtataaagaacacatacaagcgattattcggaagtctaaaataaaacagacactccaaaccaagaaattgaaaatcagtgataacttgttgttgcttgttgtgcatgacttgttgtttaattctaaaggtaggattcaactggggaaacatcctattaaagatgctatcttgcagcataagactagattacaggcagagtttactaaacttaaattgaaatataaggcgaagtctgcggaggatttaccgacttctgtatctagtgacgatgagacacctattagatggttccgtgtgaacaccattaagacgacaccagagaagtttttccaggaccatccattttttgctaagctagagccgattagttcgattgagattaaggaaacggggtttatatatacggacgactatattcctaatttgtacggtatccatcctaaggagaagttgacgtccactgcagcgtaccttaagggtgaagtgatcattcaagacagagcctcttgtttccctgcgcatattcttaacgatgacccttcagataaccatatcgaaatcatcgattcatgtgctgcgccggggaacaaaactactcattgtgcatcatatttacccagatcagaagactctgtggtgtatgcatttgaacgggattcaaaccgtgtgaaggtgctaaagactatgtgcgaaaaagccactggaatcaaatataagaacttgattcagataacgcatgctgatttcacgtccacaaagccgcaagactttccttgcgttacaggccttgtagtagatccatcatgtagtggatcggggatttttggacgtgctatagaagatgcacaactgcaagaacaagaaaaggaagagatcgataccgaaagacttaataggttggcagggttccaattcaaaatcatgaaacacgccttgctgtttccaaaagccagaaaggttgtttattccacctgttcaattcacccacatgaaaacgaaagggttgttgttgacttattgatggataaggaaataaaagcatctgggtggcagttagcttctagagacattgttatttcagaatggcccaaaagaggttggaaagaagaattcaccgctgtatgtggggggaacgaggaagaatgcgaagctttagcgggcggttgtgttagagcaacaccaaaggaagatggaggaataggattcttcgcggcatgctttattaaaaaagatatatccgacgaagattccgagagacagaaagtaaataaagaagagaatgacatagatgaagaaaccgaagaacagggcgaagaatggtcgggatttgattaa

SEQ ID NO: 59694 - protein, 493 aa, Debaryomyces hansenii CBS767
MKLYFEAEQFLSPYKGKGIGGSLQSRIFNEAKLVNSPKHIYALVYSTLKYKEHIQAIIRKSKIKQTLQTKKLKISDNLLLLVVHDLLFNSKGRIQLGKHPIKDAILQHKTRLQAEFTKLKLKYKAKSAEDLPTSVSSDDETPIRWFRVNTIKTTPEKFFQDHPFFAKLEPISSIEIKETGFIYTDDYIPNLYGIHPKEKLTSTAAYLKGEVIIQDRASCFPAHILNDDPSDNHIEIIDSCAAPGNKTTHCASYLPRSEDSVVYAFERDSNRVKVLKTMCEKATGIKYKNLIQITHADFTSTKPQDFPCVTGLVVDPSCSGSGIFGRAIEDAQLQEQEKEEIDTERLNRLAGFQFKIMKHALLFPKARKVVYSTCSIHPHENERVVVDLLMDKEIKASGWQLASRDIVISEWPKRGWKEEFTAVCGGNEEECEALAGGCVRATPKEDGGIGFFAACFIKKDISDEDSERQKVNKEENDIDEETEEQGEEWSGFD

SEQ ID NO: 59695 - DNA, 1419 bp, Oryza sativa (japonica cultivar-group)
  CDS (1)..(1419)
atgccgccgccgccgccgtcgaagaaccgcggccacgttcccgcgccccggccgcctccgggcaagccgcctgggcgacggatggcgagccgggacgcggcggagcgggcggcgttcttcgcgcggcgcgaggcggccgcggtgctccgccgcgtgctccgcggggacgcgtccaggcgcgccgcgggctccatcaagtcgctcgtgtactccccctccgtccgcaacaagcgcgccaccttcgccctcgtctgccagaccctcaagtatcttccaattctaaaggaggttttagcatcaactggagtactaaccagtaaatggaagaaacaggaagaattagttttcgtgactgcctatgacattctctttggtcaggagacagcagcttctggatccgttgaacagttaattatgttacataaggatactattatggctgctcttgagaaaatgtgtattagaaggaaggttcgtagtgttgaagacttagtaagcaagaaaaggacagtcaaaccaaaacccaggtttcttcgtgttaacacactcaggaccagtacagattctgtcatcgaagaactgaacaaaatacacaaggggaaagcaagttgtatggtggcagttgcattatgccctgagccaggctggaaggttattgatgcatgtgcggctccagggaataaaacagtccatcttgctgcactcatgaatggagaggggagtattacagcttgtgaacttaataaagagaggaccaagactttgcaaaatactatccgaagatccggagcaaacaatattgaaacaatcaatggtgactttttggatatcgatagcaatgatccatcatatgccgaggtccgagctattctattagatccctcttgctctggttccggaatctctacagagagacttgaccatttgctcccttcgcactcaagaggtaatcaggatgatgcaagtacgagttcaaggataaggaaactctccgccttccagaggaaagcgctctcacatgctctgtcattcccctctgtggagagagtggtctacagcacctgctcaatccaccaagctgagaacgaggacgtcgtgagctccgtcctgccattggcgtcatcgctcggattcgagctcgctactccattccctcaatggcgacgccgtggtctccccgtctttgaaggatctgagcatctgcttcggacggacccggaggacggcctggagggcttcttcatatcgttgttcgtgaggaaagcagcagcagcagccgatgctgtaaagcctagcaatggtggtttgggagtgagcaagcaggtttttaagagacgtaacgggctcatggctttcggctcatcgagactgtccaggatgatgatgctctgctctacccggggtctctcgagaagatga

SEQ ID NO: 59696 - protein, 472 aa, Oryza sativa (japonica cultivar-group)
MPPPPPSKNRGHVPAPRPPPGKPPGRRMASRDAAERAAFFARREAAAVLRRVLRGDASRRAAGSIKSLVYSPSVRNKRATFALVCQTLKYLPILKEVLASTGVLTSKWKKQEELVFVTAYDILFGQETAASGSVEQLIMLHKDTIMAALEKMCIRRKVRSVEDLVSKKRTVKPKPRFLRVNTLRTSTDSVIEELNKIHKGKASCMVAVALCPEPGWKVIDACAAPGNKTVHLAALMNGEGSITACELNKERTKTLQNTIRRSGANNIETINGDFLDIDSNDPSYAEVRAILLDPSCSGSGISTERLDHLLPSHSRGNQDDASTSSRIRKLSAFQRKALSHALSFPSVERVVYSTCSIHQAENEDVVSSVLPLASSLGFELATPFPQWRRRGLPVFEGSEHLLRTDPEDGLEGFFISLFVRKAAAAADAVKPSNGGLGVSKQVFKRRNGLMAFGSSRLSRMMMLCSTRGLSRR

SEQ ID NO: 59697 - DNA, 1521 bp, Yarrowia lipolytica CLIB99
  CDS (1)..(1521)
atgaacttctaccaggaggccgcccagtttctggagccgtccaagaagggctcgctacagaaccgaatatttgctcagtccaagctgctcggcaaaacgcgactcagagccgaccccaaacatgtgtttgccgtggtcttctcggccctcaaatacagaccctttctggtggacatcatcaaggctgcggaaatccccatttccgacaagcctggaaaaaccaaaatcaccatgaacatggccattcttatggcccacgacctgctctgctcccggtccaagcgtctgaccatctccaagggtcctctcaaagacatgtttctggcccaccagacccgtctcaagtccgagctgaccaaattcaagctgaaacacaaggtctcggacctcgacgagctcgtggaggaagactcgacgcccattcgatggataagaatcaacacagtgctcagtaacgaggaagagtttcacaagacgcctttgatcgcgagactcaagcctatcgacaagatcgagggcggcacaattcagcccggacagatatacaaggacattcacgtgccccatctttacggaattcaccccagagagaaactggctaattgcgagctatataagcagggcaagatcatcattcaagatcgagcctcttgctttcccgctaccattctcaacccccagcctggccagaagctcattgattgctgctctgcacccggaaacaaaaccacacacctggcctctttcgtggctggtacccctggctctattgatgcgtttgaaaaagacgccattcgagcaaagcttcttaccaagatggtcaagaccgcgggttgtcacaactgcatcaaggtgaacgtgggagacttcaccgacaccaaccccgacgactaccccgaagtggagggtattctcgtggacccatcgtgttcgggatcaggtatttttggacgaaagcacgaggacgacgctgccgcggcggaggaaaccaacagagacgaccagaaggatcagttccgactccacaagctgtccgagtttcagtaccgaatcgtcaagcatgccctgctgtttggatctgccaagaaggtggtctattctacctgctccattcacaacattgaaaacgaggaagtggttcagaaactgcttctggactcgcaggttgctgctgagggatggcagctggcccccaagttgcgtgttcttcctctatggacgcgacgaggagaccccaacggcttttcagactttcctgagaatcagagagctgctctggctgagggagtcgttcgagctctacccaaggtcgacggaggcattggcttctttgctgcctgcttcgagaagcgggatattggtgaaattggacacagagtccctaaggtgtctgaggttgagagcgcccaggaaacctcttccgatgaccacagtgaagacgccgaacaggaagaccaagaccaagaccaagacgaggaggaggttgagtctgaggaagagtggactggtttctctgattaa

SEQ ID NO: 59698 - protein, 506 aa, Yarrowia lipolytica CLIB99
MNFYQEAAQFLEPSKKGSLQNRIFAQSKLLGKTRLRADPKHVFAVVFSALKYRPFLVDIIKAAEIPISDKPGKTKITMNMAILMAHDLLCSRSKRLTISKGPLKDMFLAHQTRLKSELTKFKLKHKVSDLDELVEEDSTPIRWIRINTVLSNEEEFHKTPLIARLKPIDKIEGGTIQPGQIYKDIHVPHLYGIHPREKLANCELYKQGKIIIQDRASCFPATILNPQPGQKLIDCCSAPGNKTTHLASFVAGTPGSIDAFEKDAIRAKLLTKMVKTAGCHNCIKVNVGDFTDTNPDDYPEVEGILVDPSCSGSGIFGRKHEDDAAAAEETNRDDQKDQFRLHKLSEFQYRIVKHALLFGSAKKVVYSTCSIHNIENEEVVQKLLLDSQVAAEGWQLAPKLRVLPLWTRRGDPNGFSDFPENQRAALAEGVVRALPKVDGGIGFFAACFEKRDIGEIGHRVPKVSEVESAQETSSDDHSEDAEQEDQDQDQDEEEVESEEEWTGFSD

SEQ ID NO: 59699 - DNA, 1410 bp, Canis familiaris
  CDS (1)..(1410)
atggcgctgtacgcgacggcggcgtctgtgctggcaaacgtggagagccgacggggctccatcaaggggctggtgtacgccagcagcttccagaacgtgaagcagctgtacgcgctggtgtgcgagacgcagcgctactccgccgtgctggacgccgtgatcgccagcgccggcctcctccgcgccgagaagaagctgcggccgcacctggccaaggtcctagtgtatgagttattgctgggaagaggctttagagggggcgggggccgatggaaacctttgctggaccggcaccaggcaaggctgaaggcggagttggcccggctcaaggttcagcgacgtgtgagccgcaacgaggacctgttgcaggtgggatccaggcctggcgcagcctcccaggtgcctcgctttgtgcgtgtgaacactctcaagaccagctctgacgatgcaattgattatttcaagaggcaaggtttctcttaccagggtcgggcttctagcctcgaggacctacgggccctcaaagggaagtgctttcttctggaccccttattgccagagttgctcgtgtttccgacccagacagatcttcatgaccacccactataccaggccggtcacctcattctacaagacaaggccagctgtctcccagccatgctgctggccccacccccaggctcccacgtcattgatgcctgtgctgcccctggcaacaagaccagtcacttggccgcttttctcaagaaccaagggaggatctttgcctttgacctggatgctggacgactggcgtccatggctaccctgctggcccgggctggagtctcatgctgtgagctggctcaggaagacttcctggcagtctcaccctctgaccagcgctaccgtcaagtccagtatatcttactggatccttcttgtagtggctcaggaatgccaaccagacagctggaggagcccgggacaggcactcctagcaaggcacgcctgcaggccctagccgggttccagcagcgagcactgcgccacgcgctcaccttcccctccctgcagcgtctggtgtactccacatgttccctctgccaagaggagaatgaagatgtggtgcaggatgccctgcagcagaacccagggaccttcaggctggctcccgtcctaccctcctggccccaccgaggcctcagcagtttcccaggggctgaacactgcctccgggcctcccccgagaccacgctcactggtggcttctttgttgcagtactggaacgggtagaggttccaagctcagtcccccaggctgaagcatcggcaccagaaatctctctcagcgcagccccacggaaaaaaaggagaccacgccggactgtggcccctcgcacactgccccctacagagcaggtctcctga

SEQ ID NO: 59700 - protein, 469 aa, Canis familiaris
MALYATAASVLANVESRRGSIKGLVYASSFQNVKQLYALVCETQRYSAVLDAVIASAGLLRAEKKLRPHLAKVLVYELLLGRGFRGGGGRWKPLLDRHQARLKAELARLKVQRRVSRNEDLLQVGSRPGAASQVPRFVRVNTLKTSSDDAIDYFKRQGFSYQGRASSLEDLRALKGKCFLLDPLLPELLVFPTQTDLHDHPLYQAGHLILQDKASCLPAMLLAPPPGSHVIDACAAPGNKTSHLAAFLKNQGRIFAFDLDAGRLASMATLLARAGVSCCELAQEDFLAVSPSDQRYRQVQYILLDPSCSGSGMPTRQLEEPGTGTPSKARLQALAGFQQRALRHALTFPSLQRLVYSTCSLCQEENEDVVQDALQQNPGTFRLAPVLPSWPHRGLSSFPGAEHCLRASPETTLTGGFFVAVLERVEVPSSVPQAEASAPEISLSAAPRKKRRPRRTVAPRTLPPTEQVS

SEQ ID NO: 59701 - DNA, 1701 bp, Cryptococcus neoformans var. neoformans JEC21
  CDS (1)..(1701)
atgattacaggctcatccgcacatctcgaccacgctctggcgcctcaagtaaatacttgtttgggcaccatgaacttttacaaatctgcagctctcgcgctcgaccatcttgataagcaccagggatcagtaaaagggtctttggcagctgctggtgtgaaagcttcaggcgctgaagccaagcgtatattagcattgattatcgagaccctcaaatatcgtcctgtcctccaacaactgcttaagacggtccccatcctcgcacttgaacgtaccactttcccttcccgcacgcccgccaagaccccgacttcacaatctctcgtcctcgtactcttacacgatctcctcttctcatctaggtctcgtatcgaagcgtccgataaatggccacccaaacccgctgtgatgcgtcaccaagcgaggttaaaggctgaacttgtcagaatccaaatcagggaaggcaagacgaaaaaggaagacttggcaaagacaagtggtgaaggagaggctgtgagatatatccgatataaccccaatgcagggagaccttttgaagagctcggggagtatctgaagaagaagggatatacaaagctggatgagcctgtttatcctatacctgaaggaaagtactttgccgacccgcacctgtcagacgtgttgttagccttcccaggttcagccaattggtgggtaaatgatgaatggtacgagggcggaggtgtaatcctccaagacaaggcgagttgtttcccggctcgggttttaatggaaggatgggtggaaggtgaaggagagtgtttggacgctacgtctgcaccaggtaacaaaactagttacgtttcggctttgatggcgaacaggggcaaactccatgcatttgagcgctctcccaatcgattcaagactcttgagaagatgctcgagaaagcccgctgctccaacgtacaagctcaaagagctgacttcacagacactgatcctaaaagtaaagagttcaagaatgtcacacgcatattacttgatccgagttgttccggttcggggatcgtcaacaggttggactatctcgtggatgacgatgccgaggaatcagattcgaaaacagaacgtctagagaagttggcgagcttccagcttcaaatgatccttcacgctttcaaatttccgtcagctcaacggattgtctattccacatgctctatccaccctgaggaagacgagcgtgtcgtcatggcggctctgcagtcgaatactgccaaagagaatggatggggtctggcaagtcgagagtccgttctacccaaatgggagagaagaggaaggcctgaggaaatggaaggagacgaggaactcgccaacggcgtgattcggtgccttccagaagacaagactaacggattcttcgtctcatgcttcatgcgtggtgacacaggcattcgacctaaggccacaaagaaagcaaaggatcaacgaccacccaagcgtccactaatagaggaacaggaggagatcgctgaagaaaaaggttcccctactgttgctgttgatgaggagggtggcgaacaagctggaaaacaagacaggctggccgcgaatatccctcggaaagaaaagacaaaagctcagttggagagggctaaacgcaagaaagctcagcagaaagttaaggggaagaagcgcaaggtagagttgtaa

SEQ ID NO: 59702 - protein, 566 aa, Cryptococcus neoformans var. neoformans JEC21
MITGSSAHLDHALAPQVNTCLGTMNFYKSAALALDHLDKHQGSVKGSLAAAGVKASGAEAKRILALIIETLKYRPVLQQLLKTVPILALERTTFPSRTPAKTPTSQSLVLVLLHDLLFSSRSRIEASDKWPPKPAVMRHQARLKAELVRIQIREGKTKKEDLAKTSGEGEAVRYIRYNPNAGRPFEELGEYLKKKGYTKLDEPVYPIPEGKYFADPHLSDVLLAFPGSANWWVNDEWYEGGGVILQDKASCFPARVLMEGWVEGEGECLDATSAPGNKTSYVSALMANRGKLHAFERSPNRFKTLEKMLEKARCSNVQAQRADFTDTDPKSKEFKNVTRILLDPSCSGSGIVNRLDYLVDDDAEESDSKTERLEKLASFQLQMILHAFKFPSAQRIVYSTCSIHPEEDERVVMAALQSNTAKENGWGLASRESVLPKWERRGRPEEMEGDEELANGVIRCLPEDKTNGFFVSCFMRGDTGIRPKATKKAKDQRPPKRPLIEEQEEIAEEKGSPTVAVDEEGGEQAGKQDRLAANIPRKEKTKAQLERAKRKKAQQKVKGKKRKVEL

SEQ ID NO: 59703 - DNA, 1632 bp, Cryptococcus neoformans var. neoformans JEC21
  CDS (1)..(1632)
atgaacttttacaaatctgcagctctcgcgctcgaccatcttgataagcaccagggatcagtaaaagggtctttggcagctgctggtgtgaaagcttcaggcgctgaagccaagcgtatattagcattgattatcgagaccctcaaatatcgtcctgtcctccaacaactgcttaagacggtccccatcctcgcacttgaacgtaccactttcccttcccgcacgcccgccaagaccccgacttcacaatctctcgtcctcgtactcttacacgatctcctcttctcatctaggtctcgtatcgaagcgtccgataaatggccacccaaacccgctgtgatgcgtcaccaagcgaggttaaaggctgaacttgtcagaatccaaatcagggaaggcaagacgaaaaaggaagacttggcaaagacaagtggtgaaggagaggctgtgagatatatccgatataaccccaatgcagggagaccttttgaagagctcggggagtatctgaagaagaagggatatacaaagctggatgagcctgtttatcctatacctgaaggaaagtactttgccgacccgcacctgtcagacgtgttgttagccttcccaggttcagccaattggtgggtaaatgatgaatggtacgagggcggaggtgtaatcctccaagacaaggcgagttgtttcccggctcgggttttaatggaaggatgggtggaaggtgaaggagagtgtttggacgctacgtctgcaccaggtaacaaaactagttacgtttcggctttgatggcgaacaggggcaaactccatgcatttgagcgctctcccaatcgattcaagactcttgagaagatgctcgagaaagcccgctgctccaacgtacaagctcaaagagctgacttcacagacactgatcctaaaagtaaagagttcaagaatgtcacacgcatattacttgatccgagttgttccggttcggggatcgtcaacaggttggactatctcgtggatgacgatgccgaggaatcagattcgaaaacagaacgtctagagaagttggcgagcttccagcttcaaatgatccttcacgctttcaaatttccgtcagctcaacggattgtctattccacatgctctatccaccctgaggaagacgagcgtgtcgtcatggcggctctgcagtcgaatactgccaaagagaatggatggggtctggcaagtcgagagtccgttctacccaaatgggagagaagaggaaggcctgaggaaatggaaggagacgaggaactcgccaacggcgtgattcggtgccttccagaagacaagactaacggattcttcgtctcatgcttcatgcgtggtgacacaggcattcgacctaaggccacaaagaaagcaaaggatcaacgaccacccaagcgtccactaatagaggaacaggaggagatcgctgaagaaaaaggttcccctactgttgctgttgatgaggagggtggcgaacaagctggaaaacaagacaggctggccgcgaatatccctcggaaagaaaagacaaaagctcagttggagagggctaaacgcaagaaagctcagcagaaagttaaggggaagaagcgcaaggtagagttgtaa

SEQ ID NO: 59704 - protein, 543 aa, Cryptococcus neoformans var. neoformans JEC21
MNFYKSAALALDHLDKHQGSVKGSLAAAGVKASGAEAKRILALIIETLKYRPVLQQLLKTVPILALERTTFPSRTPAKTPTSQSLVLVLLHDLLFSSRSRIEASDKWPPKPAVMRHQARLKAELVRIQIREGKTKKEDLAKTSGEGEAVRYIRYNPNAGRPFEELGEYLKKKGYTKLDEPVYPIPEGKYFADPHLSDVLLAFPGSANWWVNDEWYEGGGVILQDKASCFPARVLMEGWVEGEGECLDATSAPGNKTSYVSALMANRGKLHAFERSPNRFKTLEKMLEKARCSNVQAQRADFTDTDPKSKEFKNVTRILLDPSCSGSGIVNRLDYLVDDDAEESDSKTERLEKLASFQLQMILHAFKFPSAQRIVYSTCSIHPEEDERVVMAALQSNTAKENGWGLASRESVLPKWERRGRPEEMEGDEELANGVIRCLPEDKTNGFFVSCFMRGDTGIRPKATKKAKDQRPPKRPLIEEQEEIAEEKGSPTVAVDEEGGEQAGKQDRLAANIPRKEKTKAQLERAKRKKAQQKVKGKKRKVEL

SEQ ID NO: 59705 - DNA, 2043 bp, Dictyostelium discoideum
  CDS (1)..(2043)
atgtgtgatttttatcaacaagcagcagatgtaattgaacaattaattcaaaagaaaggatcaattaaaggattgacatataatagaaatgtgaatgttaaaacttcaaagacatgttatgcattagtttgtgaaacattgaaatataagggtgtaattgatcaaattattgaattaacagcaggattagaaaaagaatttaaaaagaataaaactataaagtatagtttattagttgtaatgatttatgaacttttatttagtgcaaatggaaagattaaaggcggtggacaggcaaagaagctactatcgcattaccaagcaccaattaatagtgcgttagcaagaatgaaaattcaaaaaaaggtatcggaaaatattgatttactacccgacaatatcagatacccaattacattgccacgttatgttagagttaatacattattcaatgattgtgatgaaaattgtattaaaaatgtaattgagcattttgtaaatgttgaaggatttgaactattatcaaaaccaccaaaattgcaaactaaatcaattacaataaaaaaagaaaatggcacagttgaacaacaacaacaaactacaattatattgggtgaaaaagaattttatcaagatttagattttccagagattttaatatttcatcatgctgtggatttacatgatcataaaatgttgctaaatggtcaaattatacttcaagataaagcatcttgtttaccatcttttattttatcaccaccacctggttcggtttgtattgattcttgttctgcacctggtaataaaacttcattattatctgcacaaatgaaaaatactggaaaaattttcgcaattgaaaaagatacaaaacgttgtggtactttaattaaattaacaaaaagatcactttgtaaaaatattgaaacaattaatgatagttttttaaatttaaaacatgatgatccaaaatttaaagatgttgaatatattttatgtgatccatcatgttcaggatctggtatcgtaaatcgtttggattatttattaccaacaaaatattcgacagatgaaatcgtaacagatgaaaatgatgaagatttagatgaaattttaaaccaacaaaatcaatcaacaaaattacctgaaaaagaaaaagaaaaatcaatattaaataaaaaagaattaaaaaaagaaaaaaagagaaaattaaaagaaatgaaacaaggtggtaaaaaacaacaaaaagataataataataaattaccattagtaccaccaattaaaacaaaagaagaaattgaagaacaagaaagaattgaagaagagaaacgtgttaaattattagcagattttcaattatcaattattcaacattcatttgcatttccaaatgttaaaaaagttatttattcaacttgttcaactcatcaagttgaaaatgaagatgttgtaaaacgtgcaatcgatgaattaaataaagatggtgaaaagtggaaagtagttaaaattttaccacattggactaatagtagaggtttaccaatttataaaaatagtgattattcaattcgtatgacaccttcaaaagattttacaattggttttttcgttgctttatttgaaaaaattattaataataattctgaaaataataataataataataataataataataataataataataataataataataataataataataataataataataataataataataataataataataataataataataataataataataattctgaaaataataaattaaatatcaaaaatgaaaatgaagcaccaaaaattattcaatctgataaaattcatataaaacctggaaataataaaaataataatagtaataataaaaataataataataataataataaaaataataaggataaaaataataataataataaggataaaaataaaataaatataaaaaatcaaaatataaaattagaagaatcagatcaaaaacatccaaaaaagaaattaaaattaaaataa

SEQ ID NO: 59706 - protein, 680 aa, Dictyostelium discoideum
MCDFYQQAADVIEQLIQKKGSIKGLTYNRNVNVKTSKTCYALVCETLKYKGVIDQIIELTAGLEKEFKKNKTIKYSLLVVMIYELLFSANGKIKGGGQAKKLLSHYQAPINSALARMKIQKKVSENIDLLPDNIRYPITLPRYVRVNTLFNDCDENCIKNVIEHFVNVEGFELLSKPPKLQTKSITIKKENGTVEQQQQTTIILGEKEFYQDLDFPEILIFHHAVDLHDHKMLLNGQIILQDKASCLPSFILSPPPGSVCIDSCSAPGNKTSLLSAQMKNTGKIFAIEKDTKRCGTLIKLTKRSLCKNIETINDSFLNLKHDDPKFKDVEYILCDPSCSGSGIVNRLDYLLPTKYSTDEIVTDENDEDLDEILNQQNQSTKLPEKEKEKSILNKKELKKEKKRKLKEMKQGGKKQQKDNNNKLPLVPPIKTKEEIEEQERIEEEKRVKLLADFQLSIIQHSFAFPNVKKVIYSTCSTHQVENEDVVKRAIDELNKDGEKWKVVKILPHWTNSRGLPIYKNSDYSIRMTPSKDFTIGFFVALFEKIINNNSENNNNNNNNNNNNNNNNNNNNNNNNNNNNNNNNNNNNNNNNNNNSENNKLNIKNENEAPKIIQSDKIHIKPGNNKNNNSNNKNNNNNNNKNNKDKNNNNNKDKNKINIKNQNIKLEESDQKHPKKKLKLK

SEQ ID NO: 59707 - DNA, 1497 bp, Candida albicans SC5314
  CDS (1)..(1497): transl_table=12
atgatcatcaaagaccgaactgaaaaaaaaaacacatacaaaaaaaaatatccaatcatattctttggcctcatctcatctcatttcctctatatcacatatacaccaatgaagttatattttgaagcagaaaagtttttaaaaccaaacaaaggaactaacgggagtctacaatctcgtatattcaacgataaaagattaaccaattccccaaaacacatatttgccttggtctattctacattaaagtacaaagaatacatcgatgtgattgtgaaaaaatcaaaaatccaacatgatcttcaaattaaaaaagtgaagatgagcaatgaattattatgcttattggttcatgatttattgttttcttcaaaagggagaatccagagtgggaaacatcctatgaaagatgcatttttgctgaacaagacaagattacaagcagaattcaccaaattgaaattgaaatataaagtgaagtcagttgaccaattaccaacgaaggaagctgacgatgatgaaactccaatacggtggtttagaattaataccattaaaattgacatagatagattttacaccaagcatccattcttcaagcaactacaaccagtgagctcaattgacgaaatcacagaaacagggataatttattctgatgattatattcctaatttatttggggttcatccaagagagaaaatcacatcgactgaagcttatagattaggggaaataattatccaggatcgtgcatcttgtttcccaagtcacatacttaatgcagatcctgaagatgttcatacccaagttatagatgcgtgcgcagcacctggaaacaaaacgacccatgcagcagcacatctaccaaactcagattcagtcgtgtatgcatttgaaagagattcaaaaagagtgaagatattgaagaccatgtgtgagaaagccacaggtaaaacgaaaaagaaacttatccaagtgactcacgctgatttcacaaccacaaaacccgaagattttcctgatgttactggattagttattgatccatcgtgtagtggatcaggtatttttggaagggcattagaagattcacataatgaagaagaaattgaaaatgttaacacagagaggcttaacaaattagctggatttcaatttgccataatgaaacacgcattgctgtttccatcagccaggaaagttgtttattcaacatgttcaattcacgcgcaagaaaatgagagggtcgtggtggatttgctactggatccagaagtaaatcgccgggggtggaagttggctgaccgagaaattgtgttaccgaagtgggacagaagaggttttgaagaagaatttatcaagatatcaagggatcctaaagaatgtgcgagattggcaggtggttgtgtacgagcaaatcctaaagaagatggagggatcggattttttacagcatgttttgtaagatcaactgaagttaaccatgagaactga

SEQ ID NO: 59708 - protein, 498 aa, Candida albicans SC5314
MIIKDRTEKKNTYKKKYPIIFFGLISSHFLYITYTPMKLYFEAEKFLKPNKGTNGSLQSRIFNDKRLTNSPKHIFALVYSTLKYKEYIDVIVKKSKIQHDLQIKKVKMSNELLCLLVHDLLFSSKGRIQSGKHPMKDAFLSNKTRLQAEFTKLKLKYKVKSVDQLPTKEADDDETPIRWFRINTIKIDIDRFYTKHPFFKQLQPVSSIDEITETGIIYSDDYIPNLFGVHPREKITSTEAYRLGEIIIQDRASCFPSHILNADPEDVHTQVIDACAAPGNKTTHAAAHLPNSDSVVYAFERDSKRVKILKTMCEKATGKTKKKLIQVTHADFTTTKPEDFPDVTGLVIDPSCSGSGIFGRALEDSHNEEEIENVNTERLNKLAGFQFAIMKHALSFPSARKVVYSTCSIHAQENERVVVDLLSDPEVNRRGWKLADREIVLPKWDRRGFEEEFIKISRDPKECARLAGGCVRANPKEDGGIGFFTACFVRSTEVNHEN

SEQ ID NO: 59709 - DNA, 1680 bp, Aspergillus fumigatus Af293
  CDS (1)..(1680)
atgtctctttactacgacgcggtctcggttttgaccgctccatcatcaacggggggttccttcaaatcccgcatctacagctcgcggaacctcaaatcctccccggcgcaaatctacgctctggtcatcgaggcctcaaaatgggatatccttctcaaggaggtcattgaggccgcagggatcctcaagcacgagcccaagctcactcccttacttgccctactgcttgtgcacgaccacctcctcgccaagaatggcatcgcagccaacgcaaaccatccgctgcgccaggcgatcgagagacacaagactaggctaaatggagaattcgtcaaggcgcgcgtgcgccgcggatgtgcttcgatacccgatctgaaggctgccgtgctacgcgagaaacaggccgcgcagggtgcggtcgggacttcttcgacggcggtgtatccgcgctgggtgcggatcaacaatcttcgcacgacgatggaggagcagctccagtctacattcaagtcgtataccagagtcaattcgctcgcggagctaggggagaaagacgaggcgaagctgtacgttgacccgcacgttccggatcttgtggccgtcgcgccgggcgtggacttcacctcgtcccctgcctacaagaacgggcagatcatcttgcaggataaggcgtcgtgtttcccggcatatctgttacttggggatagcgaggactggtccggcgatctgctggatggatgcgcggcacctggaaacaagacgacacacatggcttcgttgcttgcgaagcatgccgccggtagggacgttacccgccacatcgtttccatggatgcgtccaaggtgcgctccaagacattgcagaaaatggtcagcgccgcgggcgcagacaatatagtcaccgtcctccagggccaggatttcctggcgctcgatccaaccgaggaacgcttcgcaaacgtcaccggcctcctcctcgaccctagttgctccggcagcgggatcgtcggtcgcgacgacgtccccaaactcgcactgcccgccgctgcatccacgccgaccagtaaatcacagggaaagaagcgcaaacgccgacacgacgacgaggaggagactcagcccggcaacgccgccgctgcgacctcaacttcagcgtccgcgacagatgaaaacgaaatcgcgagcgcaaccctcgaccgggatcgtctgacgaaactctctaacctgcaggcgcgcatcgtcgaacacgcgctgagcttccccgccgccacccgtgtcacgtacagtacgtgctccattcacctgatcgagaacgaggccgttgtgtctcgtgtactcgcctcggacgtagcgcgctctcgcgggtggagaatcatgcgccgcgaggagcaaccccgcggcatgaaggcctggccgcaccgtggtgtcaggacagagagccgatatggcgatgtgaagggcgatggggaagccactccagtggatttatcagatgaagaactagaggcttgtttgcggtgttgggccgatgatgaggagggacttggtgggttcttcgttgcaggttttgtgcgtgatgagggaagcgtagactgtccttctacgaaaaagccagcgtctcaggaaacggacgaggatacggaggccagcgatggggagtgggagggtttctctgattga

SEQ ID NO: 59710 - protein, 559 aa, Aspergillus fumigatus Af293
MSLYYDAVSVLTAPSSTGGSFKSRIYSSRNLKSSPAQIYALVIEASKWDILLKEVIEAAGILKHEPKLTPLLALLLVHDHLLAKNGIAANANHPLRQAIERHKTRLNGEFVKARVRRGCASIPDLKAAVLREKQAAQGAVGTSSTAVYPRWVRINNLRTTMEEQLQSTFKSYTRVNSLAELGEKDEAKLYVDPHVPDLVAVAPGVDFTSSPAYKNGQIILQDKASCFPAYLLLGDSEDWSGDLLDGCAAPGNKTTHMASLLAKHAAGRDVTRHIVSMDASKVRSKTLQKMVSAAGADNIVTVLQGQDFLALDPTEERFANVTGLLLDPSCSGSGIVGRDDVPKLALPAAASTPTSKSQGKKRKRRHDDEEETQPGNAAAATSTSASATDENEIASATLDRDRLTKLSNLQARIVEHALSFPAATRVTYSTCSIHLIENEAVVSRVLASDVARSRGWRIMRREEQPRGMKAWPHRGVRTESRYGDVKGDGEATPVDLSDEELEACLRCWADDEEGLGGFFVAGFVRDEGSVDCPSTKKPASQETDEDTEASDGEWEGFSD

SEQ ID NO: 59711 - DNA, 1527 bp, Strongylocentrotus purpuratus
  CDS (1)..(1527)
atgccgccgaatttcgtcaaaacagatatctacgatgaggcatctgctgtcatcagtaaggcacagataaaggaaaagtcaattaaatcgctggtttatgaaagtaattctaagaatatccgccagttgtatgccctggtctgtgagtcattaaagtatgctacaatcattgaggagatcattgacaacactgcattcctacagaaggtcccatggatggagagaaacctagcactggtgctcctgtatgactttctgtttggcaagaagcttgccggcgcatgctcgggaaagtatcgtaaggctgtggtcaaacagaagaaggagctgaaggctgagctacagaagatgaaagagaagaaaggagcgaccagtttatctgatctgttaccaagtcaagtcaaagatgaagtttctattccaaggtacatacgtgtgaacctcctgaagaccagcattgatgatgtcatcgctgctttcatcgaggctgggtacacctgtgtgatgacgagggatgaagcagaagaagagaaacaagatgctactccaaagtatatcagtaacctgagtgtggatgtgagtcggagtctgggtcagtatgagtttgctactgatcttcatctagatgatgtcctggtgtttgcagcaaggacagacttccacagtcaccctctttatcttcaaggccacatcattctcatggacaaggccagttgttttccagcttatgtcctatcagctaaaccaggctcacatgtaatagatgcttgctcagctcctggtaacaagactagccacatggctagcttgctcagaaatgatgcgaaaatttattcctacgacctggaccctaaacgaatcagtgtgatgaatacccttctagagagagcaggagtgtctgcagctaagactatccatcaggacttcttgactactgacccctgtagtaaagagaacatgcgtgtagagtacaccatagtagatccatcatgtagcgggtctggtatggctagtaggaaagactacttggtggatgacgacatgcaggaggatagagcacgactccggtccctgcatcagctccagtgccgcatcctcactcatgcgctctcctttcccagtgtgaggagagtggtgtactccacctgctcggtgcatagggaagagaatgaggatgtggtgaggactgtgttggagcagagtgatgggttcagactggtgccggtgatgcagggtacatgggatcgtagaggattgtccaccagtcaggatggggaagaggaccatataggggagtgctgcgtgcgagcatcgcctcatacggacttgactaatggattctttgtggccctctttgagcggactgggaagagtgggactggagtatcaaagagactggttccagagaacactattaacggacacggccaatctcttgacgagaagcactccaagaagaaaaagaaggctaaagtcggcaaagaggaaacagttgaaagtcaagaggaagctttgaaggctgattag

SEQ ID NO: 59712 - protein, 508 aa, Strongylocentrotus purpuratus
MPPNFVKTDIYDEASAVISKAQIKEKSIKSLVYESNSKNIRQLYALVCESLKYATIIEEIIDNTAFLQKVPWMERNLALVLLYDFLFGKKLAGACSGKYRKAVVKQKKELKAELQKMKEKKGATSLSDLLPSQVKDEVSIPRYIRVNLLKTSIDDVIAAFIEAGYTCVMTRDEAEEEKQDATPKYISNLSVDVSRSLGQYEFATDLHLDDVLVFAARTDFHSHPLYLQGHIILMDKASCFPAYVLSAKPGSHVIDACSAPGNKTSHMASLLRNDAKIYSYDLDPKRISVMNTLLERAGVSAAKTIHQDFLTTDPCSKENMRVEYTIVDPSCSGSGMASRKDYLVDDDMQEDRARLRSLHQLQCRILTHALSFPSVRRVVYSTCSVHREENEDVVRTVLEQSDGFRLVPVMQGTWDRRGLSTSQDGEEDHIGECCVRASPHTDLTNGFFVALFERTGKSGTGVSKRLVPENTINGHGQSLDEKHSKKKKKAKVGKEETVESQEEALKAD

SEQ ID NO: 59713 - DNA, 1590 bp, Trypanosoma cruzi
  CDS (1)..(1590)
atggacgtctaccggcaggctagtgaaattgtgtgcgccgtgcgtgaaggaaatggcacggcgaaggctctctgcctccggaaggagatgcagaagaagaagcagacatatgcggtggtctgcgagacgctgcggcactacgacctcttgcaggacgtgcttgaccaggcaaagttcttcaagtactacccgcgtgccaacaaggggtttgccatctgcatggcctacgacgttgtgctgggaaagggactgaacaccaaccgcgacacgacggcacaggcgatcaaaaagtccgcgccgtacttgcgggaggcgtattggcacgtgaagaagcatcacgttatcccctcacgtgcacatgagcccttcactgaggacagtaacggtgggagcaggaatgatgaggttgataataacgaggacaattacaatcgccgctgcacgctcactcagcaatgcttttctggcgattcggacagggcggctgcggtgccagagctgcagattccacggtatgcgcgagtgaatacgttgaagattgacgtggttactttagtggagcgtctccaccgcgctgctgagaagcgtggccgtgaagatgacggaagccaagggaaggaacaacaacgaaaagagaaaaaaacccatcatatgaaagggtttcgtctgttgtcggccttcactatggatcctgtggtgccgtcgctgcttgtattcccagcaggcaccgacctgcacgctcacccggcggtgcgcagcggtcaactcatcctgcaggatcgtgcatcgtgtcttcccgcatgtattctgctggacgcggtagaggtggttaggccgtcatccgctggggccggtgcaccgctggagtacatcgttgacgcctgtgccgcccctggcaacaagacgacacatctcgcagcgttgggcgccccacacgtgaaaataatggcggtcgagcgcgatgagaagcgtgcggaccttcttttccgccgtgtgcagagcctcggagccagcgactatgtgaatgttgtcaacttggactttttccagatgtcctcagcggatcgtgaggcaacggaggggattctgctggacccaagctgcagcgctagtggggtgttgacgcgcgtggatgtgtcgcttatgcggcagcgccaggcccgtgtggccgaagtcggtgaaaacaacaggggtgaggatggagctggcaacaatgagacgtgggccatcagcccagaagaacatggtaccgaatttgccagcaacgccgatcgggtcatgggccttgcgcgtctgcagcggaagcttctggcgcatgccctgctctcatttgacaattgtcgtacggtcgtgtactcaacatgctccgttcacgtggaggaaaacgagcttgtggtgcggcaggtgctggaggacacgcgggtgcaggcacgtggctgggcgttgagcaacatcatgccaacaacatggaaaacacgtgggcagaaaacggaaggcgacacattcccactggaccacaccatccgttgcgaccccgtcgcggacgccactaacggattttacgtggctcgctttgaccgcgccgtttaa

SEQ ID NO: 59714 - protein, 529 aa, Trypanosoma cruzi
MDVYRQASEIVCAVREGNGTAKALCLRKEMQKKKQTYAVVCETLRHYDLLQDVLDQAKFFKYYPRANKGFAICMAYDVVLGKGLNTNRDTTAQAIKKSAPYLREAYWHVKKHHVIPSRAHEPFTEDSNGGSRNDEVDNNEDNYNRRCTLTQQCFSGDSDRAAAVPELQIPRYARVNTLKIDVVTLVERLHRAAEKRGREDDGSQGKEQQRKEKKTHHMKGFRLLSAFTMDPVVPSLLVFPAGTDLHAHPAVRSGQLILQDRASCLPACILLDAVEVVRPSSAGAGAPLEYIVDACAAPGNKTTHLAALGAPHVKIMAVERDEKRADLLFRRVQSLGASDYVNVVNLDFFQMSSADREATEGILLDPSCSASGVLTRVDVSLMRQRQARVAEVGENNRGEDGAGNNETWAISPEEHGTEFASNADRVMGLARLQRKLLAHALLSFDNCRTVVYSTCSVHVEENELVVRQVLEDTRVQARGWALSNIMPTTWKTRGQKTEGDTFPLDHTIRCDPVADATNGFYVARFDRAV

SEQ ID NO: 59715 - DNA, 1701 bp, Trypanosoma brucei
  CDS (1)..(1701)
atggatgtttatcgacaagcaagtgaaattgtgcgggctgtgcgtgaaggaaccggcactgccaaagcgctgtgtttgcgtaaggaaatgcagaagaagcgccaaacgtacgctgttgtgtgcgagactctgcggcattatgaccttctccaggatgtcctcgagcaagcagaattctttcaatattacccacgggccaatagagattttgcgatttgcatggcttatgacgctgtgcttggaaagggagtcaacaccaaccgtgatacgaccgcgcaggctattcaaaagtcggtgtcctatcttcaggaggcatacgaacgtgtgaagaagcaccatgttattcccccacgcgccggggagctattgacagacgaggaagctggcccctgtgcacgcaccggcgatcataataatgatgggggaagggtcaaacacaacggtgttgatggcggctcgcttgggaaacattttgtttctgatggtgaaggtgccggtgacaacacccagggactgggttgtctgattccgcgttatgcgcgagtgaacacgctgaagattgatgtggacagcctggtggaacgtcttcgccgtgcctccgcgaaacgcgagcgtaacaatacggaaaactgtacaggaaacgatcatagtaggcgcgatcatcgacatcgtgcagctggaattcgtgtactgccaccctttaccttggatcctgttgtaccgtcactgctagttttcccaccaggtaccgatctacacgcccatccggccgttcgaagtggacaacttgtgctacaggaccgtgcatcgtgtcttcctgtttgtgtgctccttaatgccgtggaggttatcacgtccttctctgcttctggagaaggtgaaggtgatagcaaaccggctgaaccattggaatatgttgttgacgcctgtgcggctcctgggaataagacaactcagctggcagccctgggtgcgcctcatgtgaagataatggcgattgaacgtgacgacaagcgagctgagttgttgaggcatcgcgtgcagagcttgggggccgctgattacacaaacgtggttaatatggactttctgaagatggcacaagacgatcgtgaggtgacggaaggaattttgctggacccaagttgcagtgccagtggcgtgctgacaagagtggatgtggcccttttgcggaagcaatgcgttgctgtggatggcagcggtatctacactaacgatgttgttcgtcaagaaactgctgaggaaggggtgagcgagaccgctgttggtggggaagtgggcaccataactgcagaggctcaaggagtcgggtttgcaagcaacatggagcgcgtgatgggccttgcccggcttcagcgcaaattacttgcccactcacttctttcctttgacaattgtcgcacggttgtgtactccacatgctcagtgcatgaggcagaaaacgaggaggtagtgcggcaggttctacaggacgagcgggtacaggctcgtgggtgggcacttagcaacatcatgccgacgacgtggcggacgcgtgggtggaggaacgacagtgatacgtttccacttgagtacaccattcggtgtgaccccgaagtggacgcaaccaatggtttttttgtcgctcgtttcgaccgtgttgtggcgacgccgcagaagaggtcgaagaagaagcggtga

SEQ ID NO: 59716 - protein, 566 aa, Trypanosoma brucei
MDVYRQASEIVRAVREGTGTAKALCLRKEMQKKRQTYAVVCETLRHYDLLQDVLEQAEFFQYYPRANRDFAICMAYDAVLGKGVNTNRDTTAQAIQKSVSYLQEAYERVKKHHVIPPRAGELLTDEEAGPCARTGDHNNDGGRVKHNGVDGGSLGKHFVSDGEGAGDNTQGLGCLIPRYARVNTLKIDVDSLVERLRRASAKRERNNTENCTGNDHSRRDHRHRAAGIRVLPPFTLDPVVPSLLVFPPGTDLHAHPAVRSGQLVLQDRASCLPVCVLLNAVEVITSFSASGEGEGDSKPAEPLEYVVDACAAPGNKTTQLAALGAPHVKIMAIERDDKRAELLRHRVQSLGAADYTNVVNMDFLKMAQDDREVTEGILLDPSCSASGVLTRVDVALLRKQCVAVDGSGIYTNDVVRQETAEEGVSETAVGGEVGTITAEAQGVGFASNMERVMGLARLQRKLLAHSLLSFDNCRTVVYSTCSVHEAENEEVVRQVLQDERVQARGWALSNIMPTTWRTRGWRNDSDTFPLEYTIRCDPEVDATNGFFVARFDRVVATPQKRSKKKR

SEQ ID NO: 59717 - DNA, 1290 bp, Homo sapiens
  CDS (1)..(1290)
atggggctgtatgctgcagctgcaggcgtgttggccggcgtggagagccgccagggctctatcaaggggttggtgtactccagcaacttccagaacgtgaagcagctgtacgcgctggtgtgcggaacgcagcgctactccgccgtgctggatgctgtgatcgccagcgccggcctcctccgtgcggagaagaagctgcggccgcacctggccaaggtgctagtgtatgagttgttgttgggaaagggctttcgagggggtgggggccgatggaaggctctgttgggccggcaccaaccgaggctcaaggctgagttggctcggctcaaagttcatcggggtgtgagccgaaatgaggacctgttggaagtgggatccaggcctggtccagcctcccagctgcctcgatttgtgcgtgtgaacactctcaagacctgctccgatgatgtagttgattatttcaagagacaaggtttctcctatcagggtcgggcttccagcctcgatgacttacgagccctcaaggggaagcattttctcctggaccccttgatgccggagctgctggtgtttcccgcccagacagatctgcatgaacacccactgtaccgggccggacacctcattctgcaggacagggccagctgtctcccagccatgctgctggaccccccgccaggctcccatgtcatcgatgcctgtgccgccccaggcaataagaccagtcacttggctgctcttctgaagaaccaagggaagatctttgcctttgacctggatgccaagcggctggcatccatggccacgctgctggcccgggctggcgtctcttgctgtgaactggctgaggaggacttcctggcggtctccccctcggatccacgctaccatgaggtccactacatcctgctggatccttcctgcagtggctcgggtatgccgagcagacagctggaggagcccggggcaggcacacctagcccggtgcgtctgcatgccctggcagggttccagcagcgagccctgtgccacgcactcactttcccttccctgcagcggctcgtctactccacgtgctccctctgccaggaggagaatgaagacgtggtgcgagatgcgctgcagcagaacccgggcgccttcaggctagctcccgccctgcctgcctggccccaccgaggcctgagcacgttcccgggtgccgagcactgcctccgggcctcccctgagaccacactcagcagtggcttcttcgttgctgtaattgaacgggtcgaggtgccaaggtga

SEQ ID NO: 59718 - protein, 429 aa, Homo sapiens [sequence omitted]

SEQ ID NO: 59719 - DNA, 25 bp, Artificial sequence
  Primer sequence
atgaatttctacagggatgcaacat

SEQ ID NO: 59720 - DNA, 26 bp, Artificial sequence
  Primer sequence
ttaatctctttcaaaacagacagcaa

SEQ ID NO: 59721 - protein, 847 aa, Artificial sequence
  Consensus
  Variant (2)..(3): Xaa in position 2 to 3 is any amino acid
  Variant (5)..(7): Xaa in position 5 to 7 is any amino acid
  Variant (9)..(32): Xaa in position 9 to 32 is any amino acid
  Variant (33)..(185): Xaa in position 33 to 185 is any or no amino acid
  Variant (191)..(194): Xaa in position 191 to 194 is any amino acid
  Variant (197)..(199): Xaa in position 197 to 199 is any amino acid
  Variant (201)..(202): Xaa in position 201 to 202 is any amino acid
  Variant (205)..(214): Xaa in position 205 to 214 is any amino acid
  Variant (215)..(230): Xaa in position 215 to 230 is any or no amino acid
  Variant (232)..(233): Xaa in position 232 to 233 is any amino acid
  Variant (236)..(236): Xaa in position 236 is any amino acid
  Variant (241)..(245): Xaa in position 241 to 245 is any amino acid
  Variant (246)..(255): Xaa in position 246 to 255 is any or no amino acid
  Variant (257)..(257): Xaa in position 257 is any amino acid
  Variant (258)..(258): Xaa in position 258 is any or no amino acid
  Variant (260)..(260): Xaa in position 260 is any amino acid
  Variant (262)..(262): Xaa in position 262 is any amino acid
  Variant (263)..(265): Xaa in position 263 to 265 is any or no amino acid
  Variant (267)..(271): Xaa in position 267 to 271 is any amino acid
  Variant (273)..(284): Xaa in position 273 to 284 is any amino acid
  Variant (286)..(293): Xaa in position 286 to 293 is any amino acid
  Variant (294)..(341): Xaa in position 294 to 341 is any or no amino acid
  Variant (344)..(344): Xaa in position 344 is any amino acid
  Variant (348)..(348): Xaa in position 348 is any amino acid
  Variant (350)..(353): Xaa in position 350 to 353 is any amino acid
  Variant (354)..(411): Xaa in position 354 to 411 is any or no amino acid
  Variant (413)..(414): Xaa in position 413 to 414 is any amino acid
  Variant (416)..(417): Xaa in position 416 to 417 is any amino acid
  Variant (419)..(423): Xaa in position 419 to 423 is any amino acid
  Variant (424)..(437): Xaa in position 424 to 437 is any or no amino acid
  Variant (439)..(439): Xaa in position 439 is any or no amino acid
  Variant (449)..(449): Xaa in position 449 is any amino acid
  Variant (452)..(452): Xaa in position 452 is any amino acid
  Variant (455)..(461): Xaa in position 455 to 461 is any amino acid
  Variant (462)..(482): Xaa in position 462 to 482 is any or no amino acid
  Variant (486)..(486): Xaa in position 486 is any amino acid
  Variant (500)..(500): Xaa in position 500 is any amino acid
  Variant (502)..(505): Xaa in position 502 to 505 is any amino acid
  Variant (506)..(538): Xaa in position 506 to 538 is any or no amino acid
  Variant (540)..(540): Xaa in position 540 is any amino acid
  Variant (542)..(542): Xaa in position 542 is any amino acid
  Variant (544)..(547): Xaa in position 544 to 547 is any amino acid
  Variant (549)..(551): Xaa in position 549 to 551 is any amino acid
  Variant (553)..(554): Xaa in position 553 to 554 is any amino acid
  Variant (557)..(558): Xaa in position 557 to 558 is any amino acid
  Variant (560)..(563): Xaa in position 560 to 563 is any amino acid
  Variant (564)..(580): Xaa in position 564 to 580 is any or no amino acid
  Variant (583)..(589): Xaa in position 583 to 589 is any amino acid
  Variant (590)..(591): Xaa in position 590 to 591 is any or no amino acid
  Variant (593)..(594): Xaa in position 593 to 594 is any amino acid
  Variant (596)..(598): Xaa in position 596 to 598 is any amino acid
  Variant (610)..(611): Xaa in position 610 to 611 is any amino acid
  Variant (613)..(623): Xaa in position 613 to 623 is any amino acid
  Variant (624)..(711): Xaa in position 624 to 711 is any or no amino acid
  Variant (714)..(715): Xaa in position 714 to 715 is any amino acid
  Variant (718)..(719): Xaa in position 718 to 719 is any amino acid
  Variant (721)..(723): Xaa in position 721 to 723 is any amino acid
  Variant (725)..(725): Xaa in position 725 is any amino acid
  Variant (729)..(730): Xaa in position 729 to 730 is any or no amino acid
  Variant (733)..(735): Xaa in position 733 to 735 is any amino acid
  Variant (738)..(738): Xaa in position 738 is any amino acid
  Variant (745)..(747): Xaa in position 745 to 747 is any amino acid
  Variant (751)..(751): Xaa in position 751 is any amino acid
  Variant (754)..(756): Xaa in position 754 to 756 is any amino acid
  Variant (758)..(768): Xaa in position 758 to 768 is any amino acid
  Variant (769)..(778): Xaa in position 769 to 778 is any or no amino acid
  Variant (780)..(781): Xaa in position 780 to 781 is any amino acid
  Variant (783)..(784): Xaa in position 783 to 784 is any amino acid
  Variant (785)..(785): Xaa in position 785 is any or no amino acid
  Variant (788)..(791): Xaa in position 788 to 791 is any amino acid
  Variant (792)..(818): Xaa in position 792 to 818 is any or no amino acid
  Variant (821)..(821): Xaa in position 821 is any amino acid
  Variant (822)..(822): Xaa in position 822 is any or no amino acid
  Variant (824)..(829): Xaa in position 824 to 829 is any amino acid
  Variant (830)..(839): Xaa in position 830 to 839 is any or no amino acid
  Variant (842)..(842): Xaa in position 842 is any amino acid
  Variant (844)..(846): Xaa in position 844 to 846 is any amino acid
YXXAXXXLXXXXXXXXXXXXXXXXXXXXXXXXXXXXXXXXXXXXXXXXXXXXXXXXXXXXXXXXXXXXXXXXXXXXXXXXXXXXXXXXXXXXXXXXXXXXXXXXXXXXXXXXXXXXXXXXXXXXXXXXXXXXXXXXXXXXXXXXXXXXXXXXXXXXXXXXXXXXXXXXXXXXXXXXXXXXXXXXXLYALVXXXXKYXXXLXXVIXXXXXXXXXXXXXXXXXXXXXXXXXXLXXVLXYDLLXXXXXXXXXXXXXXXKXXIXRXXXXLXXXXXRXXXXXXXXXXXXLXXXXXXXXXXXXXXXXXXXXXXXXXXXXXXXXXXXXXXXXXXXXXXXXXXXXXXXXRWXRVNXLXXXXXXXXXXXXXXXXXXXXXXXXXXXXXXXXXXXXXXXXXXXXXXXXXXXXXXXXXXXXXXDXXVXXLXXXXXXXXXXXXXXXXXXXGXIILQDKASCXPAXLLXXXXXXXXXXXXXXXXXXXXXXXXXXXXVIDXCAAPGNKTSHLAAXLXXXXXXXXXXXXXXXXXXXXXXXXXXXXXXXXXXXXXIXAXEXXXXRXXXLXXMLXXAXXXXXXXXXXXXXXXXXXXXXDFXXXXXXXXXYXXVXXXLLDPSCSGSGIXXRXXXXXXXXXXXXXXXXXXXXXXXXXXXXXXXXXXXXXXXXXXXXXXXXXXXXXXXXXXXXXXXXXXXXXXXXXXXXXXXXXXXXXXXXXXXXXXXXXXXRLXXLAXXQXXXLXHALXXFPXXXRVXYSTCSIXXXENEXVVXXXLXXXXXXXXXXXXXXXXXXXXXLXXWXXXRGXXXXXXXXXXXXXXXXXXXXXXXXXXXXXXXLRXXPXXXXXXXXXXXXXXXXFFXAXXXR

SEQ ID NO: 59722 - protein, 14 aa, Artificial sequence
  Consensus
  Variant (2)..(2): Xaa in position 2 is Ile or Leu
  Variant (4)..(4): Xaa in position 4 is Asp, Gly or Asn
  Variant (5)..(5): Xaa in position 5 is Lys or Arg
  Variant (7)..(7): Xaa in position 7 is Ser or Thr
  Variant (9)..(9): Xaa in position 9 is Phe or Leu
  Variant (10)..(10): Xaa in position 10 is Ala or Pro
  Variant (11)..(11): Xaa in position 11 is Ala or Ser
  Variant (12)..(12): Xaa in position 12 is any amino acid
  Variant (13)..(13): Xaa in position 13 is Ile, Leu or Val
IXQXXAXCXXXXXL

SEQ ID NO: 59723 - protein, 14 aa, Artificial sequence
  Consensus
  Variant (2)..(2): Xaa in position 2 is Ala, Cys, Gly, Ser or Thr
  Variant (4)..(4): Xaa in position 4 is Ala or Ser
  Variant (8)..(8): Xaa in position 8 is any amino acid
  Variant (11)..(13): Xaa in position 11 to 13 is any amino acid
DXCXAPGXKTXXXA

SEQ ID NO: 59724 - protein, 11 aa, Artificial sequence
  Consensus
  Variant (9)..(9): Xaa in position 9 is Ile or Met
  Variant (10)..(10): Xaa in position 10 is any amino acid
  Variant (11)..(11): Xaa in position 11 is Ala, Cys, Gly, Asn, Ser or Thr
DPSCSGSGXXX

SEQ ID NO: 59725 - protein, 42 aa, Artificial sequence
  Consensus
  Variant (2)..(4): Xaa in position 2 to 4 is any amino acid
  Variant (6)..(8): Xaa in position 6 to 8 is any amino acid
  Variant (9)..(9): Xaa in position 9 is Ile, Leu, Met or Val
  Variant (10)..(10): Xaa in position 10 is any amino acid
  Variant (13)..(14): Xaa in position 13 to 14 is any amino acid
  Variant (15)..(15): Xaa in position 15 is any or no amino acid
  Variant (17)..(17): Xaa in position 17 is Asp, Gly or Pro
  Variant (18)..(21): Xaa in position 18 to 21 is any amino acid
  Variant (22)..(22): Xaa in position 22 is Ile, Leu or Val
  Variant (23)..(23): Xaa in position 23 is any amino acid
  Variant (29)..(29): Xaa in position 29 is Ile, Leu or Val
  Variant (30)..(32): Xaa in position 30 to 32 is any amino acid
  Variant (34)..(34): Xaa in position 34 is Asp or Asn
  Variant (36)..(36): Xaa in position 36 is any amino acid
  Variant (39)..(41): Xaa in position 39 to 41 is any amino acid
LXXXQXXXXXHAXXXFXXXXXXXYSTCSXXXXEXEXVVXXXL

SEQ ID NO: 59726 - DNA, 1518 bp, Saccharomyces cerevisiae; identical to SEQ ID NO: 2533
  CDS (1)..(1518)

SEQ ID NO: 59727 - protein, 505 aa, Saccharomyces cerevisiae; identical to SEQ ID NO: 2534

SEQ ID NO: 59728 - DNA, 1548 bp, Mus musculus (house mouse); identical to SEQ ID NO: 2535
  CDS (1)..(1548)

SEQ ID NO: 59729 - protein, 515 aa, Mus musculus (house mouse); identical to SEQ ID NO: 2536

SEQ ID NO: 59730 - DNA, 1593 bp, Fugu rubripes (Japanese pufferfish); identical to SEQ ID NO: 2537
  CDS (1)..(1593)

SEQ ID NO: 59731 - protein, 530 aa, Fugu rubripes (Japanese pufferfish); identical to SEQ ID NO: 2538

SEQ ID NO: 59732 - DNA, 1506 bp, Vibrio cholerae; identical to SEQ ID NO: 2539
  CDS (1)..(1506)

SEQ ID NO: 59733 - protein, 501 aa, Vibrio cholerae; identical to SEQ ID NO: 2540

SEQ ID NO: 59734 - DNA, 1470 bp, Pseudomonas aeruginosa; identical to SEQ ID NO: 2541
  CDS (1)..(1470)

SEQ ID NO: 59735 - protein, 489 aa, Pseudomonas aeruginosa; identical to SEQ ID NO: 2542

SEQ ID NO: 59736 - DNA, 1485 bp, Staphylococcus aureus; identical to SEQ ID NO: 2543
  CDS (1)..(1485)

SEQ ID NO: 59737 - protein, 494 aa, Staphylococcus aureus; identical to SEQ ID NO: 2544

SEQ ID NO: 59738 - DNA, 1488 bp, Streptococcus pneumoniae; identical to SEQ ID NO: 2545
  CDS (1)..(1488)

SEQ ID NO: 59739 - protein, 495 aa, Streptococcus pneumoniae; identical to SEQ ID NO: 2546

SEQ ID NO: 59740 - DNA, 1476 bp, Salmonella enterica subsp. enterica serovar Typhi; identical to SEQ ID NO: 2547
  CDS (1)..(1476)

SEQ ID NO: 59741 - protein, 491 aa, Salmonella enterica subsp. enterica serovar Typhi; identical to SEQ ID NO: 2548

SEQ ID NO: 59742 - DNA, 1476 bp, Agrobacterium tumefaciens; identical to SEQ ID NO: 2549
  CDS (1)..(1476)

SEQ ID NO: 59743 - protein, 491 aa, Agrobacterium tumefaciens; identical to SEQ ID NO: 2550

SEQ ID NO: 59744 - DNA, 1530 bp, Nostoc sp. PCC 7120; identical to SEQ ID NO: 2551
  CDS (1)..(1530)

SEQ ID NO: 59745 - protein, 509 aa, Nostoc sp. PCC 7120; identical to SEQ ID NO: 2552

SEQ ID NO: 59746 - DNA, 1386 bp, Agrobacterium tumefaciens; identical to SEQ ID NO: 2553
  CDS (1)..(1386)

SEQ ID NO: 59747 - protein, 461 aa, Agrobacterium tumefaciens; identical to SEQ ID NO: 2554

SEQ ID NO: 59748 - DNA, 1476 bp, Brucella melitensis; identical to SEQ ID NO: 2555
  CDS (1)..(1476)

SEQ ID NO: 59749 - protein, 491 aa, Brucella melitensis; identical to SEQ ID NO: 2556

SEQ ID NO: 59750 - DNA, 1458 bp, Zymomonas mobilis; identical to SEQ ID NO: 2557
  CDS (1)..(1458)

SEQ ID NO: 59751 - protein, 485 aa, Zymomonas mobilis; identical to SEQ ID NO: 2558

SEQ ID NO: 59752 - DNA, 1470 bp, Bacillus subtilis; identical to SEQ ID NO: 2559
  CDS (1)..(1470)

SEQ ID NO: 59753 - protein, 489 aa, Bacillus subtilis; identical to SEQ ID NO: 2560

SEQ ID NO: 59754 - DNA, 1401 bp, Mycobacterium tuberculosis; identical to SEQ ID NO: 2561
  CDS (1)..(1401)

SEQ ID NO: 59755 - protein, 466 aa, Mycobacterium tuberculosis; identical to SEQ ID NO: 2562

SEQ ID NO: 59756 - DNA, 1545 bp, Mycobacterium tuberculosis; identical to SEQ ID NO: 2563
  CDS (1)..(1545)

SEQ ID NO: 59757 - protein, 514 aa, Mycobacterium tuberculosis; identical to SEQ ID NO: 2564

SEQ ID NO: 59758 - DNA, 1320 bp, Chlamydia trachomatis; identical to SEQ ID NO: 2565
  CDS (1)..(1320)

SEQ ID NO: 59759 - protein, 439 aa, Chlamydia trachomatis; identical to SEQ ID NO: 2566

SEQ ID NO: 59760 - DNA, 1773 bp, Deinococcus radiodurans; identical to SEQ ID NO: 2567
  CDS (1)..(1773)

SEQ ID NO: 59761 - protein, 590 aa, Deinococcus radiodurans; identical to SEQ ID NO: 2568

SEQ ID NO: 59762 - DNA, 1467 bp, Pseudomonas aeruginosa; identical to SEQ ID NO: 2569
  CDS (1)..(1467)

SEQ ID NO: 59763 - protein, 488 aa, Pseudomonas aeruginosa; identical to SEQ ID NO: 2570

SEQ ID NO: 59764 - DNA, 1422 bp, Caulobacter crescentus; identical to SEQ ID NO: 2571
  CDS (1)..(1422)

SEQ ID NO: 59765 - protein, 473 aa, Caulobacter crescentus; identical to SEQ ID NO: 2572

SEQ ID NO: 59766 - DNA, 1437 bp, Borrelia burgdorferi (Lyme disease spirochete); identical to SEQ ID NO: 2573
  CDS (1)..(1437)

SEQ ID NO: 59767 - protein, 478 aa, Borrelia burgdorferi (Lyme disease spirochete); identical to SEQ ID NO: 2574

SEQ ID NO: 59768 - DNA, 1539 bp, Chlamydophila pneumoniae, Chlamydia pneumoniae; identical to SEQ ID NO: 2575
  CDS (1)..(1539)

SEQ ID NO: 59769 - protein, 512 aa, Chlamydophila pneumoniae, Chlamydia pneumoniae; identical to SEQ ID NO: 2576

SEQ ID NO: 59770 - DNA, 1476 bp, Escherichia coli; identical to SEQ ID NO: 2577
  CDS (1)..(1476)

SEQ ID NO: 59771 - protein, 491 aa, Escherichia coli; identical to SEQ ID NO: 2578

SEQ ID NO: 59772 - DNA, 1548 bp, Treponema pallidum subsp. pallidum (syphilis spirochete); identical to SEQ ID NO: 2579
  CDS (1)..(1548)

SEQ ID NO: 59773 - protein, 515 aa, Treponema pallidum subsp. pallidum (syphilis spirochete); identical to SEQ ID NO: 2580

SEQ ID NO: 59774 - DNA, 1476 bp, Buchnera sp; identical to SEQ ID NO: 2581
  CDS (1)..(1476)

SEQ ID NO: 59775 - protein, 491 aa, Buchnera sp; identical to SEQ ID NO: 2582

SEQ ID NO: 59776 - DNA, 1512 bp, Lactococcus lactis subsp. lactis; identical to SEQ ID NO: 2583
  CDS (1)..(1512)

SEQ ID NO: 59777 - protein, 503 aa, Lactococcus lactis subsp. lactis; identical to SEQ ID NO: 2584

SEQ ID NO: 59778 - DNA, 1572 bp, Drosophila melanogaster; identical to SEQ ID NO: 2585
  CDS (1)..(1572)

SEQ ID NO: 59779 - protein, 523 aa, Drosophila melanogaster; identical to SEQ ID NO: 2586

SEQ ID NO: 59780 - DNA, 1575 bp, Synechococcus sp; identical to SEQ ID NO: 2587
  CDS (1)..(1575)

SEQ ID NO: 59781 - protein, 524 aa, Synechococcus sp; identical to SEQ ID NO: 2588

SEQ ID NO: 59782 - DNA, 1485 bp, Haemophilus influenzae; identical to SEQ ID NO: 2589
  CDS (1)..(1485)

SEQ ID NO: 59783 - protein, 494 aa, Haemophilus influenzae; identical to SEQ ID NO: 2590

SEQ ID NO: 59784 - DNA, 1446 bp, Neisseria meningitidis; identical to SEQ ID NO: 2591
  CDS (1)..(1446)

SEQ ID NO: 59785 - protein, 481 aa, Neisseria meningitidis; identical to SEQ ID NO: 2592

SEQ ID NO: 59786 - DNA, 1278 bp, Helicobacter pylori; identical to SEQ ID NO: 2593
  CDS (1)..(1278)

SEQ ID NO: 59787 - protein, 425 aa, Helicobacter pylori; identical to SEQ ID NO: 2594

SEQ ID NO: 59788 - DNA, 1434 bp, Xylella fastidiosa; identical to SEQ ID NO: 2595
  CDS (1)..(1434)

SEQ ID NO: 59789 - protein, 477 aa, Xylella fastidiosa; identical to SEQ ID NO: 2596

SEQ ID NO: 59790 - DNA, 1296 bp, Aquifex aeolicus; identical to SEQ ID NO: 2597
  CDS (1)..(1296)

SEQ ID NO: 59791 - protein, 431 aa, Aquifex aeolicus; identical to SEQ ID NO: 2598

SEQ ID NO: 59792 - DNA, 1491 bp, Thermotoga maritima; identical to SEQ ID NO: 2599
  CDS (1)..(1491)

SEQ ID NO: 59793 - protein, 496 aa, Thermotoga maritima; identical to SEQ ID NO: 2600

SEQ ID NO: 59794 - DNA, 1494 bp, Kluyveromyces marxianus var. lactis, Candida sphaerica; identical to SEQ ID NO: 2601
  CDS (1)..(1494)

SEQ ID NO: 59795 - protein, 497 aa, Kluyveromyces marxianus var. lactis, Candida sphaerica; identical to SEQ ID NO: 2602

SEQ ID NO: 59796 - DNA, 2813 bp, Erwinia chrysanthemi; identical to SEQ ID NO: 2603
  CDS (322)..(1797)

SEQ ID NO: 59797 - protein, 491 aa, Erwinia chrysanthemi; identical to SEQ ID NO: 2604

SEQ ID NO: 59798 - DNA, 3244 bp, Plasmodium falciparum; identical to SEQ ID NO: 2605
  CDS (184)..(2916)

SEQ ID NO: 59799 - protein, 910 aa, Plasmodium falciparum; identical to SEQ ID NO: 2606

SEQ ID NO: 59800 - DNA, 1785 bp, Medicago sativa (alfalfa); identical to SEQ ID NO: 2607
  CDS (38)..(1585)

SEQ ID NO: 59801 - protein, 515 aa, Medicago sativa (alfalfa); identical to SEQ ID NO: 2608

SEQ ID NO: 59802 - DNA, 1689 bp, Solanum tuberosum (potato); identical to SEQ ID NO: 2609
  CDS (46)..(1581)

SEQ ID NO: 59803 - protein, 511 aa, Solanum tuberosum (potato); identical to SEQ ID NO: 2610

SEQ ID NO: 59804 - DNA, 1530 bp, Synechocystis sp; identical to SEQ ID NO: 2611
  CDS (1)..(1530)

SEQ ID NO: 59805 - protein, 509 aa, Synechocystis sp; identical to SEQ ID NO: 2612

SEQ ID NO: 59806 - DNA, 1953 bp, Nicotiana tabacum (common tobacco); identical to SEQ ID NO: 2613
  CDS (43)..(1824)

SEQ ID NO: 59807 - protein, 593 aa, Nicotiana tabacum (common tobacco); identical to SEQ ID NO: 2614

SEQ ID NO: 59808 - DNA, 1869 bp, Nicotiana tabacum (common tobacco); identical to SEQ ID NO: 2615
  CDS (22)..(1788)

SEQ ID NO: 59809 - protein, 588 aa, Nicotiana tabacum (common tobacco); identical to SEQ ID NO: 2616

SEQ ID NO: 59810 - DNA, 2058 bp, Solanum tuberosum (potato); identical to SEQ ID NO: 2617
  CDS (41)..(1774)

SEQ ID NO: 59811 - protein, 577 aa, Solanum tuberosum (potato); identical to SEQ ID NO: 2618

SEQ ID NO: 59812 - DNA, 2049 bp, Spinacia oleracea (spinach); identical to SEQ ID NO: 2619
  CDS (147)..(1871)

SEQ ID NO: 59813 - protein, 574 aa, Spinacia oleracea (spinach); identical to SEQ ID NO: 2620

SEQ ID NO: 59814 - DNA, 2359 bp, Petroselinum crispum (parsley); identical to SEQ ID NO: 2621
  CDS (172)..(1986)

SEQ ID NO: 59815 - protein, 604 aa, Petroselinum crispum (parsley); identical to SEQ ID NO: 2622

SEQ ID NO: 59816 - DNA, 1848 bp, Petroselinum crispum (parsley); identical to SEQ ID NO: 2623
  CDS (41)..(1528)

SEQ ID NO: 59817 - protein, 495 aa, Petroselinum crispum (parsley); identical to SEQ ID NO: 2624

SEQ ID NO: 59818 - DNA, 1957 bp, Petroselinum crispum (parsley); identical to SEQ ID NO: 2625
  CDS (74)..(1678)

SEQ ID NO: 59819 - protein, 534 aa, Petroselinum crispum (parsley); identical to SEQ ID NO: 2626

SEQ ID NO: 59820 - DNA, 1569 bp, Caenorhabditis elegans; identical to SEQ ID NO: 2627
  CDS (1)..(1569)

SEQ ID NO: 59821 - protein, 522 aa, Caenorhabditis elegans; identical to SEQ ID NO: 2628

SEQ ID NO: 59822 - DNA, 1779 bp, Streptomyces coelicolor; identical to SEQ ID NO: 2629
  CDS (1)..(1779)

SEQ ID NO: 59823 - protein, 592 aa, Streptomyces coelicolor; identical to SEQ ID NO: 2630

SEQ ID NO: 59824 - DNA, 1524 bp, Streptomyces coelicolor; identical to SEQ ID NO: 2631
  CDS (1)..(1524)

SEQ ID NO: 59825 - protein, 507 aa, Streptomyces coelicolor; identical to SEQ ID NO: 2632

SEQ ID NO: 59826 - DNA, 1422 bp, Schizosaccharomyces pombe; identical to SEQ ID NO: 2633
  CDS (1)..(1422)

SEQ ID NO: 59827 - protein, 473 aa, Schizosaccharomyces pombe; identical to SEQ ID NO: 2634

SEQ ID NO: 59828 - DNA, 1503 bp, Schizosaccharomyces pombe; identical to SEQ ID NO: 2635
  CDS (1)..(1503)

SEQ ID NO: 59829 - protein, 500 aa, Schizosaccharomyces pombe; identical to SEQ ID NO: 2636

SEQ ID NO: 59830 - DNA, 1428 bp, Schizosaccharomyces pombe; identical to SEQ ID NO: 2637
  CDS (1)..(1428)

SEQ ID NO: 59831 - protein, 475 aa, Schizosaccharomyces pombe; identical to SEQ ID NO: 2638

SEQ ID NO: 59832 - DNA, 1461 bp, Leuconostoc mesenteroides; identical to SEQ ID NO: 2639
  CDS (1)..(1461)

SEQ ID NO: 59833 - protein, 486 aa, Leuconostoc mesenteroides; identical to SEQ ID NO: 2640

SEQ ID NO: 59834 - DNA, 3038 bp, Corynebacterium glutamicum; identical to SEQ ID NO: 2641
  CDS (115)..(1659)

SEQ ID NO: 59835 - protein, 514 aa, Corynebacterium glutamicum; identical to SEQ ID NO: 2642

SEQ ID NO: 59836 - DNA, 1852 bp, Nicotiana tabacum; identical to SEQ ID NO: 2643
  CDS (102)..(1634)

SEQ ID NO: 59837 - protein, 510 aa, Nicotiana tabacum; identical to SEQ ID NO: 2644

SEQ ID NO: 59838 - DNA, 1821 bp, Nicotiana tabacum; identical to SEQ ID NO: 2645
  CDS (88)..(1623)

SEQ ID NO: 59839 - protein, 511 aa, Nicotiana tabacum; identical to SEQ ID NO: 2646

SEQ ID NO: 59840 - DNA, 1808 bp, Chlamydia trachomatis; identical to SEQ ID NO: 2647
  CDS (105)..(1643)

SEQ ID NO: 59841 - protein, 512 aa, Chlamydia trachomatis; identical to SEQ ID NO: 2648

SEQ ID NO: 59842 - DNA, 2750 bp, Plasmodium falciparum; identical to SEQ ID NO: 2649
  CDS (48)..(2258)

SEQ ID NO: 59843 - protein, 736 aa, Plasmodium falciparum; identical to SEQ ID NO: 2650

SEQ ID NO: 59844 - DNA, 1509 bp, Debaryomyces hansenii; identical to SEQ ID NO: 2651
  CDS (1)..(1509)

SEQ ID NO: 59845 - protein, 502 aa, Debaryomyces hansenii; identical to SEQ ID NO: 2652

SEQ ID NO: 59846 - DNA, 1503 bp, Candida glabrata; identical to SEQ ID NO: 2653
  CDS (1)..(1503)

SEQ ID NO: 59847 - protein, 500 aa, Candida glabrata; identical to SEQ ID NO: 2654

SEQ ID NO: 59848 - DNA, 1485 bp, Bacillus thuringiensis serovar konkukian str; identical to SEQ ID NO: 2655
  CDS (1)..(1485)

SEQ ID NO: 59849 - protein, 494 aa, Bacillus thuringiensis serovar konkukian str; identical to SEQ ID NO: 2656

SEQ ID NO: 59850 - DNA, 1554 bp, Oryza sativa; identical to SEQ ID NO: 2657
  CDS (1)..(1554)

SEQ ID NO: 59851 - protein, 517 aa, Oryza sativa; identical to SEQ ID NO: 2658

SEQ ID NO: 59852 - DNA, 1500 bp, Photobacterium profundum; identical to SEQ ID NO: 2659
  CDS (1)..(1500)

SEQ ID NO: 59853 - protein, 499 aa, Photobacterium profundum; identical to SEQ ID NO: 2660

SEQ ID NO: 59854 - DNA, 1551 bp, Parachlamydia sp; identical to SEQ ID NO: 2661
  CDS (1)..(1551)

SEQ ID NO: 59855 - protein, 516 aa, Parachlamydia sp; identical to SEQ ID NO: 2662

SEQ ID NO: 59856 - DNA, 1515 bp, Rhodopseudomonas palustris; identical to SEQ ID NO: 2663
  CDS (1)..(1515)

SEQ ID NO: 59857 - protein, 504 aa, Rhodopseudomonas palustris; identical to SEQ ID NO: 2664

SEQ ID NO: 59858 - DNA, 1650 bp, Corynebacterium diphtheriae; identical to SEQ ID NO: 2665
  CDS (1)..(1650)

SEQ ID NO: 59859 - protein, 549 aa, Corynebacterium diphtheriae; identical to SEQ ID NO: 2666

SEQ ID NO: 59860 - DNA, 1446 bp, uncultured bacterium 581; identical to SEQ ID NO: 2667
  CDS (1)..(1446)

SEQ ID NO: 59861 - protein, 481 aa, uncultured bacterium 581; identical to SEQ ID NO: 2668

SEQ ID NO: 59862 - DNA, 1602 bp, Nonomuraea sp; identical to SEQ ID NO: 2669
  CDS (1)..(1602)

SEQ ID NO: 59863 - protein, 533 aa, Nonomuraea sp; identical to SEQ ID NO: 2670

SEQ ID NO: 59864 - DNA, 1476 bp, Listeria monocytogenes; identical to SEQ ID NO: 2671
  CDS (1)..(1476)

SEQ ID NO: 59865 - protein, 491 aa, Listeria monocytogenes; identical to SEQ ID NO: 2672

SEQ ID NO: 59866 - DNA, 1485 bp, Bacillus cereus; identical to SEQ ID NO: 2673
  CDS (1)..(1485)

SEQ ID NO: 59867 - protein, 494 aa, Bacillus cereus; identical to SEQ ID NO: 2674

SEQ ID NO: 59868 - DNA, 1410 bp, Mycobacterium paratuberculosis; identical to SEQ ID NO: 2675
  CDS (1)..(1410)

SEQ ID NO: 59869 - protein, 469 aa, Mycobacterium paratuberculosis; identical to SEQ ID NO: 2676

SEQ ID NO: 59870 - DNA, 2454 bp, Mycobacterium paratuberculosis; identical to SEQ ID NO: 2677
  CDS (1)..(2454)

SEQ ID NO: 59871 - protein, 817 aa, Mycobacterium paratuberculosis; identical to SEQ ID NO: 2678

SEQ ID NO: 59872 - DNA, 1545 bp, Mycobacterium paratuberculosis; identical to SEQ ID NO: 2679
  CDS (1)..(1545)

SEQ ID NO: 59873 - protein, 514 aa, Mycobacterium paratuberculosis; identical to SEQ ID NO: 2680

SEQ ID NO: 59874 - DNA, 1449 bp, Lactobacillus johnsonii; identical to SEQ ID NO: 2681
  CDS (1)..(1449)

SEQ ID NO: 59875 - protein, 482 aa, Lactobacillus johnsonii; identical to SEQ ID NO: 2682

SEQ ID NO: 59876 - DNA, 1539 bp, Ashbya gossypii; identical to SEQ ID NO: 2683
  CDS (1)..(1539)

SEQ ID NO: 59877 - protein, 512 aa, Ashbya gossypii; identical to SEQ ID NO: 2684

SEQ ID NO: 59878 - DNA, 1734 bp, Oryza sativa; identical to SEQ ID NO: 2685
  CDS (1)..(1734)

SEQ ID NO: 59879 - protein, 577 aa, Oryza sativa; identical to SEQ ID NO: 2686

SEQ ID NO: 59880 - DNA, 1467 bp, Gluconobacter oxydans; identical to SEQ ID NO: 2687
  CDS (1)..(1467)

SEQ ID NO: 59881 - protein, 488 aa, Gluconobacter oxydans; identical to SEQ ID NO: 2688

SEQ ID NO: 59882 - DNA, 1581 bp, Vibrio vulnificus; identical to SEQ ID NO: 2689
  CDS (1)..(1581)

SEQ ID NO: 59883 - protein, 526 aa, Vibrio vulnificus; identical to SEQ ID NO: 2690

SEQ ID NO: 59884 - DNA, 1476 bp, Photorhabdus luminescens; identical to SEQ ID NO: 2691
  CDS (1)..(1476)

SEQ ID NO: 59885 - protein, 491 aa, Photorhabdus luminescens; identical to SEQ ID NO: 2692

SEQ ID NO: 59886 - DNA, 1539 bp, Gloeobacter violaceus; identical to SEQ ID NO: 2693
  CDS (1)..(1539)

SEQ ID NO: 59887 - protein, 512 aa, Gloeobacter violaceus; identical to SEQ ID NO: 2694

SEQ ID NO: 59888 - DNA, 1539 bp, Gloeobacter violaceus; identical to SEQ ID NO: 2695
  CDS (1)..(1539)

SEQ ID NO: 59889 - protein, 512 aa, Gloeobacter violaceus; identical to SEQ ID NO: 2696

SEQ ID NO: 59890 - DNA, 1479 bp, Chromobacterium violaceum; identical to SEQ ID NO: 2697
  CDS (1)..(1479)

SEQ ID NO: 59891 - protein, 492 aa, Chromobacterium violaceum; identical to SEQ ID NO: 2698

SEQ ID NO: 59892 - DNA, 2229 bp, Giardia lamblia ATCC 50803; identical to SEQ ID NO: 2699
  CDS (1)..(2229)

SEQ ID NO: 59893 - protein, 742 aa, Giardia lamblia ATCC 50803; identical to SEQ ID NO: 2700

SEQ ID NO: 59894 - DNA, 2850 bp, Plasmodium yoelii yoelii; identical to SEQ ID NO: 2701
  CDS (1)..(2850)

SEQ ID NO: 59895 - protein, 949 aa, Plasmodium yoelii yoelii; identical to SEQ ID NO: 2702

SEQ ID NO: 59896 - DNA, 1476 bp, Neurospora crassa; identical to SEQ ID NO: 2703
  CDS (1)..(1476)

SEQ ID NO: 59897 - protein, 491 aa, Neurospora crassa; identical to SEQ ID NO: 2704

SEQ ID NO: 59898 - DNA, 1524 bp, Synechococcus sp; identical to SEQ ID NO: 2705
  CDS (1)..(1524)

SEQ ID NO: 59899 - protein, 507 aa, Synechococcus sp; identical to SEQ ID NO: 2706

SEQ ID NO: 59900 - DNA, 1455 bp, Rhodopirellula baltica; identical to SEQ ID NO: 2707
  CDS (1)..(1455)

SEQ ID NO: 59901 - protein, 484 aa, Rhodopirellula baltica; identical to SEQ ID NO: 2708

SEQ ID NO: 59902 - DNA, 1524 bp, Prochlorococcus marinus subsp; identical to SEQ ID NO: 2709
  CDS (1)..(1524)

SEQ ID NO: 59903 - protein, 507 aa, Prochlorococcus marinus subsp; identical to SEQ ID NO: 2710

SEQ ID NO: 59904 - DNA, 1524 bp, Prochlorococcus marinus; identical to SEQ ID NO: 2711
  CDS (1)..(1524)

SEQ ID NO: 59905 - protein, 507 aa, Prochlorococcus marinus; identical to SEQ ID NO: 2712

SEQ ID NO: 59906 - DNA, 1521 bp, Prochlorococcus marinus; identical to SEQ ID NO: 2713
  CDS (1)..(1521)

SEQ ID NO: 59907 - protein, 506 aa, Prochlorococcus marinus; identical to SEQ ID NO: 2714

SEQ ID NO: 59908 - DNA, 1488 bp, Haemophilus ducreyi; identical to SEQ ID NO: 2715
  CDS (1)..(1488)

SEQ ID NO: 59909 - protein, 495 aa, Haemophilus ducreyi; identical to SEQ ID NO: 2716

SEQ ID NO: 59910 - DNA, 1497 bp, Candidatus Blochmannia floridanus; identical to SEQ ID NO: 2717
  CDS (1)..(1497)

SEQ ID NO: 59911 - protein, 498 aa, Candidatus Blochmannia floridanus; identical to SEQ ID NO: 2718

SEQ ID NO: 59912 - DNA, 1768 bp, Oryza sativa; identical to SEQ ID NO: 2719
  CDS (2)..(1768)

SEQ ID NO: 59913 - protein, 588 aa, Oryza sativa; identical to SEQ ID NO: 2720

SEQ ID NO: 59914 - DNA, 1548 bp, Bos indicus; identical to SEQ ID NO: 2721
  CDS (1)..(1548)

SEQ ID NO: 59915 - protein, 515 aa, Bos indicus; identical to SEQ ID NO: 2722

SEQ ID NO: 59916 - DNA, 1536 bp, Chlamydophila caviae; identical to SEQ ID NO: 2723
  CDS (1)..(1536)

SEQ ID NO: 59917 - protein, 511 aa, Chlamydophila caviae; identical to SEQ ID NO: 2724

SEQ ID NO: 59918 - DNA, 1524 bp, Streptomyces avermitilis; identical to SEQ ID NO: 2725
  CDS (1)..(1524)

SEQ ID NO: 59919 - protein, 507 aa, Streptomyces avermitilis; identical to SEQ ID NO: 2726

SEQ ID NO: 59920 - DNA, 1647 bp, Streptomyces avermitilis; identical to SEQ ID NO: 2727
  CDS (1)..(1647)

SEQ ID NO: 59921 - protein, 548 aa, Streptomyces avermitilis; identical to SEQ ID NO: 2728

SEQ ID NO: 59922 - DNA, 1491 bp, Nitrosomonas europaea; identical to SEQ ID NO: 2729
  CDS (1)..(1491)

SEQ ID NO: 59923 - protein, 496 aa, Nitrosomonas europaea; identical to SEQ ID NO: 2730

SEQ ID NO: 59924 - DNA, 1524 bp, Enterococcus faecalis; identical to SEQ ID NO: 2731
  CDS (1)..(1524)

SEQ ID NO: 59925 - protein, 507 aa, Enterococcus faecalis; identical to SEQ ID NO: 2732

SEQ ID NO: 59926 - DNA, 1464 bp, Tropheryma whipplei; identical to SEQ ID NO: 2733
  CDS (1)..(1464)

SEQ ID NO: 59927 - protein, 487 aa, Tropheryma whipplei; identical to SEQ ID NO: 2734

SEQ ID NO: 59928 - DNA, 2145 bp, Leishmania mexicana; identical to SEQ ID NO: 2735
  CDS (298)..(1986)

SEQ ID NO: 59929 - protein, 562 aa, Leishmania mexicana; identical to SEQ ID NO: 2736

SEQ ID NO: 59930 - DNA, 1494 bp, Dictyostelium discoideum; identical to SEQ ID NO: 2737
  CDS (1)..(1494)

SEQ ID NO: 59931 - protein, 497 aa, Dictyostelium discoideum; identical to SEQ ID NO: 2738

SEQ ID NO: 59932 - DNA, 1503 bp, Xylella fastidiosa; identical to SEQ ID NO: 2739
  CDS (1)..(1503)

SEQ ID NO: 59933 - protein, 500 aa, Xylella fastidiosa; identical to SEQ ID NO: 2740

SEQ ID NO: 59934 - DNA, 1506 bp, Vibrio parahaemolyticus; identical to SEQ ID NO: 2741
  CDS (1)..(1506)

SEQ ID NO: 59935 - protein, 501 aa, Vibrio parahaemolyticus; identical to SEQ ID NO: 2742

SEQ ID NO: 59936 - DNA, 1533 bp, Pseudomonas syringae; identical to SEQ ID NO: 2743
  CDS (1)..(1533)

SEQ ID NO: 59937 - protein, 510 aa, Pseudomonas syringae; identical to SEQ ID NO: 2744

SEQ ID NO: 59938 - DNA, 1470 bp, Pseudomonas syringae; identical to SEQ ID NO: 2745
  CDS (1)..(1470)

SEQ ID NO: 59939 - protein, 489 aa, Pseudomonas syringae; identical to SEQ ID NO: 2746

SEQ ID NO: 59940 - DNA, 1458 bp, Pseudomonas putida; identical to SEQ ID NO: 2747
  CDS (1)..(1458)

SEQ ID NO: 59941 - protein, 485 aa, Pseudomonas putida; identical to SEQ ID NO: 2748

SEQ ID NO: 59942 - DNA, 1506 bp, Pseudomonas putida; identical to SEQ ID NO: 2749
  CDS (1)..(1506)

SEQ ID NO: 59943 - protein, 501 aa, Pseudomonas putida; identical to SEQ ID NO: 2750

SEQ ID NO: 59944 - DNA, 1470 bp, Pseudomonas putida; identical to SEQ ID NO: 2751
  CDS (1)..(1470)

SEQ ID NO: 59945 - protein, 489 aa, Pseudomonas putida; identical to SEQ ID NO: 2752

SEQ ID NO: 59946 - DNA, 1485 bp, Lactobacillus plantarum; identical to SEQ ID NO: 2753
  CDS (1)..(1485)

SEQ ID NO: 59947 - protein, 494 aa, Lactobacillus plantarum; identical to SEQ ID NO: 2754

SEQ ID NO: 59948 - DNA, 1440 bp, Clostridium tetani; identical to SEQ ID NO: 2755
  CDS (1)..(1440)

SEQ ID NO: 59949 - protein, 479 aa, Clostridium tetani; identical to SEQ ID NO: 2756

SEQ ID NO: 59950 - DNA, 1512 bp, Bradyrhizobium japonicum; identical to SEQ ID NO: 2757
  CDS (1)..(1512)

SEQ ID NO: 59951 - protein, 503 aa, Bradyrhizobium japonicum; identical to SEQ ID NO: 2758

SEQ ID NO: 59952 - DNA, 1497 bp, Bacteroides thetaiotaomicron; identical to SEQ ID NO: 2759
  CDS (1)..(1497)

SEQ ID NO: 59953 - protein, 498 aa, Bacteroides thetaiotaomicron; identical to SEQ ID NO: 2760

SEQ ID NO: 59954 - DNA, 4583 bp, Mus musculus; identical to SEQ ID NO: 2761
  CDS (119)..(2488)

SEQ ID NO: 59955 - protein, 789 aa, Mus musculus; identical to SEQ ID NO: 2762

SEQ ID NO: 59956 - DNA, 1485 bp, Staphylococcus epidermidis; identical to SEQ ID NO: 2763
  CDS (1)..(1485)

SEQ ID NO: 59957 - protein, 494 aa, Staphylococcus epidermidis; identical to SEQ ID NO: 2764

SEQ ID NO: 59958 - DNA, 1590 bp, Yersinia pestis; identical to SEQ ID NO: 2765
  CDS (1)..(1590)

SEQ ID NO: 59959 - protein, 529 aa, Yersinia pestis; identical to SEQ ID NO: 2766

SEQ ID NO: 59960 - DNA, 1530 bp, Synechococcus elongatus; identical to SEQ ID NO: 2767
  CDS (1)..(1530)

SEQ ID NO: 59961 - protein, 509 aa, Synechococcus elongatus; identical to SEQ ID NO: 2768

SEQ ID NO: 59962 - DNA, 1473 bp, Shewanella oneidensis; identical to SEQ ID NO: 2769
  CDS (1)..(1473)

SEQ ID NO: 59963 - protein, 490 aa, Shewanella oneidensis; identical to SEQ ID NO: 2770

SEQ ID NO: 59964 - DNA, 1476 bp, Oceanobacillus iheyensis; identical to SEQ ID NO: 2771
  CDS (1)..(1476)

SEQ ID NO: 59965 - protein, 491 aa, Oceanobacillus iheyensis; identical to SEQ ID NO: 2772

SEQ ID NO: 59966 - DNA, 1344 bp, Corynebacterium efficiens; identical to SEQ ID NO: 2773
  CDS (1)..(1344)

SEQ ID NO: 59967 - protein, 447 aa, Corynebacterium efficiens; identical to SEQ ID NO: 2774

SEQ ID NO: 59968 - DNA, 1545 bp, Corynebacterium efficiens; identical to SEQ ID NO: 2775
  CDS (1)..(1545)

SEQ ID NO: 59969 - protein, 514 aa, Corynebacterium efficiens; identical to SEQ ID NO: 2776

SEQ ID NO: 59970 - DNA, 1668 bp, Bifidobacterium longum; identical to SEQ ID NO: 2777
  CDS (1)..(1668)

SEQ ID NO: 59971 - protein, 555 aa, Bifidobacterium longum; identical to SEQ ID NO: 2778

SEQ ID NO: 59972 - DNA, 1284 bp, Rhodococcus opacus; identical to SEQ ID NO: 2779
  CDS (1)..(1284)

SEQ ID NO: 59973 - protein, 427 aa, Rhodococcus opacus; identical to SEQ ID NO: 2780

SEQ ID NO: 59974 - DNA, 2879 bp, Leishmania guyanensis; identical to SEQ ID NO: 2781
  misc_feature (1992)..(2321): n is a, c, g, or t
  misc_feature (2700)..(2700): n is a, c, g, or t
  misc_feature (2840)..(2840): n is a, c, g, or t
  CDS (205)..(1893)

SEQ ID NO: 59975 - protein, 562 aa, Leishmania guyanensis; identical to SEQ ID NO: 2782

SEQ ID NO: 59976 - DNA, 1689 bp, Leishmania mexicana; identical to SEQ ID NO: 2783
  misc_feature (227)..(444): n is a, c, g, or t
  misc_feature (1475)..(1528): n is a, c, g, or t
  CDS (1)..(1689)

SEQ ID NO: 59977 - protein, 562 aa, Leishmania mexicana; identical to SEQ ID NO: 2784
  misc_feature (76)..(148): Xaa can be any naturally occuring amino acid
  misc_feature (187)..(187): Xaa can be any naturally occuring amino acid
  misc_feature (197)..(197): Xaa can be any naturally occuring amino acid
  misc_feature (224)..(224): Xaa can be any naturally occuring amino acid
  misc_feature (243)..(243): Xaa can be any naturally occuring amino acid
  misc_feature (250)..(250): Xaa can be any naturally occuring amino acid
  misc_feature (492)..(510): Xaa can be any naturally occuring amino acid

SEQ ID NO: 59978 - DNA, 2916 bp, Leishmania amazonensis; identical to SEQ ID NO: 2785
  misc_feature (2191)..(2311): n is a, c, g, or t
  CDS (207)..(1895)

SEQ ID NO: 59979 - protein, 562 aa, Leishmania amazonensis; identical to SEQ ID NO: 2786
  misc_feature (463)..(463): Xaa can be any naturally occuring amino acid
  misc_feature (481)..(481): Xaa can be any naturally occuring amino acid

SEQ ID NO: 59980 - DNA, 1440 bp, Chlorobium tepidum; identical to SEQ ID NO: 2787
  CDS (1)..(1440)

SEQ ID NO: 59981 - protein, 479 aa, Chlorobium tepidum; identical to SEQ ID NO: 2788

SEQ ID NO: 59982 - DNA, 2187 bp, Methylobacterium extorquens; identical to SEQ ID NO: 2789
  CDS (640)..(2187)

SEQ ID NO: 59983 - protein, 515 aa, Methylobacterium extorquens; identical to SEQ ID NO: 2790

SEQ ID NO: 59984 - DNA, 1476 bp, Bartonella henselae; identical to SEQ ID NO: 2791
  CDS (1)..(1476)

SEQ ID NO: 59985 - protein, 491 aa, Bartonella henselae; identical to SEQ ID NO: 2792

SEQ ID NO: 59986 - DNA, 2266 bp, Toxoplasma gondii; identical to SEQ ID NO: 2793
  CDS (169)..(1851)

SEQ ID NO: 59987 - protein, 560 aa, Toxoplasma gondii; identical to SEQ ID NO: 2794

SEQ ID NO: 59988 - DNA, 1923 bp, Xanthomonas campestris; identical to SEQ ID NO: 2795
  CDS (1)..(1923)

SEQ ID NO: 59989 - protein, 640 aa, Xanthomonas campestris; identical to SEQ ID NO: 2796

SEQ ID NO: 59990 - DNA, 1431 bp, Xanthomonas campestris; identical to SEQ ID NO: 2797
  CDS (1)..(1431)

SEQ ID NO: 59991 - protein, 476 aa, Xanthomonas campestris; identical to SEQ ID NO: 2798

SEQ ID NO: 59992 - DNA, 1839 bp, Xanthomonas axonopodis; identical to SEQ ID NO: 2799
  CDS (1)..(1839)

SEQ ID NO: 59993 - protein, 612 aa, Xanthomonas axonopodis; identical to SEQ ID NO: 2800

SEQ ID NO: 59994 - DNA, 1431 bp, Xanthomonas axonopodis; identical to SEQ ID NO: 2801
  CDS (1)..(1431)

SEQ ID NO: 59995 - protein, 476 aa, Xanthomonas axonopodis; identical to SEQ ID NO: 2802

SEQ ID NO: 59996 - DNA, 1458 bp, Thermoanaerobacter tengcongensis; identical to SEQ ID NO: 2803
  CDS (1)..(1458)

SEQ ID NO: 59997 - protein, 485 aa, Thermoanaerobacter tengcongensis; identical to SEQ ID NO: 2804

SEQ ID NO: 59998 - DNA, 1762 bp, Oryza sativa; identical to SEQ ID NO: 2805
  CDS (41)..(1558)

SEQ ID NO: 59999 - protein, 505 aa, Oryza sativa; identical to SEQ ID NO: 2806

SEQ ID NO: 60000 - DNA, 1305 bp, Encephalitozoon cuniculi; identical to SEQ ID NO: 2807
  CDS (1)..(1305)

SEQ ID NO: 60001 - protein, 434 aa, Encephalitozoon cuniculi; identical to SEQ ID NO: 2808

SEQ ID NO: 60002 - DNA, 2125 bp, Drosophila melanogaster; identical to SEQ ID NO: 2809
  CDS (158)..(1738)

SEQ ID NO: 60003 - protein, 526 aa, Drosophila melanogaster; identical to SEQ ID NO: 2810

SEQ ID NO: 60004 - DNA, 1470 bp, Ralstonia solanacearum; identical to SEQ ID NO: 2811
  CDS (1)..(1470)

SEQ ID NO: 60005 - protein, 489 aa, Ralstonia solanacearum; identical to SEQ ID NO: 2812

SEQ ID NO: 60006 - DNA, 1521 bp, Enterococcus mundtii; identical to SEQ ID NO: 2813
  CDS (1)..(1521)

SEQ ID NO: 60007 - protein, 506 aa, Enterococcus mundtii; identical to SEQ ID NO: 2814

SEQ ID NO: 60008 - DNA, 2230 bp, Homo sapiens; identical to SEQ ID NO: 2815
  CDS (54)..(1601)

SEQ ID NO: 60009 - protein, 515 aa, Homo sapiens [sequence omitted]

SEQ ID NO: 60010 - DNA, 1470 bp, Rhizobium loti; identical to SEQ ID NO: 2817
  CDS (1)..(1470)

SEQ ID NO: 60011 - protein, 489 aa, Rhizobium loti; identical to SEQ ID NO: 2818

SEQ ID NO: 60012 - DNA, 1428 bp, Rhizobium loti; identical to SEQ ID NO: 2819
  CDS (1)..(1428)

SEQ ID NO: 60013 - protein, 475 aa, Rhizobium loti; identical to SEQ ID NO: 2820

SEQ ID NO: 60014 - DNA, 3584 bp, Plasmodium berghei; identical to SEQ ID NO: 2821
  CDS (370)..(3222)

SEQ ID NO: 60015 - protein, 950 aa, Plasmodium berghei; identical to SEQ ID NO: 2822

SEQ ID NO: 60016 - DNA, 1491 bp, Pasteurella multocida; identical to SEQ ID NO: 2823
  CDS (1)..(1491)

SEQ ID NO: 60017 - protein, 496 aa, Pasteurella multocida; identical to SEQ ID NO: 2824

SEQ ID NO: 60018 - DNA, 1470 bp, Pseudomonas putida; identical to SEQ ID NO: 2825
  CDS (1)..(1470)

SEQ ID NO: 60019 - protein, 489 aa, Pseudomonas putida; identical to SEQ ID NO: 2826

SEQ ID NO: 60020 - DNA, 1566 bp, Trypanosoma brucei; identical to SEQ ID NO: 2827
  CDS (1)..(1566)

SEQ ID NO: 60021 - protein, 521 aa, Trypanosoma brucei; identical to SEQ ID NO: 2828

SEQ ID NO: 60022 - DNA, 1904 bp, Triticum aestivum; identical to SEQ ID NO: 2829
  CDS (153)..(1682)

SEQ ID NO: 60023 - protein, 509 aa, Triticum aestivum; identical to SEQ ID NO: 2830

SEQ ID NO: 60024 - DNA, 2098 bp, Solanum tuberosum; identical to SEQ ID NO: 2831
  CDS (27)..(1775)

SEQ ID NO: 60025 - protein, 582 aa, Solanum tuberosum; identical to SEQ ID NO: 2832

SEQ ID NO: 60026 - DNA, 1924 bp, Dunaliella bioculata; identical to SEQ ID NO: 2833
  CDS (68)..(1840)

SEQ ID NO: 60027 - protein, 590 aa, Dunaliella bioculata; identical to SEQ ID NO: 2834

SEQ ID NO: 60028 - DNA, 1976 bp, Cyanidium caldarium; identical to SEQ ID NO: 2835
  CDS (46)..(1848)

SEQ ID NO: 60029 - protein, 600 aa, Cyanidium caldarium; identical to SEQ ID NO: 2836

SEQ ID NO: 60030 - DNA, 2106 bp, Drosophila melanogaster; identical to SEQ ID NO: 2837
  CDS (28)..(1746)

SEQ ID NO: 60031 - protein, 572 aa, Drosophila melanogaster; identical to SEQ ID NO: 2838

SEQ ID NO: 60032 - DNA, 1777 bp, Mesembryanthemum crystallinum; identical to SEQ ID NO: 2839
  CDS (39)..(1589)

SEQ ID NO: 60033 - protein, 516 aa, Mesembryanthemum crystallinum; identical to SEQ ID NO: 2840

SEQ ID NO: 60034 - DNA, 1542 bp, Mus musculus; identical to SEQ ID NO: 2841
  CDS (1)..(1542)

SEQ ID NO: 60035 - protein, 513 aa, Mus musculus; identical to SEQ ID NO: 2842

SEQ ID NO: 60036 - DNA, 1485 bp, Actinobacillus actinomycetemcomitans; identical to SEQ ID NO: 2843
  CDS (1)..(1485)

SEQ ID NO: 60037 - protein, 494 aa, Actinobacillus actinomycetemcomitans; identical to SEQ ID NO: 2844

SEQ ID NO: 60038 - DNA, 1473 bp, Buchnera aphidicola; identical to SEQ ID NO: 2845
  CDS (1)..(1473)

SEQ ID NO: 60039 - protein, 490 aa, Buchnera aphidicola; identical to SEQ ID NO: 2846

SEQ ID NO: 60040 - DNA, 1473 bp, Buchnera aphidicola; identical to SEQ ID NO: 2847
  CDS (1)..(1473)

SEQ ID NO: 60041 - protein, 490 aa, Buchnera aphidicola; identical to SEQ ID NO: 2848

SEQ ID NO: 60042 - DNA, 2049 bp, Ceratitis capitata; identical to SEQ ID NO: 2849
  CDS (60)..(1640)

SEQ ID NO: 60043 - protein, 526 aa, Ceratitis capitata; identical to SEQ ID NO: 2850

SEQ ID NO: 60044 - DNA, 1524 bp, Chlamydia muridarum; identical to SEQ ID NO: 2851
  CDS (1)..(1524)

SEQ ID NO: 60045 - protein, 507 aa, Chlamydia muridarum; identical to SEQ ID NO: 2852

SEQ ID NO: 60046 - DNA, 2062 bp, Drosophila melanogaster; identical to SEQ ID NO: 2853
  CDS (303)..(1877)

SEQ ID NO: 60047 - protein, 524 aa, Drosophila melanogaster; identical to SEQ ID NO: 2854

SEQ ID NO: 60048 - DNA, 1536 bp, Emericella nidulans; identical to SEQ ID NO: 2855
  CDS (1)..(1536)

SEQ ID NO: 60049 - protein, 511 aa, Emericella nidulans; identical to SEQ ID NO: 2856

SEQ ID NO: 60050 - DNA, 1957 bp, Leuconostoc mesenteroides; identical to SEQ ID NO: 2857
  CDS (206)..(1666)

SEQ ID NO: 60051 - protein, 486 aa, Leuconostoc mesenteroides; identical to SEQ ID NO: 2858

SEQ ID NO: 60052 - DNA, 2055 bp, Macropus robustus; identical to SEQ ID NO: 2859
  CDS (94)..(1641)

SEQ ID NO: 60053 - protein, 515 aa, Macropus robustus; identical to SEQ ID NO: 2860

SEQ ID NO: 60054 - DNA, 1530 bp, Nostoc punctiforme; identical to SEQ ID NO: 2861
  CDS (1)..(1530)

SEQ ID NO: 60055 - protein, 509 aa, Nostoc punctiforme; identical to SEQ ID NO: 2862

SEQ ID NO: 60056 - DNA, 1476 bp, Rhizobium meliloti; identical to SEQ ID NO: 2863
  CDS (1)..(1476)

SEQ ID NO: 60057 - protein, 491 aa, Rhizobium meliloti; identical to SEQ ID NO: 2864

SEQ ID NO: 60058 - DNA, 2853 bp, Homo sapiens; identical to SEQ ID NO: 2865
  CDS (273)..(2648)

SEQ ID NO: 60059 - protein, 791 aa, Homo sapiens; identical to SEQ ID NO: 2866

SEQ ID NO: 60060 - DNA, 1970 bp, Arabidopsis thaliana; identical to SEQ ID NO: 2867
  CDS (60)..(1790)

SEQ ID NO: 60061 - protein, 576 aa, Arabidopsis thaliana; identical to SEQ ID NO: 2868

SEQ ID NO: 60062 - DNA, 2112 bp, Arabidopsis thaliana; identical to SEQ ID NO: 2869
  CDS (142)..(1932)

SEQ ID NO: 60063 - protein, 596 aa, Arabidopsis thaliana; identical to SEQ ID NO: 2870

SEQ ID NO: 60064 - DNA, 2161 bp, Arabidopsis thaliana; identical to SEQ ID NO: 2871
  CDS (90)..(1967)

SEQ ID NO: 60065 - protein, 625 aa, Arabidopsis thaliana; identical to SEQ ID NO: 2872

SEQ ID NO: 60066 - DNA, 1936 bp, Arabidopsis thaliana; identical to SEQ ID NO: 2873
  CDS (136)..(1686)

SEQ ID NO: 60067 - protein, 516 aa, Arabidopsis thaliana; identical to SEQ ID NO: 2874

SEQ ID NO: 60068 - DNA, 1959 bp, Arabidopsis thaliana; identical to SEQ ID NO: 2875
  CDS (194)..(1741)

SEQ ID NO: 60069 - protein, 515 aa, Arabidopsis thaliana [sequence omitted]

SEQ ID NO: 60070 - DNA, 1503 bp, Xenopus laevis; identical to SEQ ID NO: 2877
  CDS (1)..(1503)

SEQ ID NO: 60071 - protein, 500 aa, Xenopus laevis; identical to SEQ ID NO: 2878

SEQ ID NO: 60072 - DNA, 2004 bp, Arabidopsis thaliana; identical to SEQ ID NO: 2879
  CDS (51)..(1850)

SEQ ID NO: 60073 - protein, 599 aa, Arabidopsis thaliana; identical to SEQ ID NO: 2880

SEQ ID NO: 60074 - DNA, 23 bp, Artificial sequence
  Primer sequence
atgagtgaaggccccgtcaaatt

SEQ ID NO: 60075 - DNA, 25 bp, Artificial sequence
  Primer sequence
ctaattatccttcgtatcttctggc

SEQ ID NO: 60076 - protein, 806 aa, Artificial sequence; identical to SEQ ID NO: 18604
  Consensus
  Variant (2)..(3): Xaa in position 2 to 3 is any amino acid
  Variant (7)..(9): Xaa in position 7 to 9 is any amino acid
  Variant (11)..(12): Xaa in position 11 to 12 is any amino acid
  Variant (14)..(17): Xaa in position 14 to 17 is any amino acid
  Variant (19)..(23): Xaa in position 19 to 23 is any amino acid
  Variant (25)..(32): Xaa in position 25 to 32 is any amino acid
  Variant (34)..(35): Xaa in position 34 to 35 is any amino acid
  Variant (37)..(81): Xaa in position 37 to 81 is any amino acid
  Variant (83)..(95): Xaa in position 83 to 95 is any amino acid
  Variant (97)..(225): Xaa in position 97 to 225 is any amino acid
  Variant (227)..(230): Xaa in position 227 to 230 is any amino acid
  Variant (232)..(258): Xaa in position 232 to 258 is any amino acid
  Variant (260)..(262): Xaa in position 260 to 262 is any amino acid
  Variant (266)..(266): Xaa in position 266 is any amino acid
  Variant (268)..(268): Xaa in position 268 is any amino acid
  Variant (270)..(271): Xaa in position 270 to 271 is any amino acid
  Variant (273)..(275): Xaa in position 273 to 275 is any amino acid
  Variant (277)..(285): Xaa in position 277 to 285 is any amino acid
  Variant (287)..(290): Xaa in position 287 to 290 is any amino acid
  Variant (300)..(300): Xaa in position 300 is any amino acid
  Variant (302)..(302): Xaa in position 302 is any amino acid
  Variant (304)..(307): Xaa in position 304 to 307 is any amino acid
  Variant (310)..(310): Xaa in position 310 is any amino acid
  Variant (312)..(318): Xaa in position 312 to 318 is any amino acid
  Variant (321)..(323): Xaa in position 321 to 323 is any amino acid
  Variant (325)..(328): Xaa in position 325 to 328 is any amino acid
  Variant (330)..(332): Xaa in position 330 to 332 is any amino acid
  Variant (334)..(335): Xaa in position 334 to 335 is any amino acid
  Variant (337)..(339): Xaa in position 337 to 339 is any amino acid
  Variant (341)..(342): Xaa in position 341 to 342 is any amino acid
  Variant (344)..(347): Xaa in position 344 to 347 is any amino acid
  Variant (349)..(351): Xaa in position 349 to 351 is any amino acid
  Variant (354)..(355): Xaa in position 354 to 355 is any amino acid
  Variant (359)..(360): Xaa in position 359 to 360 is any amino acid
  Variant (362)..(366): Xaa in position 362 to 366 is any amino acid
  Variant (370)..(370): Xaa in position 370 is any amino acid
  Variant (372)..(382): Xaa in position 372 to 382 is any amino acid
  Variant (385)..(385): Xaa in position 385 is any amino acid
  Variant (387)..(387): Xaa in position 387 is any amino acid
  Variant (389)..(405): Xaa in position 389 to 405 is any amino acid
  Variant (409)..(438): Xaa in position 409 to 438 is any amino acid
  Variant (440)..(451): Xaa in position 440 to 451 is any amino acid
  Variant (453)..(455): Xaa in position 453 to 455 is any amino acid
  Variant (457)..(465): Xaa in position 457 to 465 is any amino acid
  Variant (467)..(467): Xaa in position 467 is any amino acid
  Variant (470)..(470): Xaa in position 470 is any amino acid
  Variant (475)..(478): Xaa in position 475 to 478 is any amino acid
  Variant (481)..(493): Xaa in position 481 to 493 is any amino acid
  Variant (495)..(524): Xaa in position 495 to 524 is any amino acid
  Variant (526)..(531): Xaa in position 526 to 531 is any amino acid
  Variant (534)..(534): Xaa in position 534 is any amino acid
  Variant (536)..(543): Xaa in position 536 to 543 is any amino acid
  Variant (545)..(545): Xaa in position 545 is any amino acid
  Variant (548)..(588): Xaa in position 548 to 588 is any amino acid
  Variant (592)..(592): Xaa in position 592 is any amino acid
  Variant (594)..(595): Xaa in position 594 to 595 is any amino acid
  Variant (597)..(599): Xaa in position 597 to 599 is any amino acid
  Variant (601)..(604): Xaa in position 601 to 604 is any amino acid
  Variant (606)..(609): Xaa in position 606 to 609 is any amino acid
  Variant (611)..(614): Xaa in position 611 to 614 is any amino acid
  Variant (616)..(797): Xaa in position 616 to 797 is any amino acid
  Variant (799)..(800): Xaa in position 799 to 800 is any amino acid
  Variant (802)..(805): Xaa in position 802 to 805 is any amino acid

SEQ ID NO: 60077 - protein, 150 aa, Artificial sequence; identical to SEQ ID NO: 2917
  Consensus
  Variant (1)..(1): Xaa in position 1 is Arg or Lys
  Variant (2)..(2): Xaa in position 2 is Val, Ile, Leu or Ala
  Variant (3)..(3): Xaa in position 3 is Ile, Val, Met or Ala
  Variant (4)..(4): Xaa in position 4 is Ile, Val, Leu, Met or Ala
  Variant (8)..(8): Xaa in position 8 is Phe, Ile, Leu or Tyr
  Variant (9)..(9): Xaa in position 9 is Gly or Ala
  Variant (10)..(10): Xaa in position 10 is any amino acid
  Variant (11)..(11): Xaa in position 11 is Asp, Ser or Asn
  Variant (12)..(13): Xaa in position 12 to 13 is any amino acid
  Variant (14)..(14): Xaa in position 14 is Ser, Thr or Asn
  Variant (15)..(15): Xaa in position 15 is Ala, Ser, Phe or Tyr
  Variant (16)..(17): Xaa in position 16 to 17 is any amino acid
  Variant (18)..(18): Xaa in position 18 is Leu, Ile, Val or Phe
  Variant (19)..(21): Xaa in position 19 to 21 is any amino acid
  Variant (22)..(22): Xaa in position 22 is Leu, Ile or Val
  Variant (23)..(27): Xaa in position 23 to 27 is any amino acid
  Variant (28)..(28): Xaa in position 28 is Glu, Asp, Pro or Ser
  Variant (29)..(30): Xaa in position 29 to 30 is any amino acid
  Variant (31)..(31): Xaa in position 31 is Ile, Val, Leu, Thr or Met
  Variant (32)..(32): Xaa in position 32 is Tyr, Phe or Leu
  Variant (33)..(33): Xaa in position 33 is Arg, His or Leu
  Variant (34)..(34): Xaa in position 34 is Ile, Val, Met or Leu
  Variant (37)..(37): Xaa in position 37 is Tyr or Phe
  Variant (39)..(39): Xaa in position 39 is Gly, Ser or Ala
  Variant (40)..(40): Xaa in position 40 is Lys, Arg or Glu
  Variant (41)..(42): Xaa in position 41 to 42 is any amino acid
  Variant (43)..(43): Xaa in position 43 is Val, Ile, Leu, Ala or Met
  Variant (44)..(44): Xaa in position 44 is any amino acid
  Variant (45)..(45): Xaa in position 45 is Asn, Gly, Gln or Ala
  Variant (46)..(46): Xaa in position 46 is Leu, Ile, Met, Phe or Val
  Variant (47)..(49): Xaa in position 47 to 49 is any amino acid
  Variant (50)..(50): Xaa in position 50 is Arg, Lys or Glu
  Variant (51)..(51): Xaa in position 51 is Phe or Tyr
  Variant (52)..(52): Xaa in position 52 is any amino acid
  Variant (54)..(59): Xaa in position 54 to 59 is any amino acid
  Variant (60)..(60): Xaa in position 60 is any or no amino acid
  Variant (61)..(61): Xaa in position 61 is Trp, Met, Asn or Leu
  Variant (62)..(63): Xaa in position 62 to 63 is any amino acid
  Variant (64)..(65): Xaa in position 64 to 65 is any or no amino acid
  Variant (66)..(66): Xaa in position 66 is Ile, Val or Ala
  Variant (67)..(68): Xaa in position 67 to 68 is any amino acid
  Variant (69)..(69): Xaa in position 69 is Val, Ile, Met or Leu
  Variant (70)..(70): Xaa in position 70 is any amino acid
  Variant (71)..(71): Xaa in position 71 is Ile, Leu, Val, Phe or Ser
  Variant (72)..(74): Xaa in position 72 to 74 is any amino acid
  Variant (76)..(77): Xaa in position 76 to 77 is any amino acid
  Variant (78)..(78): Xaa in position 78 is Gly, Asp, Val or Ala
  Variant (79)..(81): Xaa in position 79 to 81 is any amino acid
  Variant (82)..(82): Xaa in position 82 is Arg or Lys
  Variant (83)..(84): Xaa in position 83 to 84 is any or no amino acid
  Variant (85)..(85): Xaa in position 85 is Tyr or Phe
  Variant (86)..(86): Xaa in position 86 is Tyr, Phe or Trp
  Variant (87)..(87): Xaa in position 87 is Asp, Glu, Ala or Asn
  Variant (88)..(89): Xaa in position 88 to 89 is any amino acid
  Variant (91)..(91): Xaa in position 91 is any amino acid
  Variant (92)..(92): Xaa in position 92 is any or no amino acid
  Variant (93)..(93): Xaa in position 93 is Leu, Ile, Val, Met or Ala
  Variant (94)..(94): Xaa in position 94 is Arg, Lys or Leu
  Variant (96)..(96): Xaa in position 96 is Met, Val, Ile or Leu
  Variant (97)..(97): Xaa in position 97 is Val, Met, Ile, Leu or Phe
  Variant (98)..(98): Xaa in position 98 is Gln, Pro or Thr
  Variant (99)..(99): Xaa in position 99 is Asn or Ser
  Variant (100)..(100): Xaa in position 100 is His, Gln or Pro
  Variant (101)..(102): Xaa in position 101 to 102 is any amino acid
  Variant (103)..(103): Xaa in position 103 is Gln, Glu, Asn or Leu
  Variant (104)..(104): Xaa in position 104 is Leu, Ile, Val, Met or Thr
  Variant (105)..(105): Xaa in position 105 is Leu, Met, Val, Ile, Phe or Tyr
  Variant (106)..(106): Xaa in position 106 is any amino acid
  Variant (107)..(107): Xaa in position 107 is Leu, Met, Ile, Val, Trp or Phe
  Variant (108)..(109): Xaa in position 108 to 109 is any amino acid
  Variant (111)..(111): Xaa in position 111 is Glu, Asp, Ser or Asn
  Variant (112)..(112): Xaa in position 112 is any amino acid
  Variant (114)..(118): Xaa in position 114 to 118 is any amino acid
  Variant (119)..(121): Xaa in position 119 to 121 is any or no amino acid
  Variant (122)..(122): Xaa in position 122 is Ile, Val, Leu, Phe or Met
  Variant (123)..(124): Xaa in position 123 to 124 is any amino acid
  Variant (125)..(125): Xaa in position 125 is Glu, Lys, Ala, Arg or His
  Variant (126)..(126): Xaa in position 126 is Lys or Val
  Variant (127)..(128): Xaa in position 127 to 128 is any amino acid
  Variant (129)..(129): Xaa in position 129 is Val, Ile, Ala, Leu or Phe
  Variant (130)..(130): Xaa in position 130 is Leu, Ile, Val, Phe or Met
  Variant (131)..(140): Xaa in position 131 to 140 is any amino acid
  Variant (141)..(145): Xaa in position 141 to 145 is any or no amino acid
  Variant (146)..(146): Xaa in position 146 is Val, Leu, Ile, Ala or Ser
  Variant (147)..(147): Xaa in position 147 is any amino acid
  Variant (148)..(148): Xaa in position 148 is Gly or Ala
  Variant (149)..(149): Xaa in position 149 is Gln or Arg
  Variant (150)..(150): Xaa in position 150 is Tyr or Phe

SEQ ID NO: 60078 - protein, 44 aa, Artificial sequence; identical to SEQ ID NO: 2918
  Consensus
  Variant (1)..(1): Xaa in position 1 is Tyr or Leu
  Variant (2)..(2): Xaa in position 2 is any amino acid
  Variant (3)..(13): Xaa in position 3 to 13 is any or no amino acid
  Variant (15)..(17): Xaa in position 15 to 17 is any amino acid
  Variant (19)..(19): Xaa in position 19 is Phe or Tyr
  Variant (20)..(25): Xaa in position 20 to 25 is any amino acid
  Variant (26)..(26): Xaa in position 26 is Ile, Val, Leu or Phe
  Variant (27)..(29): Xaa in position 27 to 29 is any amino acid
  Variant (30)..(30): Xaa in position 30 is Arg, Asn, Phe or Gln
  Variant (31)..(31): Xaa in position 31 is Trp or Phe
  Variant (32)..(32): Xaa in position 32 is any amino acid
  Variant (33)..(33): Xaa in position 33 is Gly or Asp
  Variant (34)..(34): Xaa in position 34 is Val or Thr
  Variant (36)..(36): Xaa in position 36 is Phe or Ile
  Variant (37)..(37): Xaa in position 37 is any amino acid
  Variant (38)..(38): Xaa in position 38 is Leu, Met, Ile, Val or Phe
  Variant (39)..(40): Xaa in position 39 to 40 is any amino acid
  Variant (41)..(41): Xaa in position 41 is Gly or Ala
  Variant (43)..(43): Xaa in position 43 is any amino acid
  Variant (44)..(44): Xaa in position 44 is Leu, Met or Val

SEQ ID NO: 60079 - protein, 97 aa, Artificial sequence; identical to SEQ ID NO: 2919
  Consensus
  Variant (1)..(1): Xaa in position 1 is Asn, Asp, Gln, Arg or Lys
  Variant (2)..(4): Xaa in position 2 to 4 is any amino acid
  Variant (5)..(5): Xaa in position 5 is Ile, Leu, Met, Phe or Val
  Variant (6)..(6): Xaa in position 6 is any amino acid
  Variant (7)..(7): Xaa in position 7 is Ile, Leu, Val, Ala or Ser
  Variant (8)..(8): Xaa in position 8 is any amino acid
  Variant (9)..(9): Xaa in position 9 is Pro or His
  Variant (10)..(12): Xaa in position 10 to 12 is any amino acid
  Variant (13)..(13): Xaa in position 13 is Ile, Val, Met, Leu, Phe or Ala
  Variant (14)..(19): Xaa in position 14 to 19 is any amino acid
  Variant (20)..(20): Xaa in position 20 is Lys, Ser or Arg
  Variant (21)..(29): Xaa in position 21 to 29 is any amino acid
  Variant (30)..(35): Xaa in position 30 to 35 is any or no amino acid
  Variant (36)..(36): Xaa in position 36 is Leu, Ile, Met or Val
  Variant (37)..(44): Xaa in position 37 to 44 is any amino acid
  Variant (45)..(64): Xaa in position 45 to 64 is any or no amino acid
  Variant (65)..(65): Xaa in position 65 is Ala, Gly, Pro or Ser
  Variant (66)..(66): Xaa in position 66 is Tyr or Leu
  Variant (67)..(68): Xaa in position 67 to 68 is any amino acid
  Variant (69)..(69): Xaa in position 69 is Leu, Met or Tyr
  Variant (70)..(70): Xaa in position 70 is Leu, Ile, Phe or Met
  Variant (71)..(71): Xaa in position 71 is any amino acid
  Variant (72)..(72): Xaa in position 72 is Asp, Glu, Ala, Asn or His
  Variant (73)..(75): Xaa in position 73 to 75 is any amino acid
  Variant (76)..(76): Xaa in position 76 is Gly, Ser or Asp
  Variant (77)..(80): Xaa in position 77 to 80 is any amino acid
  Variant (81)..(81): Xaa in position 81 is Phe or Tyr
  Variant (82)..(85): Xaa in position 82 to 85 is any amino acid
  Variant (86)..(86): Xaa in position 86 is any or no amino acid
  Variant (87)..(87): Xaa in position 87 is Val, Ile, Leu, Ala or Gln
  Variant (88)..(90): Xaa in position 88 to 90 is any amino acid
  Variant (92)..(96): Xaa in position 92 to 96 is any amino acid
  Variant (97)..(97): Xaa in position 97 is Ile, Val, Leu, Phe or Ala

SEQ ID NO: 60080 - DNA, 2077 bp, Saccharomyces cerevisiae; identical to SEQ ID NO: 3739
  CDS (482)..(1987)

SEQ ID NO: 60081 - protein, 501 aa, Saccharomyces cerevisiae; identical to SEQ ID NO: 3740

SEQ ID NO: 60082 - DNA, 1668 bp, Caenorhabditis elegans; identical to SEQ ID NO: 3749
  CDS (121)..(1668)

SEQ ID NO: 60083 - protein, 515 aa, Caenorhabditis elegans; identical to SEQ ID NO: 15344

SEQ ID NO: 60084 - DNA, 1365 bp, Schizosaccharomyces pombe; identical to SEQ ID NO: 3751
  CDS (1)..(1365)

SEQ ID NO: 60085 - protein, 454 aa, Schizosaccharomyces pombe; identical to SEQ ID NO: 3752

SEQ ID NO: 60086 - DNA, 1521 bp, Debaryomyces hansenii CBS767; identical to SEQ ID NO: 3757
  CDS (1)..(1521)

SEQ ID NO: 60087 - protein, 506 aa, Debaryomyces hansenii CBS767; identical to SEQ ID NO: 3758

SEQ ID NO: 60088 - DNA, 1353 bp, Yarrowia lipolytica CLIB99; identical to SEQ ID NO: 3759
  CDS (1)..(1353)

SEQ ID NO: 60089 - protein, 450 aa, Yarrowia lipolytica CLIB99; identical to SEQ ID NO: 3760

SEQ ID NO: 60090 - DNA, 1380 bp, Kluyveromyces lactis NRRL Y; identical to SEQ ID NO: 3761
  CDS (1)..(1380)

SEQ ID NO: 60091 - protein, 459 aa, Kluyveromyces lactis NRRL Y; identical to SEQ ID NO: 3762

SEQ ID NO: 60092 - DNA, 1431 bp, Candida glabrata CBS138; identical to SEQ ID NO: 3767
  CDS (1)..(1431)

SEQ ID NO: 60093 - protein, 476 aa, Candida glabrata CBS138; identical to SEQ ID NO: 3768

SEQ ID NO: 60094 - DNA, 1965 bp, Oryza sativa; identical to SEQ ID NO: 3773
  CDS (257)..(1726)

SEQ ID NO: 60095 - protein, 489 aa, Oryza sativa; identical to SEQ ID NO: 3774

SEQ ID NO: 60096 - DNA, 1374 bp, Cryptosporidium parvum; identical to SEQ ID NO: 15357
  CDS (1)..(1374)

SEQ ID NO: 60097 - protein, 457 aa, Cryptosporidium parvum; identical to SEQ ID NO: 15358

SEQ ID NO: 60098 - DNA, 1862 bp, Oryza sativa; identical to SEQ ID NO: 15359
  CDS (98)..(1573)

SEQ ID NO: 60099 - protein, 491 aa, Oryza sativa; identical to SEQ ID NO: 15360

SEQ ID NO: 60100 - DNA, 1497 bp, Ashbya gossypii; identical to SEQ ID NO: 3797
  CDS (1)..(1497)

SEQ ID NO: 60101 - protein, 498 aa, Ashbya gossypii; identical to SEQ ID NO: 3798

SEQ ID NO: 60102 - DNA, 1425 bp, Neurospora crassa; identical to SEQ ID NO: 3817
  CDS (1)..(1425)

SEQ ID NO: 60103 - protein, 474 aa, Neurospora crassa; identical to SEQ ID NO: 3818

SEQ ID NO: 60104 - DNA, 1831 bp, Arabidopsis thaliana; identical to SEQ ID NO: 3841
  CDS (116)..(1525)

SEQ ID NO: 60105 - protein, 469 aa, Arabidopsis thaliana; identical to SEQ ID NO: 3842

SEQ ID NO: 60106 - DNA, 1870 bp, Arabidopsis thaliana; identical to SEQ ID NO: 15367
  CDS (207)..(1607)

SEQ ID NO: 60107 - protein, 466 aa, Arabidopsis thaliana; identical to SEQ ID NO: 15368

SEQ ID NO: 60108 - DNA, 1711 bp, Cryptosporidium parvum; identical to SEQ ID NO: 3855
  CDS (290)..(1549)

SEQ ID NO: 60109 - protein, 419 aa, Cryptosporidium parvum; identical to SEQ ID NO: 3856

SEQ ID NO: 60110 - DNA, 1844 bp, Arabidopsis thaliana; identical to SEQ ID NO: 15371
  CDS (61)..(1521)

SEQ ID NO: 60111 - protein, 486 aa, Arabidopsis thaliana; identical to SEQ ID NO: 3858

SEQ ID NO: 60112 - DNA, 3183 bp, Arabidopsis thaliana; identical to SEQ ID NO: 15373
  CDS (1)..(3183)

SEQ ID NO: 60113 - protein, 1060 aa, Arabidopsis thaliana; identical to SEQ ID NO: 15374

SEQ ID NO: 60114 - DNA, 1629 bp, Arabidopsis thaliana; identical to SEQ ID NO: 15375
  CDS (1)..(1629)

SEQ ID NO: 60115 - protein, 542 aa, Arabidopsis thaliana; identical to SEQ ID NO: 15376

SEQ ID NO: 60116 - DNA, 1758 bp, Arabidopsis thaliana; identical to SEQ ID NO: 15377
  CDS (101)..(1552)

SEQ ID NO: 60117 - protein, 483 aa, Arabidopsis thaliana; identical to SEQ ID NO: 3864

SEQ ID NO: 60118 - DNA, 1398 bp, Arabidopsis thaliana; identical to SEQ ID NO: 3865
  CDS (1)..(1398)

SEQ ID NO: 60119 - protein, 465 aa, Arabidopsis thaliana; identical to SEQ ID NO: 3866

SEQ ID NO: 60120 - DNA, 1863 bp, Drosophila melanogaster; identical to SEQ ID NO: 15381
  CDS (77)..(1762)

SEQ ID NO: 60121 - protein, 561 aa, Drosophila melanogaster; identical to SEQ ID NO: 3868

SEQ ID NO: 60122 - DNA, 1847 bp, Homo sapiens; identical to SEQ ID NO: 15383
  CDS (45)..(1691)

SEQ ID NO: 60123 - protein, 548 aa, Homo sapiens; identical to SEQ ID NO: 15384

SEQ ID NO: 60124 - DNA, 23 bp, Artificial sequence
  Primer sequence
atgtcccatcgtatagcaccttc

SEQ ID NO: 60125 - DNA, 27 bp, Artificial sequence
  Primer sequence
tcaatcacaaccaaaatactttgaatc

SEQ ID NO: 60126 - protein, 466 aa, Artificial sequence; identical to SEQ ID NO: 15387
  Consensus
  Variant (2)..(4): Xaa in position 2 to 4 is any amino acid
  Variant (5)..(8): Xaa in position 5 to 8 is any or no amino acid
  Variant (10)..(12): Xaa in position 10 to 12 is any amino acid
  Variant (16)..(38): Xaa in position 16 to 38 is any amino acid
  Variant (41)..(57): Xaa in position 41 to 57 is any amino acid
  Variant (60)..(60): Xaa in position 60 is any amino acid
  Variant (62)..(78): Xaa in position 62 to 78 is any amino acid
  Variant (80)..(84): Xaa in position 80 to 84 is any amino acid
  Variant (86)..(86): Xaa in position 86 is any amino acid
  Variant (88)..(88): Xaa in position 88 is any amino acid
  Variant (90)..(110): Xaa in position 90 to 110 is any amino acid
  Variant (114)..(124): Xaa in position 114 to 124 is any amino acid
  Variant (126)..(134): Xaa in position 126 to 134 is any amino acid
  Variant (135)..(163): Xaa in position 135 to 163 is any or no amino acid
  Variant (165)..(165): Xaa in position 165 is any amino acid
  Variant (167)..(168): Xaa in position 167 to 168 is any amino acid
  Variant (170)..(170): Xaa in position 170 is any amino acid
  Variant (173)..(174): Xaa in position 173 to 174 is any amino acid
  Variant (177)..(180): Xaa in position 177 to 180 is any amino acid
  Variant (183)..(189): Xaa in position 183 to 189 is any amino acid
  Variant (191)..(194): Xaa in position 191 to 194 is any amino acid
  Variant (198)..(214): Xaa in position 198 to 214 is any amino acid
  Variant (216)..(219): Xaa in position 216 to 219 is any amino acid
  Variant (221)..(222): Xaa in position 221 to 222 is any amino acid
  Variant (224)..(234): Xaa in position 224 to 234 is any amino acid
  Variant (236)..(293): Xaa in position 236 to 293 is any amino acid
  Variant (295)..(297): Xaa in position 295 to 297 is any amino acid
  Variant (299)..(341): Xaa in position 299 to 341 is any amino acid
  Variant (342)..(361): Xaa in position 342 to 361 is any or no amino acid
  Variant (363)..(363): Xaa in position 363 is any amino acid
  Variant (365)..(380): Xaa in position 365 to 380 is any amino acid
  Variant (382)..(383): Xaa in position 382 to 383 is any amino acid
  Variant (385)..(400): Xaa in position 385 to 400 is any amino acid
  Variant (401)..(423): Xaa in position 401 to 423 is any or no amino acid
  Variant (425)..(451): Xaa in position 425 to 451 is any amino acid
  Variant (453)..(455): Xaa in position 453 to 455 is any amino acid
  Variant (457)..(465): Xaa in position 457 to 465 is any amino acid

SEQ ID NO: 60127 - protein, 528 aa, Artificial sequence; identical to SEQ ID NO: 15388
  Consensus
  Variant (3)..(4): Xaa in position 3 to 4 is any amino acid
  Variant (5)..(8): Xaa in position 5 to 8 is any or no amino acid
  Variant (10)..(12): Xaa in position 10 to 12 is any amino acid
  Variant (17)..(17): Xaa in position 17 is any amino acid
  Variant (19)..(21): Xaa in position 19 to 21 is any amino acid
  Variant (23)..(31): Xaa in position 23 to 31 is any amino acid
  Variant (33)..(36): Xaa in position 33 to 36 is any amino acid
  Variant (38)..(38): Xaa in position 38 is any amino acid
  Variant (41)..(42): Xaa in position 41 to 42 is any amino acid
  Variant (44)..(55): Xaa in position 44 to 55 is any amino acid
  Variant (57)..(57): Xaa in position 57 is any amino acid
  Variant (60)..(60): Xaa in position 60 is any amino acid
  Variant (62)..(62): Xaa in position 62 is any amino acid
  Variant (64)..(64): Xaa in position 64 is any amino acid
  Variant (66)..(75): Xaa in position 66 to 75 is any amino acid
  Variant (77)..(78): Xaa in position 77 to 78 is any amino acid
  Variant (80)..(84): Xaa in position 80 to 84 is any amino acid
  Variant (86)..(86): Xaa in position 86 is any amino acid
  Variant (88)..(88): Xaa in position 88 is any amino acid
  Variant (90)..(91): Xaa in position 90 to 91 is any amino acid
  Variant (93)..(106): Xaa in position 93 to 106 is any amino acid
  Variant (108)..(110): Xaa in position 108 to 110 is any amino acid
  Variant (114)..(117): Xaa in position 114 to 117 is any amino acid
  Variant (119)..(124): Xaa in position 119 to 124 is any amino acid
  Variant (126)..(128): Xaa in position 126 to 128 is any amino acid
  Variant (130)..(131): Xaa in position 130 to 131 is any amino acid
  Variant (134)..(134): Xaa in position 134 is any amino acid
  Variant (135)..(163): Xaa in position 135 to 163 is any or no amino acid
  Variant (165)..(165): Xaa in position 165 is any amino acid
  Variant (167)..(168): Xaa in position 167 to 168 is any amino acid
  Variant (170)..(170): Xaa in position 170 is any amino acid
  Variant (173)..(174): Xaa in position 173 to 174 is any amino acid
  Variant (177)..(179): Xaa in position 177 to 179 is any amino acid
  Variant (183)..(189): Xaa in position 183 to 189 is any amino acid
  Variant (191)..(194): Xaa in position 191 to 194 is any amino acid
  Variant (198)..(204): Xaa in position 198 to 204 is any amino acid
  Variant (206)..(209): Xaa in position 206 to 209 is any amino acid
  Variant (212)..(214): Xaa in position 212 to 214 is any amino acid
  Variant (216)..(219): Xaa in position 216 to 219 is any amino acid
  Variant (221)..(222): Xaa in position 221 to 222 is any amino acid
  Variant (224)..(229): Xaa in position 224 to 229 is any amino acid
  Variant (231)..(234): Xaa in position 231 to 234 is any amino acid
  Variant (236)..(245): Xaa in position 236 to 245 is any amino acid
  Variant (247)..(271): Xaa in position 247 to 271 is any amino acid
  Variant (273)..(273): Xaa in position 273 is any amino acid
  Variant (275)..(279): Xaa in position 275 to 279 is any amino acid
  Variant (281)..(290): Xaa in position 281 to 290 is any amino acid
  Variant (293)..(293): Xaa in position 293 is any amino acid
  Variant (296)..(297): Xaa in position 296 to 297 is any amino acid
  Variant (299)..(307): Xaa in position 299 to 307 is any amino acid
  Variant (309)..(341): Xaa in position 309 to 341 is any amino acid
  Variant (342)..(361): Xaa in position 342 to 361 is any or no amino acid
  Variant (363)..(363): Xaa in position 363 is any amino acid
  Variant (365)..(370): Xaa in position 365 to 370 is any amino acid
  Variant (372)..(379): Xaa in position 372 to 379 is any amino acid
  Variant (383)..(383): Xaa in position 383 is any amino acid
  Variant (386)..(391): Xaa in position 386 to 391 is any amino acid
  Variant (393)..(394): Xaa in position 393 to 394 is any amino acid
  Variant (395)..(417): Xaa in position 395 to 417 is any or no amino acid
  Variant (419)..(422): Xaa in position 419 to 422 is any amino acid
  Variant (425)..(426): Xaa in position 425 to 426 is any amino acid
  Variant (428)..(434): Xaa in position 428 to 434 is any amino acid
  Variant (436)..(436): Xaa in position 436 is any amino acid
  Variant (438)..(438): Xaa in position 438 is any amino acid
  Variant (440)..(445): Xaa in position 440 to 445 is any amino acid
  Variant (447)..(451): Xaa in position 447 to 451 is any amino acid
  Variant (453)..(455): Xaa in position 453 to 455 is any amino acid
  Variant (457)..(460): Xaa in position 457 to 460 is any amino acid
  Variant (462)..(465): Xaa in position 462 to 465 is any amino acid
  Variant (467)..(476): Xaa in position 467 to 476 is any amino acid
  Variant (478)..(484): Xaa in position 478 to 484 is any amino acid
  Variant (486)..(525): Xaa in position 486 to 525 is any amino acid

SEQ ID NO: 60128 - protein, 45 aa, Artificial sequence; identical to SEQ ID NO: 15389
  Consensus
  Variant (1)..(1): Xaa in position 1 is Phe, Tyr, Ser or Arg
  Variant (2)..(2): Xaa in position 2 is Val, Ile, Ala or Phe
  Variant (4)..(4): Xaa in position 4 is Gly or Ala
  Variant (5)..(8): Xaa in position 5 to 8 is any or no amino acid
  Variant (9)..(9): Xaa in position 9 is Val, Ile or Leu
  Variant (10)..(10): Xaa in position 10 is any amino acid
  Variant (12)..(12): Xaa in position 12 is any amino acid
  Variant (13)..(13): Xaa in position 13 is Ser, Ala or Thr
  Variant (14)..(14): Xaa in position 14 is Ala, Gly or Ser
  Variant (18)..(19): Xaa in position 18 to 19 is Thr or Ser
  Variant (20)..(20): Xaa in position 20 is Val or Leu
  Variant (21)..(21): Xaa in position 21 is Cys, Ala or Ser
  Variant (22)..(23): Xaa in position 22 to 23 is any amino acid
  Variant (24)..(24): Xaa in position 24 is Ile or Leu
  Variant (25)..(25): Xaa in position 25 is Ile, Val, Met or Phe
  Variant (26)..(27): Xaa in position 26 to 27 is any amino acid
  Variant (28)..(28): Xaa in position 28 is Leu or Ile
  Variant (29)..(30): Xaa in position 29 to 30 is any amino acid
  Variant (31)..(31): Xaa in position 31 is Pro, Gln, His or Lys
  Variant (32)..(32): Xaa in position 32 is Trp, Arg or His
  Variant (33)..(33): Xaa in position 33 is Val, Thr, Ala or Ile
  Variant (34)..(34): Xaa in position 34 is Val or Thr
  Variant (35)..(35): Xaa in position 35 is Leu, Val or Ile
  Variant (36)..(36): Xaa in position 36 is Ile, Leu or Val
  Variant (37)..(37): Xaa in position 37 is Ser, Asn, Glu or Thr
  Variant (38)..(38): Xaa in position 38 is any amino acid
  Variant (39)..(39): Xaa in position 39 is Asp or Glu
  Variant (40)..(40): Xaa in position 40 is Ser, Asn or Cys
  Variant (43)..(44): Xaa in position 43 to 44 is any amino acid
  Variant (45)..(45): Xaa in position 45 is Leu, Pro or Val

SEQ ID NO: 60129 - protein, 78 aa, Artificial sequence; identical to SEQ ID NO: 15390
  Consensus
  Variant (1)..(1): Xaa in position 1 is Tyr, Phe or His
  Variant (2)..(2): Xaa in position 2 is Asn or Asp
  Variant (5)..(5): Xaa in position 5 is any amino acid
  Variant (7)..(7): Xaa in position 7 is any amino acid
  Variant (8)..(8): Xaa in position 8 is Ala or Ser
  Variant (9)..(9): Xaa in position 9 is any amino acid
  Variant (10)..(10): Xaa in position 10 is Asp or Asn
  Variant (11)..(11): Xaa in position 11 is any amino acid
  Variant (12)..(12): Xaa in position 12 is Glu or Asp
  Variant (13)..(13): Xaa in position 13 is any amino acid
  Variant (14)..(14): Xaa in position 14 is Leu, Ala or Ile
  Variant (15)..(17): Xaa in position 15 to 17 is any amino acid
  Variant (18)..(18): Xaa in position 18 is Leu, Met, Val, Ile or Ala
  Variant (19)..(20): Xaa in position 19 to 20 is any amino acid
  Variant (21)..(21): Xaa in position 21 is Leu or Ile
  Variant (22)..(22): Xaa in position 22 is Lys or Arg
  Variant (23)..(23): Xaa in position 23 is any amino acid
  Variant (25)..(28): Xaa in position 25 to 28 is any amino acid
  Variant (29)..(29): Xaa in position 29 is Ile, Val or Met
  Variant (31)..(31): Xaa in position 31 is any amino acid
  Variant (33)..(33): Xaa in position 33 is Asp, Ser, Cys or Asn
  Variant (35)..(36): Xaa in position 35 to 36 is any amino acid
  Variant (37)..(37): Xaa in position 37 is His or Tyr
  Variant (38)..(38): Xaa in position 38 is any amino acid
  Variant (39)..(39): Xaa in position 39 is Arg, Ser or Asn
  Variant (40)..(44): Xaa in position 40 to 44 is any amino acid
  Variant (45)..(46): Xaa in position 45 to 46 is any or no amino acid
  Variant (47)..(47): Xaa in position 47 is Val, Ile, Met or Leu
  Variant (48)..(48): Xaa in position 48 is Tyr, Asn, Ser or Phe
  Variant (49)..(49): Xaa in position 49 is Gly, Pro, Ala or Ser
  Variant (50)..(50): Xaa in position 50 is any amino acid
  Variant (51)..(51): Xaa in position 51 is Asp, Ser, Asn or His
  Variant (52)..(52): Xaa in position 52 is Val or Ile
  Variant (53)..(53): Xaa in position 53 is Ile, Val or Leu
  Variant (54)..(54): Xaa in position 54 is Ile or Val
  Variant (55)..(55): Xaa in position 55 is Leu, Phe, Ile or Val
  Variant (59)..(59): Xaa in position 59 is Leu, Tyr, Phe or Met
  Variant (60)..(60): Xaa in position 60 is any amino acid
  Variant (61)..(61): Xaa in position 61 is Leu or Phe
  Variant (62)..(62): Xaa in position 62 is any amino acid
  Variant (63)..(63): Xaa in position 63 is Asp, His or Ser
  Variant (64)..(65): Xaa in position 64 to 65 is any amino acid
  Variant (66)..(66): Xaa in position 66 is any or no amino acid
  Variant (67)..(67): Xaa in position 67 is Val, Leu or Ile
  Variant (68)..(69): Xaa in position 68 to 69 is any amino acid
  Variant (71)..(71): Xaa in position 71 is Met, Leu or Ile
  Variant (72)..(72): Xaa in position 72 is Asp or Asn
  Variant (73)..(73): Xaa in position 73 is Met, Leu, Ile or Val
  Variant (74)..(74): Xaa in position 74 is Lys or Ser
  Variant (75)..(75): Xaa in position 75 is Ile or Val
  Variant (76)..(76): Xaa in position 76 is Phe or Tyr
  Variant (77)..(77): Xaa in position 77 is Val, Cys or Leu
  Variant (78)..(78): Xaa in position 78 is Asp, Cys or Glu

SEQ ID NO: 60130 - protein, 72 aa, Artificial sequence; identical to SEQ ID NO: 15391
  Consensus
  Variant (2)..(2): Xaa in position 2 is any amino acid
  Variant (4)..(4): Xaa in position 4 is Ile, Val, Thr or Leu
  Variant (5)..(5): Xaa in position 5 is Arg or Cys
  Variant (7)..(7): Xaa in position 7 is Ala, Ser, Val or Thr
  Variant (10)..(10): Xaa in position 10 is Ile or Leu
  Variant (11)..(11): Xaa in position 11 is any amino acid
  Variant (14)..(16): Xaa in position 14 to 16 is any amino acid
  Variant (17)..(17): Xaa in position 17 is Arg, Lys or Asn
  Variant (20)..(20): Xaa in position 20 is Asp, Gln, Asn or Glu
  Variant (21)..(21): Xaa in position 21 is Ile, Leu, Val or Met
  Variant (22)..(23): Xaa in position 22 to 23 is any amino acid
  Variant (24)..(24): Xaa in position 24 is Val, Ile, Cys or Ala
  Variant (25)..(25): Xaa in position 25 is Leu, Ile or Met
  Variant (26)..(26): Xaa in position 26 is any amino acid
  Variant (28)..(28): Xaa in position 28 is Tyr or Trp
  Variant (29)..(31): Xaa in position 29 to 31 is any amino acid
  Variant (35)..(35): Xaa in position 35 is any amino acid
  Variant (36)..(36): Xaa in position 36 is Phe, Ala or Tyr
  Variant (37)..(38): Xaa in position 37 to 38 is any amino acid
  Variant (39)..(39): Xaa in position 39 is Phe or Tyr
  Variant (40)..(40): Xaa in position 40 is Val or Ile
  Variant (41)..(41): Xaa in position 41 is any amino acid
  Variant (42)..(42): Xaa in position 42 is Pro or Arg
  Variant (43)..(46): Xaa in position 43 to 46 is any amino acid
  Variant (47)..(47): Xaa in position 47 is Ala or Thr
  Variant (48)..(48): Xaa in position 48 is Asp or Asn
  Variant (49)..(49): Xaa in position 49 is Ile, Ala, Val or Leu
  Variant (50)..(50): Xaa in position 50 is Ile, Val or Leu
  Variant (51)..(51): Xaa in position 51 is Ile, Val or Phe
  Variant (53)..(53): Xaa in position 53 is Arg, Ser or His
  Variant (54)..(54): Xaa in position 54 is Gly, Met or Tyr
  Variant (55)..(55): Xaa in position 55 is any amino acid
  Variant (56)..(56): Xaa in position 56 is any or no amino acid
  Variant (58)..(58): Xaa in position 58 is any amino acid
  Variant (59)..(59): Xaa in position 59 is Val, Ile, Thr or Leu
  Variant (61)..(61): Xaa in position 61 is Ile, Val, Thr or Met
  Variant (62)..(62): Xaa in position 62 is any amino acid
  Variant (63)..(63): Xaa in position 63 is Leu or Met
  Variant (64)..(64): Xaa in position 64 is Ile, Val, Leu or Met
  Variant (65)..(65): Xaa in position 65 is any amino acid
  Variant (66)..(66): Xaa in position 66 is Gln, Asn or Lys
  Variant (67)..(67): Xaa in position 67 is His, Phe or Asn
  Variant (68)..(68): Xaa in position 68 is Ile, Val or Leu
  Variant (69)..(71): Xaa in position 69 to 71 is any amino acid

SEQ ID NO: 60131 - protein, 42 aa, Artificial sequence; identical to SEQ ID NO: 15392
  Consensus
  Variant (1)..(1): Xaa in position 1 is Leu, Ile or Val
  Variant (2)..(3): Xaa in position 2 to 3 is any amino acid
  Variant (4)..(4): Xaa in position 4 is Leu, Ile or Val
  Variant (5)..(6): Xaa in position 5 to 6 is any amino acid
  Variant (7)..(7): Xaa in position 7 is Thr, Asn or Ser
  Variant (8)..(8): Xaa in position 8 is any amino acid
  Variant (9)..(9): Xaa in position 9 is Gln, His or Glu
  Variant (10)..(12): Xaa in position 10 to 12 is any amino acid
  Variant (13)..(13): Xaa in position 13 is Met, Leu or Ile
  Variant (14)..(14): Xaa in position 14 is any amino acid
  Variant (15)..(15): Xaa in position 15 is Thr or Ser
  Variant (16)..(16): Xaa in position 16 is any amino acid
  Variant (17)..(17): Xaa in position 17 is Ile, Leu or Val
  Variant (18)..(25): Xaa in position 18 to 25 is any amino acid
  Variant (26)..(26): Xaa in position 26 is Asp, Glu or Asn
  Variant (27)..(27): Xaa in position 27 is Phe, Trp, Leu or His
  Variant (28)..(28): Xaa in position 28 is any amino acid
  Variant (30)..(30): Xaa in position 30 is Tyr, Phe, Trp or Gln
  Variant (31)..(32): Xaa in position 31 to 32 is any amino acid
  Variant (34)..(34): Xaa in position 34 is Leu, Ile or Phe
  Variant (35)..(35): Xaa in position 35 is any amino acid
  Variant (36)..(36): Xaa in position 36 is Arg, Thr or Ile
  Variant (37)..(37): Xaa in position 37 is Leu, Ile or Met
  Variant (38)..(38): Xaa in position 38 is Val, Leu or Ile
  Variant (39)..(39): Xaa in position 39 is Val, Ile, Met or Leu
  Variant (40)..(41): Xaa in position 40 to 41 is any amino acid
  Variant (42)..(42): Xaa in position 42 is Ala, Gly, Cys or Thr

SEQ ID NO: 60132 - protein, 29 aa, Artificial sequence
  Consensus
  Variant (1)..(1): Xaa in position 1 is Gly or Ala
  Variant (2)..(2): Xaa in position 2 is Val, Ile or Leu
  Variant (3)..(3): Xaa in position 3 is any amino acid
  Variant (4)..(4): Xaa in position 4 is Ile, Val or Thr
  Variant (5)..(5): Xaa in position 5 is Ile, Leu, Val or Met
  Variant (7)..(7): Xaa in position 7 is Ser, Ala or Gly
  Variant (9)..(10): Xaa in position 9 to 10 is any amino acid
  Variant (11)..(11): Xaa in position 11 is Met, Phe or Leu
  Variant (12)..(12): Xaa in position 12 is Glu, Met or Asp
  Variant (13)..(13): Xaa in position 13 is any amino acid
  Variant (14)..(14): Xaa in position 14 is Ala, Ser or Gly
  Variant (15)..(15): Xaa in position 15 is Leu, Val or Ile
  Variant (16)..(19): Xaa in position 16 to 19 is any amino acid
  Variant (20)..(20): Xaa in position 20 is Lys, Pro or Asn
  Variant (21)..(24): Xaa in position 21 to 24 is any amino acid
  Variant (26)..(26): Xaa in position 26 is Lys, Thr or Arg
  Variant (27)..(27): Xaa in position 27 is Ile, Leu or Val
  Variant (29)..(29): Xaa in position 29 is Ile, Leu or Val
XXXXXRXGXXXXXXXXXXXXXXXXGXXLX

SEQ ID NO: 60133 - protein, 49 aa, Artificial sequence; identical to SEQ ID NO: 15394
  Consensus
  Variant (1)..(1): Xaa in position 1 is Leu or Ile
  Variant (2)..(2): Xaa in position 2 is His, Ile, Tyr or Val
  Variant (3)..(5): Xaa in position 3 to 5 is any amino acid
  Variant (6)..(6): Xaa in position 6 is Leu, Ile or Phe
  Variant (8)..(9): Xaa in position 8 to 9 is any amino acid
  Variant (10)..(10): Xaa in position 10 is Ile or Leu
  Variant (11)..(14): Xaa in position 11 to 14 is any amino acid
  Variant (15)..(17): Xaa in position 15 to 17 is any or no amino acid
  Variant (18)..(18): Xaa in position 18 is Val or Ile
  Variant (19)..(19): Xaa in position 19 is Leu, Phe, Ile or Val
  Variant (20)..(20): Xaa in position 20 is Leu or Ile
  Variant (21)..(21): Xaa in position 21 is Leu, Met, Phe or Cys
  Variant (22)..(22): Xaa in position 22 is Asp, Ala or Glu
  Variant (23)..(24): Xaa in position 23 to 24 is any amino acid
  Variant (25)..(25): Xaa in position 25 is Leu, Ile, Val or Met
  Variant (26)..(26): Xaa in position 26 is any amino acid
  Variant (27)..(27): Xaa in position 27 is any or no amino acid
  Variant (28)..(28): Xaa in position 28 is Thr, Ser, Asn or Ala
  Variant (29)..(29): Xaa in position 29 is Gly or His
  Variant (30)..(31): Xaa in position 30 to 31 is any amino acid
  Variant (32)..(32): Xaa in position 32 is Ala, Val, Met or Ile
  Variant (33)..(34): Xaa in position 33 to 34 is any amino acid
  Variant (36)..(36): Xaa in position 36 is Ile, Val or Thr
  Variant (37)..(37): Xaa in position 37 is any amino acid
  Variant (38)..(38): Xaa in position 38 is Val, Leu, Tyr or Ile
  Variant (40)..(40): Xaa in position 40 is Leu, Ile, Val or Thr
  Variant (41)..(43): Xaa in position 41 to 43 is any amino acid
  Variant (44)..(44): Xaa in position 44 is Val or Ile
  Variant (45)..(48): Xaa in position 45 to 48 is any amino acid

SEQ ID NO: 60134 - DNA, 2376 bp, Saccharomyces cerevisiae; identical to SEQ ID NO: 35553
  CDS (1)..(2376)

SEQ ID NO: 60135 - protein, 791 aa, Saccharomyces cerevisiae; identical to SEQ ID NO: 35554

SEQ ID NO: 60136 - DNA, 717 bp, Danio rerio; identical to SEQ ID NO: 35555
  CDS (1)..(717)

SEQ ID NO: 60137 - protein, 238 aa, Danio rerio; identical to SEQ ID NO: 35556

SEQ ID NO: 60138 - DNA, 1506 bp, Caenorhabditis elegans; identical to SEQ ID NO: 35557
  CDS (1)..(1506)

SEQ ID NO: 60139 - protein, 501 aa, Caenorhabditis elegans; identical to SEQ ID NO: 35558

SEQ ID NO: 60140 - DNA, 684 bp, Caenorhabditis elegans; identical to SEQ ID NO: 35559
  CDS (1)..(684)

SEQ ID NO: 60141 - protein, 227 aa, Caenorhabditis elegans; identical to SEQ ID NO: 35560

SEQ ID NO: 60142 - DNA, 720 bp, Homo sapiens; identical to SEQ ID NO: 35561
  CDS (1)..(720)

SEQ ID NO: 60143 - protein, 239 aa, Homo sapiens; identical to SEQ ID NO: 35562

SEQ ID NO: 60144 - DNA, 1272 bp, Leptospira interrogans serovar Lai str. 56601; identical to SEQ ID NO: 35563
  CDS (1)..(1272): transl_table=11

SEQ ID NO: 60145 - protein, 423 aa, Leptospira interrogans serovar Lai str. 56601; identical to SEQ ID NO: 35564

SEQ ID NO: 60146 - DNA, 1497 bp, Leptospira interrogans serovar Lai str. 56601; identical to SEQ ID NO: 35565
  CDS (1)..(1497): transl_table=11

SEQ ID NO: 60147 - protein, 498 aa, Leptospira interrogans serovar Lai str. 56601; identical to SEQ ID NO: 35566

SEQ ID NO: 60148 - DNA, 1287 bp, Leptospira interrogans serovar Lai str. 56601; identical to SEQ ID NO: 35567
  CDS (1)..(1287): transl_table=11

SEQ ID NO: 60149 - protein, 428 aa, Leptospira interrogans serovar Lai str. 56601; identical to SEQ ID NO: 35568

SEQ ID NO: 60150 - DNA, 870 bp, Leptospira interrogans serovar Lai str. 56601; identical to SEQ ID NO: 35569
  CDS (1)..(870): transl_table=11

SEQ ID NO: 60151 - protein, 289 aa, Leptospira interrogans serovar Lai str. 56601; identical to SEQ ID NO: 35570

SEQ ID NO: 60152 - DNA, 1281 bp, Leptospira interrogans serovar Lai str. 56601; identical to SEQ ID NO: 35571
  CDS (1)..(1281): transl_table=11

SEQ ID NO: 60153 - protein, 426 aa, Leptospira interrogans serovar Lai str. 56601; identical to SEQ ID NO: 35572

SEQ ID NO: 60154 - DNA, 1227 bp, Leptospira interrogans serovar Lai str. 56601; identical to SEQ ID NO: 35573
  CDS (1)..(1227): transl_table=11

SEQ ID NO: 60155 - protein, 408 aa, Leptospira interrogans serovar Lai str. 56601; identical to SEQ ID NO: 35574

SEQ ID NO: 60156 - DNA, 1134 bp, Leptospira interrogans serovar Lai str. 56601; identical to SEQ ID NO: 35575
  CDS (1)..(1134): transl_table=11

SEQ ID NO: 60157 - protein, 377 aa, Leptospira interrogans serovar Lai str. 56601; identical to SEQ ID NO: 35576

SEQ ID NO: 60158 - DNA, 936 bp, Leptospira interrogans serovar Lai str. 56601; identical to SEQ ID NO: 35577
  CDS (1)..(936): transl_table=11

SEQ ID NO: 60159 - protein, 311 aa, Leptospira interrogans serovar Lai str. 56601; identical to SEQ ID NO: 35578

SEQ ID NO: 60160 - DNA, 990 bp, Leptospira interrogans serovar Lai str. 56601; identical to SEQ ID NO: 35579
  CDS (1)..(990): transl_table=11

SEQ ID NO: 60161 - protein, 329 aa, Leptospira interrogans serovar Lai str. 56601; identical to SEQ ID NO: 35580

SEQ ID NO: 60162 - DNA, 1458 bp, Caenorhabditis elegans; identical to SEQ ID NO: 35581
  CDS (1)..(1458)

SEQ ID NO: 60163 - protein, 485 aa, Caenorhabditis elegans; identical to SEQ ID NO: 35582

SEQ ID NO: 60164 - DNA, 2160 bp, Eremothecium gossypii; identical to SEQ ID NO: 35583
  CDS (1)..(2160)

SEQ ID NO: 60165 - protein, 719 aa, Eremothecium gossypii; identical to SEQ ID NO: 35584

SEQ ID NO: 60166 - DNA, 3123 bp, Magnaporthe grisea 70-15; identical to SEQ ID NO: 35585
  CDS (1)..(3123)

SEQ ID NO: 60167 - protein, 1040 aa, Magnaporthe grisea 70-15; identical to SEQ ID NO: 35586

SEQ ID NO: 60168 - DNA, 2940 bp, Gibberella zeae PH-1; identical to SEQ ID NO: 35587
  CDS (1)..(2940)

SEQ ID NO: 60169 - protein, 979 aa, Gibberella zeae PH-1; identical to SEQ ID NO: 35588

SEQ ID NO: 60170 - DNA, 2943 bp, Aspergillus nidulans FGSC A4; identical to SEQ ID NO: 35589
  CDS (1)..(2943)

SEQ ID NO: 60171 - protein, 980 aa, Aspergillus nidulans FGSC A4; identical to SEQ ID NO: 35590

SEQ ID NO: 60172 - DNA, 2607 bp, Candida glabrata CBS138; identical to SEQ ID NO: 35591
  CDS (1)..(2607)

SEQ ID NO: 60173 - protein, 868 aa, Candida glabrata CBS138; identical to SEQ ID NO: 35592

SEQ ID NO: 60174 - DNA, 2379 bp, Kluyveromyces lactis NRRL Y-1140; identical to SEQ ID NO: 35593
  CDS (1)..(2379)

SEQ ID NO: 60175 - protein, 792 aa, Kluyveromyces lactis NRRL Y-1140; identical to SEQ ID NO: 35594

SEQ ID NO: 60176 - DNA, 2301 bp, Yarrowia lipolytica CLIB99; identical to SEQ ID NO: 35595
  CDS (1)..(2301)

SEQ ID NO: 60177 - protein, 766 aa, Yarrowia lipolytica CLIB99; identical to SEQ ID NO: 35596

SEQ ID NO: 60178 - DNA, 2466 bp, Candida albicans SC5314; identical to SEQ ID NO: 35597
  CDS (1)..(2466): transl_table=12

SEQ ID NO: 60179 - protein, 821 aa, Candida albicans SC5314; identical to SEQ ID NO: 35598

SEQ ID NO: 60180 - DNA, 1137 bp, Leptospira interrogans serovar Copenhageni str. Fiocruz L1-130; identical to SEQ ID NO: 35599
  CDS (1)..(1137): transl_table=11

SEQ ID NO: 60181 - protein, 378 aa, Leptospira interrogans serovar Copenhageni str. Fiocruz L1-130; identical to SEQ ID NO: 35600

SEQ ID NO: 60182 - DNA, 1209 bp, Leptospira interrogans serovar Copenhageni str. Fiocruz L1-130; identical to SEQ ID NO: 35601
  CDS (1)..(1209): transl_table=11

SEQ ID NO: 60183 - protein, 402 aa, Leptospira interrogans serovar Copenhageni str. Fiocruz L1-130; identical to SEQ ID NO: 35602

SEQ ID NO: 60184 - DNA, 1566 bp, Leptospira interrogans serovar Copenhageni str. Fiocruz L1-130; identical to SEQ ID NO: 35603
  CDS (1)..(1566): transl_table=11

SEQ ID NO: 60185 - protein, 521 aa, Leptospira interrogans serovar Copenhageni str. Fiocruz L1-130; identical to SEQ ID NO: 35604

SEQ ID NO: 60186 - DNA, 1134 bp, Leptospira interrogans serovar Copenhageni str. Fiocruz L1-130; identical to SEQ ID NO: 35605
  CDS (1)..(1134): transl_table=11

SEQ ID NO: 60187 - protein, 377 aa, Leptospira interrogans serovar Copenhageni str. Fiocruz L1-130; identical to SEQ ID NO: 35606

SEQ ID NO: 60188 - DNA, 1281 bp, Leptospira interrogans serovar Copenhageni str. Fiocruz L1-130; identical to SEQ ID NO: 35607
  CDS (1)..(1281): transl_table=11

SEQ ID NO: 60189 - protein, 426 aa, Leptospira interrogans serovar Copenhageni str. Fiocruz L1-130; identical to SEQ ID NO: 35608

SEQ ID NO: 60190 - DNA, 1719 bp, Leptospira interrogans serovar Copenhageni str. Fiocruz L1-130; identical to SEQ ID NO: 35609
  CDS (1)..(1719): transl_table=11

SEQ ID NO: 60191 - protein, 572 aa, Leptospira interrogans serovar Copenhageni str. Fiocruz L1-130; identical to SEQ ID NO: 35610

SEQ ID NO: 60192 - DNA, 1272 bp, Leptospira interrogans serovar Copenhageni str. Fiocruz L1-130; identical to SEQ ID NO: 35611
  CDS (1)..(1272): transl_table=11

SEQ ID NO: 60193 - protein, 423 aa, Leptospira interrogans serovar Copenhageni str. Fiocruz L1-130; identical to SEQ ID NO: 35612

SEQ ID NO: 60194 - DNA, 819 bp, Leptospira interrogans serovar Copenhageni str. Fiocruz L1-130; identical to SEQ ID NO: 35613
  CDS (1)..(819): transl_table=11

SEQ ID NO: 60195 - protein, 272 aa, Leptospira interrogans serovar Copenhageni str. Fiocruz L1-130; identical to SEQ ID NO: 35614

SEQ ID NO: 60196 - DNA, 1320 bp, Caenorhabditis briggsae; identical to SEQ ID NO: 35615
  CDS (1)..(1320)

SEQ ID NO: 60197 - protein, 439 aa, Caenorhabditis briggsae; identical to SEQ ID NO: 35616

SEQ ID NO: 60198 - DNA, 720 bp, Homo sapiens; identical to SEQ ID NO: 35617
  CDS (1)..(720)

SEQ ID NO: 60199 - protein, 239 aa, Homo sapiens; identical to SEQ ID NO: 35618

SEQ ID NO: 60200 - DNA, 720 bp, Homo sapiens; identical to SEQ ID NO: 35619
  CDS (1)..(720)

SEQ ID NO: 60201 - protein, 239 aa, Homo sapiens; identical to SEQ ID NO: 35620

SEQ ID NO: 60202 - DNA, 24 bp, Artificial sequence
  Primer sequence
atggtagcgacatcttcaaagagg

SEQ ID NO: 60203 - DNA, 23 bp, Artificial sequence
  Primer sequence
ttactccggagagttggcgctta

SEQ ID NO: 60204 - protein, 380 aa, Artificial sequence; identical to SEQ ID NO: 35623
  Consensus
  Variant (2)..(9): Xaa in position 2 to 9 is any amino acid
  Variant (10)..(11): Xaa in position 10 to 11 is any or no amino acid
  Variant (13)..(13): Xaa in position 13 is any amino acid
  Variant (15)..(18): Xaa in position 15 to 18 is any amino acid
  Variant (20)..(21): Xaa in position 20 to 21 is any amino acid
  Variant (24)..(24): Xaa in position 24 is any amino acid
  Variant (27)..(28): Xaa in position 27 to 28 is any amino acid
  Variant (30)..(31): Xaa in position 30 to 31 is any amino acid
  Variant (32)..(33): Xaa in position 32 to 33 is any or no amino acid
  Variant (35)..(36): Xaa in position 35 to 36 is any amino acid
  Variant (38)..(38): Xaa in position 38 is any amino acid
  Variant (40)..(41): Xaa in position 40 to 41 is any amino acid
  Variant (43)..(45): Xaa in position 43 to 45 is any or no amino acid
  Variant (47)..(52): Xaa in position 47 to 52 is any amino acid
  Variant (53)..(53): Xaa in position 53 is any or no amino acid
  Variant (55)..(59): Xaa in position 55 to 59 is any amino acid
  Variant (61)..(62): Xaa in position 61 to 62 is any amino acid
  Variant (64)..(64): Xaa in position 64 is any amino acid
  Variant (66)..(67): Xaa in position 66 to 67 is any amino acid
  Variant (69)..(75): Xaa in position 69 to 75 is any amino acid
  Variant (76)..(90): Xaa in position 76 to 90 is any or no amino acid
  Variant (93)..(94): Xaa in position 93 to 94 is any amino acid
  Variant (96)..(97): Xaa in position 96 to 97 is any amino acid
  Variant (99)..(105): Xaa in position 99 to 105 is any amino acid
  Variant (106)..(128): Xaa in position 106 to 128 is any or no amino acid
  Variant (130)..(137): Xaa in position 130 to 137 is any amino acid
  Variant (139)..(143): Xaa in position 139 to 143 is any amino acid
  Variant (145)..(151): Xaa in position 145 to 151 is any amino acid
  Variant (153)..(166): Xaa in position 153 to 166 is any amino acid
  Variant (167)..(214): Xaa in position 167 to 214 is any or no amino acid
  Variant (216)..(217): Xaa in position 216 to 217 is any amino acid
  Variant (219)..(219): Xaa in position 219 is any amino acid
  Variant (221)..(221): Xaa in position 221 is any amino acid
  Variant (222)..(222): Xaa in position 222 is any or no amino acid
  Variant (224)..(228): Xaa in position 224 to 228 is any amino acid
  Variant (229)..(265): Xaa in position 229 to 265 is any or no amino acid
  Variant (267)..(268): Xaa in position 267 to 268 is any amino acid
  Variant (270)..(271): Xaa in position 270 to 271 is any amino acid
  Variant (273)..(274): Xaa in position 273 to 274 is any amino acid
  Variant (276)..(296): Xaa in position 276 to 296 is any amino acid
  Variant (297)..(311): Xaa in position 297 to 311 is any or no amino acid
  Variant (313)..(314): Xaa in position 313 to 314 is any amino acid
  Variant (316)..(337): Xaa in position 316 to 337 is any amino acid
  Variant (338)..(364): Xaa in position 338 to 364 is any or no amino acid
  Variant (366)..(378): Xaa in position 366 to 378 is any amino acid
  Variant (379)..(379): Xaa in position 379 is any or no amino acid

SEQ ID NO: 60205 - protein, 46 aa, Artificial sequence; identical to SEQ ID NO: 35624
  Consensus
  Variant (2)..(4): Xaa in position 2 to 4 is any or no amino acid
  Variant (6)..(13): Xaa in position 6 to 13 is any amino acid
  Variant (14)..(14): Xaa in position 14 is any or no amino acid
  Variant (16)..(17): Xaa in position 16 to 17 is any amino acid
  Variant (18)..(18): Xaa in position 18 is Phe, Ile, Leu or Val
  Variant (19)..(19): Xaa in position 19 is any amino acid
  Variant (20)..(20): Xaa in position 20 is Ile, Leu or Val
  Variant (21)..(22): Xaa in position 21 to 22 is any amino acid
  Variant (24)..(24): Xaa in position 24 is any amino acid
  Variant (25)..(25): Xaa in position 25 is Phe, Ile or Leu
  Variant (26)..(27): Xaa in position 26 to 27 is any amino acid
  Variant (28)..(28): Xaa in position 28 is Phe, Ile, Leu or Val
  Variant (29)..(29): Xaa in position 29 is Pro or Ser
  Variant (30)..(31): Xaa in position 30 to 31 is any amino acid
  Variant (32)..(32): Xaa in position 32 is Ile, Leu or Val
  Variant (33)..(37): Xaa in position 33 to 37 is any amino acid
  Variant (39)..(45): Xaa in position 39 to 45 is any amino acid
  Variant (46)..(46): Xaa in position 46 is Asn or Ser

SEQ ID NO: 60206 - DNA, 1062 bp, Saccharomyces cerevisiae
  CDS (1)..(1062)
atgtcattaccacaatggtgtccaccgcattccaccttaaaaagaaatccaactacaggagaggacgtatactgcatatgtaaaaggccagactatggggagctgatggtgggatgtgatggttgtgatgactggtttcatttcacctgccttcatattcctgagcagtttaaggacctggtgttctctttttattgtccttactgtcaagcggggattactggtaagaataaggacgccataatcaatggtgaagggagcttgccaaaaaccttatggaaaagaaaatgtaggataagtgattgctacaaaccatgtttacaggatagtaaatactgttctgaggaacatggtagagaatttgtgaatgatatttggtcgcgattgaaaacagatgaggatagagcagtcgtcaagaaaatggtcgaacaaacaggacacatagataaattcaagaaatttggacaactggatttcattgataacaatatagttgtaaaaacagatgacgaaaaggaaatattcgatcaaattgttgtacgagacatgacgttaaaaactcttgaagatgatctgcaagaggttcaagagatatcgctaccattattcaaaaaaaagctagaacttttggaagtatatttgggatggttagacaacgtatataccgaaatgcgcaagctggacgatgatgctgcaagccatgtggaatgtggtaaagaagattccaaggggacaaaaaggaagaagaagaaaaatagcagcaggagtagggctaggaaaaatatatgtggctattgttctacatacgagcgaataccctgctctgtggaagaatttgtcagagattttggaagtaatgaggaagccaccaaaatacatgaggtatgcacgaagtggaagtgtaacagacatttggattgggtgtctactaatcaggaacaatacctccagcagattgactctttagaatctatgcaagaaaggttgcaacatctgatacaggccaggaaaaagcaactaaatatacaatactatgaggaaattttaagaagaggtttgtaa

SEQ ID NO: 60207 - protein, 353 aa, Saccharomyces cerevisiae
MSLPQWCPPHSTLKRNPTTGEDVYCICKRPDYGELMVGCDGCDDWFHFTCLHIPEQFKDLVFSFYCPYCQAGITGKNKDAIINGEGSLPKTLWKRKCRISDCYKPCLQDSKYCSEEHGREFVNDIWSRLKTDEDRAVVKKMVEQTGHIDKFKKFGQLDFIDNNIVVKTDDEKEIFDQIVVRDMTLKTLEDDLQEVQEISLPLFKKKLELLEVYLGWLDNVYTEMRKLDDDAASHVECGKEDSKGTKRKKKKNSSRSRARKNICGYCSTYERIPCSVEEFVRDFGSNEEATKIHEVCTKWKCNRHLDWVSTNQEQYLQQIDSLESMQERLQHLIQARKKQLNIQYYEEILRRGL

SEQ ID NO: 60208 - DNA, 1047 bp, Eremothecium gossypii
  CDS (1)..(1047)
atgggatttcgtattagagatgcacattaccatacgctagccgctaaccgttggtcaatagcgatgagcctaccagactggtgtcctccattccaaggtaccaagcaggaccccagcacgggcgaggatgtgtactgcatctgcaagaagccggacggcggcgagctgatggtgcagtgcgacggatgtggcgactggttccatttcacgtgcatccggatccccagcgcgtacaagagcttggtattctcgttctactgcccctattgccaggcaggtatcacgtacagcgggacgggcgcgctgccgaggacggtgtggaagcggcggtgccgcatggagggttgctaccgggcttgcgcgcgcgacagcaagtactgcgggccggagcacggggaggcgtacatgcgggcgctggtggagcgcgcggggccgggtgggcaggcggtggtgcagcagatggtgcgtacggggcagttcgagagcctgggcacgggcgcgctgccgctagcgcggcgcgacgtggacccggcgctgtacgaccgggtggtgggcgcggacgcgcggctcggggagctggaggcggaggcgcgcgaggtgcgcgaggcgcggcggtccgcgctgtgcgcacaactggccgcgctgagcgcgtacctggcgtgggtgcgtgaggtgaatgacgcgctgttccatgacacagaggaggcggctccgcggcgcggcaaggcgcgcgcgcgccgcaagcccaagcgcgcgctctgcggcttccgcgccgactaccaggcgccgctgccggccgcggactttgccgccagctacgcggacgacgcggcgctcctgcacggcgtgtgctgtcgcctgcgctgcccgcgccaccaagactgggccagcatgcggctcggctccgtgcagttcgagctcgaggcgctcgacagcgcggagcagcggctgcagctgctcatcagcatgcgcaaggaacacctgtcgctgcgcttccacgagctccgcgccggcgcacacccgcgcgtggccacgcctgctacgtag

SEQ ID NO: 60209 - protein, 348 aa, Eremothecium gossypii
MGFRIRDAHYHTLAANRWSIAMSLPDWCPPFQGTKQDPSTGEDVYCICKKPDGGELMVQCDGCGDWFHFTCIRIPSAYKSLVFSFYCPYCQAGITYSGTGALPRTVWKRRCRMEGCYRACARDSKYCGPEHGEAYMRALVERAGPGGQAVVQQMVRTGQFESLGTGALPLARRDVDPALYDRVVGADARLGELEAEAREVREARRSALCAQLAALSAYLAWVREVNDALFHDTEEAAPRRGKARARRKPKRALCGFRADYQAPLPAADFAASYADDAALLHGVCCRLRCPRHQDWASMRLGSVQFELEALDSAEQRLQLLISMRKEHLSLRFHELRAGAHPRVATPAT

SEQ ID NO: 60210 - DNA, 1083 bp, Candida glabrata CBS138
  CDS (1)..(1083)
atgtctaatttattgcctgaatggtgtccgccatactctacaaccaaaatagatactaacactggtgaggatgtctattgtatatgtaagaaacctgattatggtgagttaatggtgggatgtgacggatgtgatgactggtttcactttgagtgtatgaagatacctgaaacatacaggaatttagtcgagtctttcatatgtccgtattgccgtgtaggcataactggtcctggatctaaaggtgatggtgaatgccccaaatcattatggaagaaaaagtgtaggctccaggattgctatgagccttgcgaatctggtagcaaatactgttccaaagagcatgggaaagagtatatgtctcgattactaaataaggtaaaaatcaaaaacgaccttaataatagatacgctaatgagtctgatgataagctgttgaaagatgtttatcacgctaccaagaataatgtagagaagtttaaaacctttggttcctcatcatttatcgattccgatatcgatagagttgataggcatggtgagatttacgacaagataatcaatgatgataaatactataaagatctgttaacagaaaaagataacataacgaacaatcaaattgagggcttaaaaaagaaagtagaagagcttgataaatacttagactggattagctcagtcaataaactaatcaatggagaggataatactattgaacaagaagagaatgtgaatgataccattaagaccaagaaaaagaaaaagaaatctcaaaaaagaagatcaaagaaggctatctgcggttattctctcaacctagccaagataccttgcaatccagaagagttttacaacaaatattccgaaataacgacaagtacaccagattgtaatgaaatagaaggtatttgcattaaattaagatgtaacaagcactccgactggtctaccatgacctcagatcagtacacaaggcaaatcatttctcttgagactcatttgaagcgcttagacctatcaatatcgacaaggaaaaggcaacttaatatcaattattttgagcatataatgagatcatag

SEQ ID NO: 60211 - protein, 360 aa, Candida glabrata CBS138
MSNLLPEWCPPYSTTKIDTNTGEDVYCICKKPDYGELMVGCDGCDDWFHFECMKIPETYRNLVESFICPYCRVGITGPGSKGDGECPKSLWKKKCRLQDCYEPCESGSKYCSKEHGKEYMSRLLNKVKIKNDLNNRYANESDDKLLKDVYHATKNNVEKFKTFGSSSFIDSDIDRVDRHGEIYDKIINDDKYYKDLLTEKDNITNNQIEGLKKKVEELDKYLDWISSVNKLINGEDNTIEQEENVNDTIKTKKKKKKSQKRRSKKAICGYSLNLAKIPCNPEEFYNKYSEITTSTPDCNEIEGICIKLRCNKHSDWSTMTSDQYTRQIISLETHLKRLDLSISTRKRQLNINYFEHIMRS

SEQ ID NO: 60212 - DNA, 1029 bp, Kluyveromyces lactis NRRL Y-1140
  CDS (1)..(1029)
atgtcattacctagttggtgccccaggtatgacagcaggaaacacgacccaaaaactggggaagaagtttattgtatatgtaagaaaccagacactggggagttgatggtaggatgtgatggatgtgatgattggtttcatttttcctgtttaaagatccccgagaaatatagagatctcgttttttcattctactgttcgtattgtagtgctggaattacaggaccggcattgataaatggcggcaaactaccgaaaactctttggaagaggaaatgcaggctccctgaatgctatacagagtgtgatgccaattcaagaagcaaatattgttcaaagaaacatgctgttcaatacgttcaaagcattgttgataagttaaatctacctggcgtagataagattgcattgttgagacagcttctaaacgagacaacatcattggaggaatttaaaacgctaggacgagacaagcttccagaagtcacgtcacctttatccaaagatcaatattccaagttgctagaaaatgatcagcatttaaacaaattaattaacgaacacgatgagttggtttcggtcaagctttcaaaactaaatgaagaagatgcagtaatagagaaatacgtcaactggatcggtgaagttaacgagagattatccccacatttcaatcagcctacaggtcgaaagaagtcgaaaagtgcaagtaaagttacaatatgcggctaccataatgagttcacgatccctcggtcagttgaggagtttttagataagctacttcagttgaaagaagacgaaaacagtaatatcacatcagttgacggtgtttgtgtaaagacaaaatgtgctaagcatcaggattggattacattgtcccaaaacgatctctcggaacagaaggactctctagaaaacgtcaaaagaagactcgatttactaattagcgtcagaacgaaccaattgagaatctcattcttcgaacaagagatgtccaatcgcgtcctacccggtgttaagacctag

SEQ ID NO: 60213 - protein, 342 aa, Kluyveromyces lactis NRRL Y-1140
MSLPSWCPRYDSRKHDPKTGEEVYCICKKPDTGELMVGCDGCDDWFHFSCLKIPEKYRDLVFSFYCSYCSAGITGPALINGGKLPKTLWKRKCRLPECYTECDANSRSKYCSKKHAVQYVQSIVDKLNLPGVDKIALLRQLLNETTSLEEFKTLGRDKLPEVTSPLSKDQYSKLLENDQHLNKLINEHDELVSVKLSKLNEEDAVIEKYVNWIGEVNERLSPHFNQPTGRKKSKSASKVTICGYHNEFTIPRSVEEFLDKLLQLKEDENSNITSVDGVCVKTKCAKHQDWITLSQNDLSEQKDSLENVKRRLDLLISVRTNQLRISFFEQEMSNRVLPGVKT

SEQ ID NO: 60214 - DNA, 1425 bp, Debaryomyces hansenii CBS767
  CDS (1)..(1425)
atggatatttattcagaagtacaagaaatgtcaacttcacttcatgaacatataaaactgccaccagaagacaataaaactaaattgaaggatctatctgcatctacttcaaccttggataaaggtttatctggaaatatggaaaacgagcaaggcaaaaaaagacgatctgcatcaccagcaatttcgaacaaagagttcaagaaaaataaacttgaaaaagaagattcacaagatgactatagcggctctccatctgggctttctaatagatatccaacagaggaaatagaagacgagtcgtacgaagaaatagccaaacaatataagaaattttctaatgcacctaagtttaatctcaacagtgaagaattattctgtatctgtcgaaagccagactatggaggagagttaatgatttcatgtgacaattgtgatgaatggtttcacttcaaatgtatgaagttgaatgaagatcattccaagttaatagccaaattctattgcaagttctgtcgctggaaaggaatcagtagtacaaaatggaaaagaaaatgccgtttagattggtgctgggaacctattagagctgattctaaatcaaaatattgttgcgatgaacatggtgtaacttttattaaagaaaatttattaaggaaaactggaattaatgatttgaacccaacagatattaaatcaatatttaattattgtatctcatcgggtaatagctataaaaatctagttcaattgggttcagatttccctgaattaccagaaatttcttcacttaaagaggatggatctgacatttcacagttgcctggagatcttgaaaataggttgactaagataaattcaaatctagatagaattaattcaattactgatttgtgcaagctcaagagtgattatttactcaagattaaggaaaaaattaagattattaatgaaaggttacaggcatcttatcaagatgaagaacaagttgaaaaatgtgaagaatcgcttaaaagtaaaagatcgacgaaagaatctaaaagtaagaagtccaagaaatttgacctttgttgctacgacaaatctctaaatcaaggaatacaaacagatgtgcagtcgaaaaacgcctttgaaaagttcattaattctgctgatatatacactgattataaagaacaaattgatagtctaataagtttttatcgtgacaatatggatgatatcgattcaaattcattgtttaataactctatgtgtatacaggataaacgaaagtgtccaaggcataatggttggtggaacttaataaatgatgaacttgttaaaaggttcaatgaattatcccttactgcaaaaaaattggaagatgagaaattgatgattttaagaaattatagcatcaagatatatgaactgcgaacgtag

SEQ ID NO: 60215 - protein, 474 aa, Debaryomyces hansenii CBS767
MDIYSEVQEMSTSLHEHIKLPPEDNKTKLKDLSASTSTLDKGLSGNMENEQGKKRRSASPAISNKEFKKNKLEKEDSQDDYSGSPSGLSNRYPTEEIEDESYEEIAKQYKKFSNAPKFNLNSEELFCICRKPDYGGELMISCDNCDEWFHFKCMKLNEDHSKLIAKFYCKFCRWKGISSTKWKRKCRLDWCWEPIRADSKSKYCCDEHGVTFIKENLLRKTGINDLNPTDIKSIFNYCISSGNSYKNLVQLGSDFPELPEISSLKEDGSDISQLPGDLENRLTKINSNLDRINSITDLCKLKSDYLLKIKEKIKIINERLQASYQDEEQVEKCEESLKSKRSTKESKSKKSKKFDLCCYDKSLNQGIQTDVQSKNAFEKFINSADIYTDYKEQIDSLISFYRDNMDDIDSNSLFNNSMCIQDKRKCPRHNGWWNLINDELVKRFNELSLTAKKLEDEKLMILRNYSIKIYELRT

SEQ ID NO: 60216 - DNA, 1464 bp, Yarrowia lipolytica CLIB122
  CDS (1)..(1464)
atgtcttctaacgacgcgacttcggacgatacagacgccacggtcgaagaagacttcaaacgggagcccgagacagctgccaacctcgagagcaaccctcctagcgatccgccggttgagaatgaagaggcgagtgacagtgacgagcctagtggtggattttcatactctttgttgaagaagagtgttcctatgaaagagaaccaagcggagacagcaaagcccgaatctgtgatgaaatccgacccggttgtcaaagctgagctgctcacgtccgaggcaggatcagccacgccctcggctactgaatcgcctcgagaaacgccctccgatctgatgtctcccgaccccgatcacattcccagcaagtcttccaagcggcgtcaaccgaaacccaagagccgtcctgctccgaaaaagaagctgaaagtcgccgttgcgaaggactacaagttgccccccggtgctccacccgttgacaccagtcaccatggcgacgaagatcaccaggatctattttgtgtgtgcagacgacctgacgacggaaagtggatgattggatgcgattactgcgaagaatggatccatggaagctgtgtgggtataactccagccagagcaaaactcatgcacaagttctgctgtccttactgcacacacaaggccgaaaagatgcgtcccggcgaagaggccacggtggcccatcagatgacgctgaaacacggcacagaaaccacctggaagcgcgtttgtcgactggaagagtgccacaaggctgtctcataccccagcaagtactgctgcagagaacacggtctggagtacatgaagggcagagtggctgctctcagcaccaacagcaactcaagtgtggctgacgacactgaggagccgtttggaaagctttccgaggaacgtctagctgccatcgtccaacagactcccaacctggctgcgttcaagactctaggctcgactactcccgtcgaagcgtctcctgtgactcctaaacaaccctccacgcagctcaagtttgtggaacaaaagctcaagtacatgactctggtcaaggaccgaaccaagagtctcagtgaagaggccgctacagccgcgggagtaagaaagaaggatttatgtggctacgattcgcgtctggacaaggatcatgacatctgggcgaatgaatttgctgcccaggatgaactggtgggtattgccatgagtgatgatactagtaagacagtcactccttcccacgacgctctacacaacaaggaacacatttgcttgcaggacaagcggaaatgctataaccatctaggctgggctgctctgattaccgaccggctgaatttgcagctggctattctccagcgggaaatggagagaagcgaaggcgacgaggccgatctgaaggagattgagcggctgagaagcgttgagagtaagacgtggatcaagtga

SEQ ID NO: 60217 - protein, 487 aa, Yarrowia lipolytica CLIB122
MSSNDATSDDTDATVEEDFKREPETAANLESNPPSDPPVENEEASDSDEPSGGFSYSLLKKSVPMKENQAETAKPESVMKSDPVVKAELLTSEAGSATPSATESPRETPSDLMSPDPDHIPSKSSKRRQPKPKSRPAPKKKLKVAVAKDYKLPPGAPPVDTSHHGDEDHQDLFCVCRRPDDGKWMIGCDYCEEWIHGSCVGITPARAKLMHKFCCPYCTHKAEKMRPGEEATVAHQMTLKHGTETTWKRVCRLEECHKAVSYPSKYCCREHGLEYMKGRVAALSTNSNSSVADDTEEPFGKLSEERLAAIVQQTPNLAAFKTLGSTTPVEASPVTPKQPSTQLKFVEQKLKYMTLVKDRTKSLSEEAATAAGVRKKDLCGYDSRLDKDHDIWANEFAAQDELVGIAMSDDTSKTVTPSHDALHNKEHICLQDKRKCYNHLGWAALITDRLNLQLAILQREMERSEGDEADLKEIERLRSVESKTWIK

SEQ ID NO: 60218 - DNA, 1716 bp, Cryptococcus neoformans var. neoformans JEC21
  CDS (1)..(1716)
atgtccgaagctggagaaaacagagaggaggatagcggggccaagctacagacatccgagctggaacaaaatgacttgggtcacgaagaacgggaaagtaagaggagaaaattagacaacggagaggaatcagcagaacaaattgtttcacgacaagcctcaccagtgccaaatccttcacaggagggagaatcaccttctgctacagaacagccaccagcaaaagccctcactccctctgtgccctccccaaaacaatcatccgcgaaacctgatatcatcgccgcacccgagccggctgaggtgctcaacgtccttcccgctgctaccatagggcccatcaacggtacggagaacgaaccttcaggacagccactcaatgtctccgtttgttcccctcccacgatggtgaaggatgaggatatagagattgtggatggaacagttcccgagtttgcacctgcgcctgttagagacgaaaacgaaatgataaaaaaggaagatgtatctactcctgctgcggccgactcaccggctacagaaaaggatgaggtttcatcggccaaggggaaaacaaaatccgctcttgtgtcaaaatcccaagctagcaaggggaagaaggcacctgcaaagaagggcaaagcaaagacaaaggtggaagaattaaaagggagcaaggaacgttctgcaagtgtttccgttagtgcctcacatctttatttcaggtcatctactgaaagttcaacccaggaatcacgcgattcgactcctcctgtgtcgaccgatcaaagccaatttacctccccttccggagctcccatagactccaacgctgtctattgtatttgtcgcagaccagataccgacgacgacgacggtctgatggtcgggtgtgagagctgtgatgggtggttccatgcgtcttgcgtgggcctggatgaggagatggtggagctgctggatgtttatatctgtaagagctgtgaacgaactcaaaggacgatatataagcaggtttgtaaaagagacgggtgtaggaaatctgttgctggatcgagctccaagttttgctcttcacaatgtgcatttagatattcgcaagctatgctaggcgcgatcaccaacaaaaccgcaatcaagcagttaagcaaagctctcacatcttttcctcggcccaaactcggagtgaccgtggaacatcacgttccggcaaagtcagaaacctcaatcttctcagtgtacgatgacactcaaactcagcttttaactctccaaaaacgacaggaaggtgcacaaaaggccatggaacgcatacaaaagcgtcaagcccttttgcgaaacgcggtggacagatgcgaacaattaccgcccatcgcagcgactgaaactgaagaatcgcaacaaaaaggcaagaaacgtaaagccgggcgaccggcagacgacagaccgtgtgggtgggaagctagcctgatcgccgaggacgaagaagtagaagaattagtcaagggggaaggagatgaaatggaagtggttgaaggagaaagagaggtgtgcatgcttccaagaaggaggtgtgaccggcatcagggatggcagaagactgtcgctgtatctctggatctcgaattggccactttggtaagtgtagcaagttctccagctcgcggattgtttcaatcgtctcacaaagccacacatgcagacgcgcacgtatga

SEQ ID NO: 60219 - protein, 571 aa, Cryptococcus neoformans var. neoformans JEC21
MSEAGENREEDSGAKLQTSELEQNDLGHEERESKRRKLDNGEESAEQIVSRQASPVPNPSQEGESPSATEQPPAKALTPSVPSPKQSSAKPDIIAAPEPAEVLNVLPAATIGPINGTENEPSGQPLNVSVCSPPTMVKDEDIEIVDGTVPEFAPAPVRDENEMIKKEDVSTPAAADSPATEKDEVSSAKGKTKSALVSKSQASKGKKAPAKKGKAKTKVEELKGSKERSASVSVSASHLYFRSSTESSTQESRDSTPPVSTDQSQFTSPSGAPIDSNAVYCICRRPDTDDDDGLMVGCESCDGWFHASCVGLDEEMVELLDVYICKSCERTQRTIYKQVCKRDGCRKSVAGSSSKFCSSQCAFRYSQAMLGAITNKTAIKQLSKALTSFPRPKLGVTVEHHVPAKSETSIFSVYDDTQTQLLTLQKRQEGAQKAMERIQKRQALLRNAVDRCEQLPPIAATETEESQQKGKKRKAGRPADDRPCGWEASLIAEDEEVEELVKGEGDEMEVVEGEREVCMLPRRRCDRHQGWQKTVAVSLDLELATLVSVASSPARGLFQSSHKATHADAHV

SEQ ID NO: 60220 - DNA, 1221 bp, Candida albicans SC5314
  CDS (1)..(1221): transl_table=12
atggaccccgatactactcaatacgataaggtgaaaggagaatggtccgaaaatctgatagatatcaaaagcaatctaaaaagaagtaaaccctcacattcaataccgtcaaaaagggtcaaacatgatgtagattcatcgccacttgtggaggaatccaacgaggaaatcgccagacagtacaaaaaattcataaatgcacctaaatacgatcttaatagtgaagaattgttttgtgtatgcagacgtcccgacttgggtgaaatgatggttgcttgtgatggatgtgaagaatggttccatttcaagtgcatgaaaatcaatgaaaaatactccaacttgatagccaaatactattgcaaattttgcgaatggaagggggaaggtaattctcaatggaaaagaaaatgccgcctagaaaactgtaatgagccgataggagagagatccaaatattgttcgaaagaacacggaatagaatttataaaactgctgttgttggaatcaaaaacaaactccaccgatagtccctccttacaaaacttggatgcacattttataaaggatgttttgaactatgtatcaggtgactttgataaactacagcaaatgggatcaagttttccagagttggaggtagttaagaactataaaaatgataacacagctttagatggattcccagagactgtaaaaatagatttacaaaggacaaatgaaaaattggatgcgttgtcgaaacaggtaacaaaacaagaacaagtattaaaggcattagttaataccaaagacaatataaaacatttgaatgaaagactcactaatatagtatatgaagacctgtctctggacaagcagacttcgaaaaagaagaaaggcgctagaggcaagaaaaagatagatatctgcttttgtgataaaggcgaccaactgattgtacaactgatcactgattctgaaactatctttgatgatttattgaaagttataaaagcccgagtttttgagaatggggaagctgaggaagaagacatggattggtttatgaacgatttgtgtataaaagacaagaagaagtgtgttcgtcatagtggttggtggaatctatactacgatgaagctggcagaaacttggagcagttgcagagcaagctcgaagagacaatggaacaaaaagaatccatactaagaaattattctatcagtgtatacgaatcttaa

SEQ ID NO: 60221 - protein, 406 aa, Candida albicans SC5314
MDPDTTQYDKVKGEWSENSIDIKSNLKRSKPSHSIPSKRVKHDVDSSPLVEESNEEIARQYKKFINAPKYDLNSEELFCVCRRPDLGEMMVACDGCEEWFHFKCMKINEKYSNLIAKYYCKFCEWKGEGNSQWKRKCRLENCNEPIGERSKYCSKEHGIEFIKSSLLESKTNSTDSPSLQNLDAHFIKDVLNYVSGDFDKLQQMGSSFPELEVVKNYKNDNTALDGFPETVKIDLQRTNEKLDALSKQVTKQEQVLKALVNTKDNIKHLNERLTNIVYEDSSSDKQTSKKKKGARGKKKIDICFCDKGDQSIVQSITDSETIFDDLLKVIKARVFENGEAEEEDMDWFMNDLCIKDKKKCVRHSGWWNLYYDEAGRNLEQLQSKLEETMEQKESILRNYSISVYES

SEQ ID NO: 60222 - DNA, 2586 bp, Aspergillus fumigatus Af293
  CDS (1)..(2586)
atggctggacacgcgaccgcgcctgcggagcccagccaggccaacggctcaacaggtctcgacccatccaccacaaatccttacgagacaaatccggagttgattccgcccaccgatccatttctctctcgaagccggcaatacggccgctatgccccgcatgtcgatgatttcaaaccccgctacgatggttggtaccaggcggaaccggatgccatttcgtattgggaggagatagtgcgaacattctgcaccccgcaaaattccctgaatgtgcctgggacaagggaggtatacgctgctggcagtgttctaatcaaaatcgaccaggagcctgcggccggtgcggctgcggagcgatattcaaatgtgaatacgaacgagttgagtgctgctagaagagcgcaggattctcttcaagaactcggcgttgcgataccgatcatatacttttgtggcacagttgacggaaagaatgtcaccgtggagtcgagaattcccggggtgtctctggaggttgcctggaagtatctcaccattgaacagattggcgcttttaaacaacaatgccgtcgggttattcagcgccttgcactcgtcgagcctgcaccggattctgcgtcgtatgtctgcggcgaactcaactctcaatcacctccgggcgtcgaggactccgaaagggatatattgtttcaaggcagaaaggggacggagcagctccacctggttcacaacgatatgattcggtcgaatatcgtggtcaaggatggccggatcgttggcattctcggctggcggcaatgtgggttctttggctttgagcgagcaaagcagatacatcgtcagtttcggataccggagcgtcctgtcattgacaatggcggggtcaacgtaacacaggtctgggccgacctctatgatgatattccagacgttggtgggacgaacggcttcccagatcatcagactccagttgcaccagaggtgaaaattgagcctctgcagccgtcgttggacaagtatcccccaagcaatgaagcggaaaccctgcccgctctggcacaacttgatggcacccttttgcccgaagaacatccgacgccgaggaaagtcgctgacctgaagagcgaattggcctcaagagcatcatcggcagatcgatcttcgccgtctggctccaccaaggcagccgggaaaagaaaaccgggccctagtgcgtcgaagaaagggacagccaagaaacaagccacaaagaaacgcaaaatagacgaacttgcgagcgaagatgcggagagtcgtcgctccaacaccccttcttcgacgcgcgccagcaggacgcccggaactaagaagcagggatccgtatctgtcgcgggctctccggctcctgaaggcacgaaaaggaagaagaatgccaagaaggcgaaagtagagaaagcggaagaggaagaagagcaagaagaagattcgtcagaggatgacggggttttctgcatctgtcgcaagggtgatgatcatacgtggatgattgcatgcgacggtggatgtgatgattggtttcatggaaaatgcatcaacatcgatcccaaagatgcagatttgatagacaaatacatctgcccgaattgcaaggcggagggcaaaggttggacgacgtggaaacccatgtgtcgactaaagggttgtcggaaacccgctcgtgtgacaggcaagaaccccagtaagtattgctctgacgagcacggccgggagttcatgcgtcaacgggtccagcaactcaacagaagccccggggatcctgccaagaaagaatgggatgagcttggcagcagaggcggtgttcttacaacgggtgatctccacgcggtcgtcatggccgtctcctctgcggaggagttccgtaaacttggagagcgcattatttcgccgccgccagaagaggaggaccctgtgacaggagcaaggttgagcaagaaactgggcttggacgtggatcccgaaggcctgacctattctcatgacgaggcatctaaacttgagcaattacgcaaacaaagagaggaccttttccaccggcgcgacgtactcaacgcgcgttccacgttcatggcactcgttcgtcagcgatcaaagagcattgtcgagaagctgaagcaaacagatccaaagggaggatggaaggatatctgtgggttcgacacacgcctcgcatggtccgacgaggaattcaatgagtggagactgtccaagctcggagccaaagcgcttgaggagggcacccctgaggcactcgcttccagctatccagacgctgtggatgcggatggcgacacggccatgaatggcaccaaggcggaggaggaagatgaggacgagttggccaaattgacccgtggagtctgtacgaagaagcgttgcgagagacacaagcaatgggtcaaggttcaccagtccgaagttctcttcgaggaaaacaagctgaagcaggaccttgccacgtgcgagaaagaagcccagaatgttgtcgaaagggctgttctccgaatgtgggctgaaaaggaaaatgccgagaatggcagcgagtga

SEQ ID NO: 60223 - protein, 861 aa, Aspergillus fumigatus Af293
MAGHATAPAEPSQANGSTGLDPSTTNPYETNPELIPPTDPFLSRSRQYGRYAPHVDDFKPRYDGWYQAEPDAISYWEEIVRTFCTPQNSLNVPGTREVYAAGSVLIKIDQEPAAGAAAERYSNVNTNELSAARRAQDSLQELGVAIPIIYFCGTVDGKNVTVESRIPGVSLEVAWKYLTIEQIGAFKQQCRRVIQRLALVEPAPDSASYVCGELNSQSPPGVEDSERDILFQGRKGTEQLHLVHNDMIRSNIVVKDGRIVGILGWRQCGFFGFERAKQIHRQFRIPERPVIDNGGVNVTQVWADLYDDIPDVGGTNGFPDHQTPVAPEVKIEPLQPSLDKYPPSNEAETLPALAQLDGTLLPEEHPTPRKVADLKSELASRASSADRSSPSGSTKAAGKRKPGPSASKKGTAKKQATKKRKIDELASEDAESRRSNTPSSTRASRTPGTKKQGSVSVAGSPAPEGTKRKKNAKKAKVEKAEEEEEQEEDSSEDDGVFCICRKGDDHTWMIACDGGCDDWFHGKCINIDPKDADLIDKYICPNCKAEGKGWTTWKPMCRLKGCRKPARVTGKNPSKYCSDEHGREFMRQRVQQLNRSPGDPAKKEWDELGSRGGVLTTGDLHAVVMAVSSAEEFRKLGERIISPPPEEEDPVTGARLSKKLGLDVDPEGLTYSHDEASKLEQLRKQREDLFHRRDVLNARSTFMALVRQRSKSIVEKLKQTDPKGGWKDICGFDTRLAWSDEEFNEWRLSKLGAKALEEGTPEALASSYPDAVDADGDTAMNGTKAEEEDEDELAKLTRGVCTKKRCERHKQWVKVHQSEVLFEENKLKQDLATCEKEAQNVVERAVLRMWAEKENAENGSE

SEQ ID NO: 60224 - DNA, 1767 bp, Cryptococcus neoformans var
  CDS (1)..(1767)
atgtccgaagctggcgaaaacagagaggaggatagcggggccaagctacagacgtccgagctggaacaaaatgacttgggccacgaagaacgggaaagtaagaggagaaaattggacaacggagaggaatcagcagaacaaattgtttcacgacaagcctcaccagtgccaaatcctccacaggagggagaaccacgttctgctacagaacagccaccagcaaaagccctcactccatctgtgccctccccaaaacaatcatccgcgaaacctgatatcatcgccgcacccgagccggctgaggtgctcaacgtccttcccgctgctaccatagggcccatcaacggtacggagaacgaaccttcaggacagccactcaatgtctccgtttgttcccctccttccacgatggtgaaggatgaggatatagagattgtggatggaacagttcccgagtttgcacctgcgcctgttagagacgaaaacgaaatgataaaaaaggaagatgtatctactcctgctgcggccgactcaccggctacagaaaaggatgatgtttcatcggccaaggggaaaacaaaatccgctcttgtgacaaaatcccaagctagcaaggggaagaaggcacctgcaaagaagggcaaagcaaagacaaaggtggaagaattaaaagggagcaaggaacgttctgcaagtgtttccgttagtgcctcacatctttatttcaggtcatctactgaaagttcaacccaggaatcacgcgattcgactcctcctgtgtcgaccgatcaaagccaatttacctccccttccggagctcccatagactccaacgctgtctattgtatttgtcgcagaccagataccgacgacgacgacggtctgatggtcgggtgtgagagctgtgatgggtggttccatgcgtcttgcgtgggcctggatgaggagatggtggagctgctggatgtttatatctgtaagagctgtgaacgaactcaaaggacgatatataagcaggtttgtaaaagagacgggtgtaggaaatctgttgctggatcgagctccaagttttgctcttcacaatgtgcatttagatattcgcaagctatgctaggcgcgatcaccaacaaaaccgcaatcaagcagttgagcaaagctctcacatcttttcctcggcccaaactcggagtgaccgtggaacatcacgttccggcaaagtcagaaacctcaatcttctcagtgtacgatgacactcaaactcagcttttaactctccaaaaacgacaggaaggtgcacaaaaggccatggaacgcatacaaaagcgtcaagcccttttgcgaaacgcggtggacagatgcgaacaattaccgcccatcgcagcgactgaaactgaagagtcgcaacaaaaaggcaagaaacgtaaagccgggcgaccggcagacgacagaccgtgtgggtgggaagctagcctgatcgccgaggacgaagaagtggaagaattagtcaagggggaaggagatgaaatggaagtggttgaaggagaaagagaggtgtgcatgcttccaagaaggaggtgtgaccggcatcagggatggcagaagactgtcgctgtatctctggatctcgaattggccactttgacgcgcacgtatgaaagcctgcaggagaatcagcgattgatagaagaggccaatcaagccttgaaaatatccgaagaggctcgagaaatgtttttggcgaaaaaacaggctgtgaagcgcaaatag

SEQ ID NO: 60225 - protein, 588 aa, Cryptococcus neoformans var
MSEAGENREEDSGAKLQTSELEQNDLGHEERESKRRKLDNGEESAEQIVSRQASPVPNPPQEGEPRSATEQPPAKALTPSVPSPKQSSAKPDIIAAPEPAEVLNVLPAATIGPINGTENEPSGQPLNVSVCSPPSTMVKDEDIEIVDGTVPEFAPAPVRDENEMIKKEDVSTPAAADSPATEKDDVSSAKGKTKSALVTKSQASKGKKAPAKKGKAKTKVEELKGSKERSASVSVSASHLYFRSSTESSTQESRDSTPPVSTDQSQFTSPSGAPIDSNAVYCICRRPDTDDDDGLMVGCESCDGWFHASCVGLDEEMVELLDVYICKSCERTQRTIYKQVCKRDGCRKSVAGSSSKFCSSQCAFRYSQAMLGAITNKTAIKQLSKALTSFPRPKLGVTVEHHVPAKSETSIFSVYDDTQTQLLTLQKRQEGAQKAMERIQKRQALLRNAVDRCEQLPPIAATETEESQQKGKKRKAGRPADDRPCGWEASLIAEDEEVEELVKGEGDEMEVVEGEREVCMLPRRRCDRHQGWQKTVAVSLDLELATLTRTYESLQENQRLIEEANQALKISEEAREMFLAKKQAVKRK

SEQ ID NO: 60226 - DNA, 24 bp, Artificial sequence
  Primer sequence
atgtcattaccacaatggtgtcca

SEQ ID NO: 60227 - DNA, 27 bp, Artificial sequence
  Primer sequence
ttacaaacctcttcttaaaatttcctc

SEQ ID NO: 60228 - protein, 354 aa, Artificial sequence
  Consensus
  Variant (4)..(5): Xaa in position 4 to 5 is any amino acid
  Variant (8)..(11): Xaa in position 8 to 11 is any amino acid
  Variant (12)..(14): Xaa in position 12 to 14 is any or no amino acid
  Variant (16)..(17): Xaa in position 16 to 17 is any amino acid
  Variant (19)..(20): Xaa in position 19 to 20 is any amino acid
  Variant (22)..(23): Xaa in position 22 to 23 is any amino acid
  Variant (27)..(28): Xaa in position 27 to 28 is any amino acid
  Variant (30)..(38): Xaa in position 30 to 38 is any amino acid
  Variant (40)..(44): Xaa in position 40 to 44 is any amino acid
  Variant (46)..(47): Xaa in position 46 to 47 is any amino acid
  Variant (49)..(55): Xaa in position 49 to 55 is any amino acid
  Variant (56)..(76): Xaa in position 56 to 76 is any or no amino acid
  Variant (79)..(80): Xaa in position 79 to 80 is any amino acid
  Variant (83)..(85): Xaa in position 83 to 85 is any amino acid
  Variant (87)..(93): Xaa in position 87 to 93 is any amino acid
  Variant (95)..(95): Xaa in position 95 is any amino acid
  Variant (96)..(98): Xaa in position 96 to 98 is any or no amino acid
  Variant (102)..(104): Xaa in position 102 to 104 is any amino acid
  Variant (106)..(209): Xaa in position 106 to 209 is any amino acid
  Variant (210)..(244): Xaa in position 210 to 244 is any or no amino acid
  Variant (246)..(287): Xaa in position 246 to 287 is any amino acid
  Variant (288)..(325): Xaa in position 288 to 325 is any or no amino acid
  Variant (327)..(330): Xaa in position 327 to 330 is any amino acid
  Variant (331)..(332): Xaa in position 331 to 332 is any or no amino acid
  Variant (334)..(335): Xaa in position 334 to 335 is any amino acid
  Variant (337)..(338): Xaa in position 337 to 338 is any amino acid
  Variant (340)..(353): Xaa in position 340 to 353 is any amino acid
CICXXPDXXXXXXXMXXCXXCXXWFHXXCXXXXXXXXXLXXXXXCXXCXXXXXXXXXXXXXXXXXXXXXXXXXXXXWKXXCRXXXCXXXXXXXSXXXXKYCXXXHXXXXXXXXXXXXXXXXXXXXXXXXXXXXXXXXXXXXXXXXXXXXXXXXXXXXXXXXXXXXXXXXXXXXXXXXXXXXXXXXXXXXXXXXXXXXXXXXXXXXXXXXXXXXXXXXXXXXXXXXXXXXXXXXXXXXXXXXXXXKXXXXXXXXXXXXXXXXXXXXXXXXXXXXXXXXXXXXXXXXXXXXXXXXXXXXXXXXXXXXXXXXXXXXXXXXXXXXXXXXCXXXXXXCXXHXXWXXXXXXXXXXXXXXL

SEQ ID NO: 60229 - protein, 49 aa, Artificial sequence
  Consensus
  Variant (2)..(2): Xaa in position 2 is Ile or Val
  Variant (4)..(5): Xaa in position 4 to 5 is Lys or Arg
  Variant (8)..(8): Xaa in position 8 is any amino acid
  Variant (9)..(12): Xaa in position 9 to 12 is any or no amino acid
  Variant (14)..(14): Xaa in position 14 is any amino acid
  Variant (15)..(15): Xaa in position 15 is any or no amino acid
  Variant (17)..(17): Xaa in position 17 is Ile or Val
  Variant (18)..(18): Xaa in position 18 is Ala, Gly, Gln or Ser
  Variant (20)..(20): Xaa in position 20 is Asp or Glu
  Variant (21)..(21): Xaa in position 21 is Gly, Asn or Ser
  Variant (23)..(24): Xaa in position 23 to 24 is Asp, Glu or Gly
  Variant (28)..(29): Xaa in position 28 to 29 is any amino acid
  Variant (31)..(31): Xaa in position 31 is Ile, Leu, Met or Val
  Variant (32)..(32): Xaa in position 32 is any amino acid
  Variant (33)..(33): Xaa in position 33 is Ile or Leu
  Variant (34)..(34): Xaa in position 34 is Asp, Asn or Pro
  Variant (35)..(35): Xaa in position 35 is Glu or Ser
  Variant (36)..(39): Xaa in position 36 to 39 is any amino acid
  Variant (41)..(41): Xaa in position 41 is Ile, Leu or Val
  Variant (42)..(43): Xaa in position 42 to 43 is any amino acid
  Variant (44)..(44): Xaa in position 44 is Phe or Tyr
  Variant (45)..(45): Xaa in position 45 is any amino acid
  Variant (47)..(48): Xaa in position 47 to 48 is any amino acid
CXCXXPDXXXXXGXXMXXCXXCXXWFHXXCXXXXXXXXXLXXXXXCXXC

SEQ ID NO: 60230 - protein, 24 aa, Artificial sequence
  Consensus
  Variant (2)..(3): Xaa in position 2 to 3 is any amino acid
  Variant (6)..(6): Xaa in position 6 is Ile, Leu or Met
  Variant (7)..(8): Xaa in position 7 to 8 is any amino acid
  Variant (10)..(16): Xaa in position 10 to 16 is any amino acid
  Variant (17)..(20): Xaa in position 17 to 20 is any or no amino acid
KXXCRXXXCXXXXXXXXXXXSKYC

SEQ ID NO: 60231 - protein, 16 aa, Artificial sequence
  Consensus
  Variant (2)..(2): Xaa in position 2 is any amino acid
  Variant (3)..(3): Xaa in position 3 is Lys or Arg
  Variant (5)..(5): Xaa in position 5 is any amino acid
  Variant (6)..(6): Xaa in position 6 is Asp, Gly or Gln
  Variant (8)..(9): Xaa in position 8 to 9 is any amino acid
  Variant (10)..(15): Xaa in position 10 to 15 is any or no amino acid
CXXHXXWXXXXXXXXL

SEQ ID NO: 60232 - DNA, 1113 bp, Saccharomyces cerevisiae; identical to SEQ ID NO: 21037
  CDS (1)..(1113)

SEQ ID NO: 60233 - protein, 370 aa, Saccharomyces cerevisiae; identical to SEQ ID NO: 21038

SEQ ID NO: 60234 - DNA, 1389 bp, Aeropyrum pernix; identical to SEQ ID NO: 21039
  CDS (1)..(1389)

SEQ ID NO: 60235 - protein, 462 aa, Aeropyrum pernix; identical to SEQ ID NO: 21040

SEQ ID NO: 60236 - DNA, 1035 bp, Agrobacterium tumefaciens; identical to SEQ ID NO: 21041
  CDS (1)..(1035)

SEQ ID NO: 60237 - protein, 344 aa, Agrobacterium tumefaciens; identical to SEQ ID NO: 21042

SEQ ID NO: 60238 - DNA, 1338 bp, Medicago sativa (alfalfa); identical to SEQ ID NO: 21043
  CDS (121)..(1191)

SEQ ID NO: 60239 - protein, 356 aa, Medicago sativa (alfalfa); identical to SEQ ID NO: 21044

SEQ ID NO: 60240 - DNA, 1950 bp, Azotobacter vinelandii; identical to SEQ ID NO: 21045
  CDS (478)..(1881)

SEQ ID NO: 60241 - protein, 467 aa, Azotobacter vinelandii; identical to SEQ ID NO: 21046

SEQ ID NO: 60242 - DNA, 1600 bp, Hordeum vulgare (barley); identical to SEQ ID NO: 21047
  CDS (281)..(1585)

SEQ ID NO: 60243 - protein, 434 aa, Hordeum vulgare (barley); identical to SEQ ID NO: 21048

SEQ ID NO: 60244 - DNA, 1335 bp, Bacillus subtilis; identical to SEQ ID NO: 21049
  CDS (1)..(1335)

SEQ ID NO: 60245 - protein, 444 aa, Bacillus subtilis; identical to SEQ ID NO: 21050

SEQ ID NO: 60246 - DNA, 2352 bp, Bacillus cereus; identical to SEQ ID NO: 21051
  CDS (860)..(2194)

SEQ ID NO: 60247 - protein, 444 aa, Bacillus cereus; identical to SEQ ID NO: 21052

SEQ ID NO: 60248 - DNA, 1122 bp, Gallus gallus (chicken); identical to SEQ ID NO: 21053
  CDS (1)..(1122)

SEQ ID NO: 60249 - protein, 373 aa, Gallus gallus (chicken); identical to SEQ ID NO: 21054

SEQ ID NO: 60250 - DNA, 2192 bp, Clostridium acetobutylicum; identical to SEQ ID NO: 21055
  misc_feature (2171)..(2171): n is a, c, g, or t
  CDS (396)..(1727)

SEQ ID NO: 60251 - protein, 443 aa, Clostridium acetobutylicum; identical to SEQ ID NO: 21056

SEQ ID NO: 60252 - DNA, 1410 bp, Escherichia coli; identical to SEQ ID NO: 21057
  CDS (1)..(1410)

SEQ ID NO: 60253 - protein, 469 aa, Escherichia coli; identical to SEQ ID NO: 21058

SEQ ID NO: 60254 - DNA, 1448 bp, Phaseolus vulgaris (kidney bean); identical to SEQ ID NO: 21059
  CDS (69)..(1139)

SEQ ID NO: 60255 - protein, 356 aa, Phaseolus vulgaris (kidney bean); identical to SEQ ID NO: 21060

SEQ ID NO: 60256 - DNA, 1353 bp, Phaseolus vulgaris (kidney bean); identical to SEQ ID NO: 21061
  CDS (116)..(1186)

SEQ ID NO: 60257 - protein, 356 aa, Phaseolus vulgaris (kidney bean); identical to SEQ ID NO: 21062

SEQ ID NO: 60258 - DNA, 1454 bp, Phaseolus vulgaris (kidney bean); identical to SEQ ID NO: 21063
  CDS (123)..(1193)

SEQ ID NO: 60259 - protein, 356 aa, Phaseolus vulgaris (kidney bean); identical to SEQ ID NO: 21064

SEQ ID NO: 60260 - DNA, 1510 bp, Phaseolus vulgaris (kidney bean); identical to SEQ ID NO: 21065
  CDS (64)..(1353)

SEQ ID NO: 60261 - protein, 429 aa, Phaseolus vulgaris (kidney bean); identical to SEQ ID NO: 21066

SEQ ID NO: 60262 - DNA, 1421 bp, Cricetulus griseus (Chinese hamster); identical to SEQ ID NO: 21067
  misc_feature (1)..(2): n is a, c, g, or t
  CDS (147)..(1268)

SEQ ID NO: 60263 - protein, 373 aa, Cricetulus griseus (Chinese hamster); identical to SEQ ID NO: 21068

SEQ ID NO: 60264 - DNA, 1910 bp, Azospirillum brasilense; identical to SEQ ID NO: 21069
  CDS (351)..(1757)

SEQ ID NO: 60265 - protein, 468 aa, Azospirillum brasilense; identical to SEQ ID NO: 21070

SEQ ID NO: 60266 - DNA, 1205 bp, Frankia sp; identical to SEQ ID NO: 21071
  CDS (59)..(1117)

SEQ ID NO: 60267 - protein, 352 aa, Frankia sp; identical to SEQ ID NO: 21072

SEQ ID NO: 60268 - DNA, 1429 bp, Lactuca sativa (garden lettuce); identical to SEQ ID NO: 21073
  CDS (16)..(1092)

SEQ ID NO: 60269 - protein, 358 aa, Lactuca sativa (garden lettuce); identical to SEQ ID NO: 21074

SEQ ID NO: 60270 - DNA, 1434 bp, Pisum sativum (garden pea); identical to SEQ ID NO: 21075
  CDS (83)..(1150)

SEQ ID NO: 60271 - protein, 355 aa, Pisum sativum (garden pea); identical to SEQ ID NO: 21076

SEQ ID NO: 60272 - DNA, 1540 bp, Pisum sativum (garden pea); identical to SEQ ID NO: 21077
  CDS (68)..(1360)

SEQ ID NO: 60273 - protein, 430 aa, Pisum sativum (garden pea); identical to SEQ ID NO: 21078

SEQ ID NO: 60274 - DNA, 1169 bp, Oryza sativa (rice); identical to SEQ ID NO: 21079
  CDS (59)..(1132)

SEQ ID NO: 60275 - protein, 357 aa, Oryza sativa (rice); identical to SEQ ID NO: 21080

SEQ ID NO: 60276 - DNA, 1287 bp, Oryza sativa (rice); identical to SEQ ID NO: 21081
  CDS (1)..(1287)

SEQ ID NO: 60277 - protein, 428 aa, Oryza sativa (rice); identical to SEQ ID NO: 21082

SEQ ID NO: 60278 - DNA, 1553 bp, Oryza sativa (rice); identical to SEQ ID NO: 21083
  CDS (55)..(1125)

SEQ ID NO: 60279 - protein, 356 aa, Oryza sativa (rice); identical to SEQ ID NO: 21084

SEQ ID NO: 60280 - DNA, 1208 bp, Streptomyces hygroscopicus; identical to SEQ ID NO: 21085
  CDS (136)..(1158)

SEQ ID NO: 60281 - protein, 340 aa, Streptomyces hygroscopicus; identical to SEQ ID NO: 21086

SEQ ID NO: 60282 - DNA, 1032 bp, Streptomyces viridochromogenes; identical to SEQ ID NO: 21087
  CDS (1)..(1032)

SEQ ID NO: 60283 - protein, 343 aa, Streptomyces viridochromogenes; identical to SEQ ID NO: 21088

SEQ ID NO: 60284 - DNA, 1270 bp, Bradyrhizobium japonicum; identical to SEQ ID NO: 21089
  CDS (281)..(1270)

SEQ ID NO: 60285 - protein, 329 aa, Bradyrhizobium japonicum; identical to SEQ ID NO: 21090

SEQ ID NO: 60286 - DNA, 1446 bp, Helicobacter pylori; identical to SEQ ID NO: 21091
  CDS (1)..(1446)

SEQ ID NO: 60287 - protein, 481 aa, Helicobacter pylori; identical to SEQ ID NO: 21092

SEQ ID NO: 60288 - DNA, 1368 bp, Bacillus halodurans; identical to SEQ ID NO: 21093
  CDS (1)..(1368)

SEQ ID NO: 60289 - protein, 455 aa, Bacillus halodurans; identical to SEQ ID NO: 21094

SEQ ID NO: 60290 - DNA, 1410 bp, Caulobacter crescentus; identical to SEQ ID NO: 21095
  CDS (1)..(1410)

SEQ ID NO: 60291 - protein, 469 aa, Caulobacter crescentus; identical to SEQ ID NO: 21096

SEQ ID NO: 60292 - DNA, 1035 bp, Sinorhizobium meliloti; identical to SEQ ID NO: 21097
  CDS (1)..(1035)

SEQ ID NO: 60293 - protein, 344 aa, Sinorhizobium meliloti; identical to SEQ ID NO: 21098

SEQ ID NO: 60294 - DNA, 1212 bp, Squalus acanthias (spiny dogfish); identical to SEQ ID NO: 21099
  CDS (1)..(1212)

SEQ ID NO: 60295 - protein, 403 aa, Squalus acanthias (spiny dogfish); identical to SEQ ID NO: 21100

SEQ ID NO: 60296 - DNA, 1617 bp, Xenopus laevis (African clawed frog); identical to SEQ ID NO: 21101
  CDS (65)..(1243)

SEQ ID NO: 60297 - protein, 392 aa, Xenopus laevis (African clawed frog); identical to SEQ ID NO: 21102

SEQ ID NO: 60298 - DNA, 1942 bp, Calothrix sp; identical to SEQ ID NO: 21103
  CDS (375)..(1790)

SEQ ID NO: 60299 - protein, 471 aa, Calothrix sp; identical to SEQ ID NO: 21104

SEQ ID NO: 60300 - DNA, 1098 bp, Paracentrotus lividus (common urchin); identical to SEQ ID NO: 21105
  CDS (1)..(1098)

SEQ ID NO: 60301 - protein, 365 aa, Paracentrotus lividus (common urchin); identical to SEQ ID NO: 21106

SEQ ID NO: 60302 - DNA, 1340 bp, Nicotiana plumbaginifolia (curled-leaved tobacco); identical to SEQ ID NO: 21107
  CDS (16)..(1086)

SEQ ID NO: 60303 - protein, 356 aa, Nicotiana plumbaginifolia (curled-leaved tobacco); identical to SEQ ID NO: 21108

SEQ ID NO: 60304 - DNA, 2045 bp, Panulirus argus (spiny lobster); identical to SEQ ID NO: 21109
  CDS (56)..(1141)

SEQ ID NO: 60305 - protein, 361 aa, Panulirus argus (spiny lobster); identical to SEQ ID NO: 21110

SEQ ID NO: 60306 - DNA, 1450 bp, Glycine max (soybean); identical to SEQ ID NO: 21111
  CDS (78)..(1145)

SEQ ID NO: 60307 - protein, 355 aa, Glycine max (soybean); identical to SEQ ID NO: 21112

SEQ ID NO: 60308 - DNA, 1642 bp, Arabidopsis thaliana (mouse-ear cress); identical to SEQ ID NO: 21113
  CDS (138)..(1430)

SEQ ID NO: 60309 - protein, 430 aa, Arabidopsis thaliana (mouse-ear cress); identical to SEQ ID NO: 21114

SEQ ID NO: 60310 - DNA, 1617 bp, Rhizobium leguminosarum; identical to SEQ ID NO: 21115
  CDS (569)..(1549)

SEQ ID NO: 60311 - protein, 326 aa, Rhizobium leguminosarum; identical to SEQ ID NO: 21116

SEQ ID NO: 60312 - DNA, 1575 bp, Brassica napus (rape); identical to SEQ ID NO: 21117
  CDS (95)..(1381)

SEQ ID NO: 60313 - protein, 428 aa, Brassica napus (rape); identical to SEQ ID NO: 21118

SEQ ID NO: 60314 - DNA, 1423 bp, Pinus sylvestris (Scotch pine); identical to SEQ ID NO: 21119
  CDS (34)..(1107)

SEQ ID NO: 60315 - protein, 357 aa, Pinus sylvestris (Scotch pine); identical to SEQ ID NO: 21120

SEQ ID NO: 60316 - DNA, 1359 bp, Zea mays (maize); identical to SEQ ID NO: 21121
  CDS (10)..(1083)

SEQ ID NO: 60317 - protein, 357 aa, Zea mays (maize); identical to SEQ ID NO: 21122

SEQ ID NO: 60318 - DNA, 1369 bp, Zea mays (maize); identical to SEQ ID NO: 21123
  CDS (103)..(1209)

SEQ ID NO: 60319 - protein, 368 aa, Zea mays (maize); identical to SEQ ID NO: 21124

SEQ ID NO: 60320 - DNA, 1317 bp, Zea mays (maize); identical to SEQ ID NO: 21125
  CDS (63)..(1133)

SEQ ID NO: 60321 - protein, 356 aa, Zea mays (maize); identical to SEQ ID NO: 21126

SEQ ID NO: 60322 - DNA, 1490 bp, Zea mays (maize); identical to SEQ ID NO: 21127
  CDS (85)..(1152)

SEQ ID NO: 60323 - protein, 355 aa, Zea mays (maize); identical to SEQ ID NO: 21128

SEQ ID NO: 60324 - DNA, 1483 bp, Zea mays (maize); identical to SEQ ID NO: 21129
  CDS (48)..(1319)

SEQ ID NO: 60325 - protein, 423 aa, Zea mays (maize); identical to SEQ ID NO: 21130

SEQ ID NO: 60326 - DNA, 1400 bp, Brassica napus (rape); identical to SEQ ID NO: 21131
  CDS (68)..(1138)

SEQ ID NO: 60327 - protein, 356 aa, Brassica napus (rape); identical to SEQ ID NO: 21132

SEQ ID NO: 60328 - DNA, 1370 bp, Sus scrofa domestica (domestic pig); identical to SEQ ID NO: 21133
  CDS (118)..(1239)

SEQ ID NO: 60329 - protein, 373 aa, Sus scrofa domestica (domestic pig); identical to SEQ ID NO: 21134

SEQ ID NO: 60330 - DNA, 1433 bp, Glycine max (soybean); identical to SEQ ID NO: 21135
  CDS (70)..(1137)

SEQ ID NO: 60331 - protein, 355 aa, Glycine max (soybean); identical to SEQ ID NO: 21136

SEQ ID NO: 60332 - DNA, 1354 bp, Brassica napus (rape); identical to SEQ ID NO: 21137
  CDS (62)..(1132)

SEQ ID NO: 60333 - protein, 356 aa, Brassica napus (rape); identical to SEQ ID NO: 21138

SEQ ID NO: 60334 - DNA, 1333 bp, Raphanus sativus (radish); identical to SEQ ID NO: 21139
  CDS (37)..(1101)

SEQ ID NO: 60335 - protein, 354 aa, Raphanus sativus (radish); identical to SEQ ID NO: 21140

SEQ ID NO: 60336 - DNA, 1484 bp, Raphanus sativus (radish); identical to SEQ ID NO: 21141
  CDS (170)..(1240)

SEQ ID NO: 60337 - protein, 356 aa, Raphanus sativus (radish); identical to SEQ ID NO: 21142

SEQ ID NO: 60338 - DNA, 1326 bp, Raphanus sativus (radish); identical to SEQ ID NO: 21143
  CDS (65)..(1135)

SEQ ID NO: 60339 - protein, 356 aa, Raphanus sativus (radish); identical to SEQ ID NO: 21144

SEQ ID NO: 60340 - DNA, 1416 bp, Vitis vinifera (grape); identical to SEQ ID NO: 21145
  CDS (88)..(1158)

SEQ ID NO: 60341 - protein, 356 aa, Vitis vinifera (grape); identical to SEQ ID NO: 21146

SEQ ID NO: 60342 - DNA, 1305 bp, Vitis vinifera (grape); identical to SEQ ID NO: 21147
  CDS (24)..(1094)

SEQ ID NO: 60343 - protein, 356 aa, Vitis vinifera (grape); identical to SEQ ID NO: 21148

SEQ ID NO: 60344 - DNA, 1346 bp, Nicotiana tabacum (common tobacco); identical to SEQ ID NO: 21149
  CDS (21)..(1091)

SEQ ID NO: 60345 - protein, 356 aa, Nicotiana tabacum (common tobacco); identical to SEQ ID NO: 21150

SEQ ID NO: 60346 - DNA, 1381 bp, Nicotiana tabacum (common tobacco); identical to SEQ ID NO: 21151
  CDS (54)..(1124)

SEQ ID NO: 60347 - protein, 356 aa, Nicotiana tabacum (common tobacco); identical to SEQ ID NO: 21152

SEQ ID NO: 60348 - DNA, 1310 bp, Glycine max (soybean); identical to SEQ ID NO: 21153
  CDS (62)..(1129)

SEQ ID NO: 60349 - protein, 355 aa, Glycine max (soybean); identical to SEQ ID NO: 21154

SEQ ID NO: 60350 - DNA, 2030 bp, Chlamydomonas reinhardtii; identical to SEQ ID NO: 21155
  CDS (84)..(1232)

SEQ ID NO: 60351 - protein, 382 aa, Chlamydomonas reinhardtii; identical to SEQ ID NO: 21156

SEQ ID NO: 60352 - DNA, 1604 bp, Chlamydomonas reinhardtii; identical to SEQ ID NO: 21157
  CDS (12)..(1154)

SEQ ID NO: 60353 - protein, 380 aa, Chlamydomonas reinhardtii; identical to SEQ ID NO: 21158

SEQ ID NO: 60354 - DNA, 1376 bp, Daucus carota (carrot); identical to SEQ ID NO: 21159
  CDS (84)..(1142)

SEQ ID NO: 60355 - protein, 352 aa, Daucus carota (carrot); identical to SEQ ID NO: 21160

SEQ ID NO: 60356 - DNA, 1537 bp, Daucus carota (carrot); identical to SEQ ID NO: 21161
  CDS (17)..(1315)

SEQ ID NO: 60357 - protein, 432 aa, Daucus carota (carrot); identical to SEQ ID NO: 21162

SEQ ID NO: 60358 - DNA, 1167 bp, Caenorhabditis elegans; identical to SEQ ID NO: 21163
  CDS (10)..(1167)

SEQ ID NO: 60359 - protein, 385 aa, Caenorhabditis elegans; identical to SEQ ID NO: 21164

SEQ ID NO: 60360 - DNA, 1080 bp, Schizosaccharomyces pombe; identical to SEQ ID NO: 21165
  CDS (1)..(1080)

SEQ ID NO: 60361 - protein, 359 aa, Schizosaccharomyces pombe; identical to SEQ ID NO: 21166

SEQ ID NO: 60362 - DNA, 1597 bp, Brassica napus; identical to SEQ ID NO: 21167
  CDS (97)..(1383)

SEQ ID NO: 60363 - protein, 428 aa, Brassica napus; identical to SEQ ID NO: 21168

SEQ ID NO: 60364 - DNA, 1425 bp, Medicago truncatula; identical to SEQ ID NO: 21169
  CDS (73)..(1143)

SEQ ID NO: 60365 - protein, 356 aa, Medicago truncatula; identical to SEQ ID NO: 21170

SEQ ID NO: 60366 - DNA, 1488 bp, Medicago truncatula; identical to SEQ ID NO: 21171
  CDS (145)..(1215)

SEQ ID NO: 60367 - protein, 356 aa, Medicago truncatula; identical to SEQ ID NO: 21172

SEQ ID NO: 60368 - DNA, 1495 bp, Hevea brasiliensis; identical to SEQ ID NO: 21173
  CDS (114)..(1184)

SEQ ID NO: 60369 - protein, 356 aa, Hevea brasiliensis; identical to SEQ ID NO: 21174

SEQ ID NO: 60370 - DNA, 2160 bp, Helicobacter pylori; identical to SEQ ID NO: 21175
  CDS (573)..(2018)

SEQ ID NO: 60371 - protein, 481 aa, Helicobacter pylori; identical to SEQ ID NO: 21176

SEQ ID NO: 60372 - DNA, 1203 bp, Aedes aegypti; identical to SEQ ID NO: 21177
  CDS (1)..(1203)

SEQ ID NO: 60373 - protein, 400 aa, Aedes aegypti; identical to SEQ ID NO: 21178

SEQ ID NO: 60374 - DNA, 1518 bp, Skeletonema costatum; identical to SEQ ID NO: 21179
  misc_feature (1360)..(1360): n is a, c, g, or t
  CDS (40)..(1272)

SEQ ID NO: 60375 - protein, 410 aa, Skeletonema costatum; identical to SEQ ID NO: 21180

SEQ ID NO: 60376 - DNA, 2193 bp, Drosophila melanogaster; identical to SEQ ID NO: 21181
  CDS (184)..(1383)

SEQ ID NO: 60377 - protein, 399 aa, Drosophila melanogaster; identical to SEQ ID NO: 21182

SEQ ID NO: 60378 - DNA, 1410 bp, Rhodospirillum rubrum; identical to SEQ ID NO: 21183
  CDS (1)..(1410)

SEQ ID NO: 60379 - protein, 469 aa, Rhodospirillum rubrum; identical to SEQ ID NO: 21184

SEQ ID NO: 60380 - DNA, 1889 bp, Xenopus laevis; identical to SEQ ID NO: 21185
  CDS (23)..(1117)

SEQ ID NO: 60381 - protein, 364 aa, Xenopus laevis; identical to SEQ ID NO: 21186

SEQ ID NO: 60382 - DNA, 1523 bp, Nicotiana attenuata; identical to SEQ ID NO: 21187
  CDS (51)..(1349)

SEQ ID NO: 60383 - protein, 432 aa, Nicotiana attenuata; identical to SEQ ID NO: 21188

SEQ ID NO: 60384 - DNA, 1410 bp, Erwinia carotovora; identical to SEQ ID NO: 21189
  CDS (1)..(1410)

SEQ ID NO: 60385 - protein, 469 aa, Erwinia carotovora; identical to SEQ ID NO: 21190

SEQ ID NO: 60386 - DNA, 1122 bp, Xenopus laevis; identical to SEQ ID NO: 21191
  CDS (1)..(1122)

SEQ ID NO: 60387 - protein, 373 aa, Xenopus laevis; identical to SEQ ID NO: 21192

SEQ ID NO: 60388 - DNA, 1359 bp, Elaeagnus umbellata; identical to SEQ ID NO: 21193
  CDS (36)..(1103)

SEQ ID NO: 60389 - protein, 355 aa, Elaeagnus umbellata; identical to SEQ ID NO: 21194

SEQ ID NO: 60390 - DNA, 1410 bp, Photobacterium profundum; identical to SEQ ID NO: 21195
  CDS (1)..(1410)

SEQ ID NO: 60391 - protein, 469 aa, Photobacterium profundum; identical to SEQ ID NO: 21196

SEQ ID NO: 60392 - DNA, 1038 bp, Rhodopseudomonas palustris; identical to SEQ ID NO: 21197
  CDS (1)..(1038)

SEQ ID NO: 60393 - protein, 345 aa, Rhodopseudomonas palustris; identical to SEQ ID NO: 21198

SEQ ID NO: 60394 - DNA, 1410 bp, Rhodopseudomonas palustris; identical to SEQ ID NO: 21199
  CDS (1)..(1410)

SEQ ID NO: 60395 - protein, 469 aa, Rhodopseudomonas palustris; identical to SEQ ID NO: 21200

SEQ ID NO: 60396 - DNA, 1122 bp, Rattus norvegicus; identical to SEQ ID NO: 21201
  CDS (1)..(1122)

SEQ ID NO: 60397 - protein, 373 aa, Rattus norvegicus; identical to SEQ ID NO: 21202

SEQ ID NO: 60398 - DNA, 1278 bp, Triticum aestivum; identical to SEQ ID NO: 21203
  CDS (116)..(1204)

SEQ ID NO: 60399 - protein, 362 aa, Triticum aestivum; identical to SEQ ID NO: 21204

SEQ ID NO: 60400 - DNA, 1299 bp, Triticum aestivum; identical to SEQ ID NO: 21205
  CDS (82)..(1170)

SEQ ID NO: 60401 - protein, 362 aa, Triticum aestivum; identical to SEQ ID NO: 21206

SEQ ID NO: 60402 - DNA, 1341 bp, Triticum aestivum; identical to SEQ ID NO: 21207
  CDS (28)..(1092)

SEQ ID NO: 60403 - protein, 354 aa, Triticum aestivum; identical to SEQ ID NO: 21208

SEQ ID NO: 60404 - DNA, 1634 bp, Aiptasia pallida; identical to SEQ ID NO: 21209
  CDS (77)..(1186)

SEQ ID NO: 60405 - protein, 369 aa, Aiptasia pallida; identical to SEQ ID NO: 21210

SEQ ID NO: 60406 - DNA, 1445 bp, Datisca glomerata; identical to SEQ ID NO: 21211
  CDS (77)..(1147)

SEQ ID NO: 60407 - protein, 356 aa, Datisca glomerata; identical to SEQ ID NO: 21212

SEQ ID NO: 60408 - DNA, 1065 bp, Glomus mosseae; identical to SEQ ID NO: 21213
  CDS (1)..(1065)

SEQ ID NO: 60409 - protein, 354 aa, Glomus mosseae; identical to SEQ ID NO: 21214

SEQ ID NO: 60410 - DNA, 1341 bp, Thermus thermophilus; identical to SEQ ID NO: 21215
  CDS (1)..(1341)

SEQ ID NO: 60411 - protein, 446 aa, Thermus thermophilus; identical to SEQ ID NO: 21216

SEQ ID NO: 60412 - DNA, 1413 bp, Geobacter sulfurreducens; identical to SEQ ID NO: 21217
  CDS (1)..(1413)

SEQ ID NO: 60413 - protein, 470 aa, Geobacter sulfurreducens; identical to SEQ ID NO: 21218

SEQ ID NO: 60414 - DNA, 1290 bp, Phragmites australis; identical to SEQ ID NO: 21219
  CDS (1)..(1290)

SEQ ID NO: 60415 - protein, 429 aa, Phragmites australis; identical to SEQ ID NO: 21220

SEQ ID NO: 60416 - DNA, 1290 bp, Phragmites australis; identical to SEQ ID NO: 21221
  CDS (1)..(1290)

SEQ ID NO: 60417 - protein, 429 aa, Phragmites australis; identical to SEQ ID NO: 21222

SEQ ID NO: 60418 - DNA, 1409 bp, Camellia sinensis; identical to SEQ ID NO: 21223
  CDS (126)..(1196)

SEQ ID NO: 60419 - protein, 356 aa, Camellia sinensis; identical to SEQ ID NO: 21224

SEQ ID NO: 60420 - DNA, 1525 bp, Xenopus laevis; identical to SEQ ID NO: 21225
  CDS (30)..(1145)

SEQ ID NO: 60421 - protein, 371 aa, Xenopus laevis; identical to SEQ ID NO: 21226

SEQ ID NO: 60422 - DNA, 1050 bp, Neurospora crassa; identical to SEQ ID NO: 21227
  CDS (1)..(1050)

SEQ ID NO: 60423 - protein, 349 aa, Neurospora crassa; identical to SEQ ID NO: 21228

SEQ ID NO: 60424 - DNA, 1101 bp, Rhodopirellula baltica; identical to SEQ ID NO: 21229
  CDS (1)..(1101)

SEQ ID NO: 60425 - protein, 366 aa, Rhodopirellula baltica; identical to SEQ ID NO: 21230

SEQ ID NO: 60426 - DNA, 1440 bp, Helicobacter hepaticus; identical to SEQ ID NO: 21231
  CDS (1)..(1440)

SEQ ID NO: 60427 - protein, 479 aa, Helicobacter hepaticus; identical to SEQ ID NO: 21232

SEQ ID NO: 60428 - DNA, 1811 bp, Brachydanio rerio; identical to SEQ ID NO: 21233
  CDS (122)..(1240)

SEQ ID NO: 60429 - protein, 372 aa, Brachydanio rerio; identical to SEQ ID NO: 21234

SEQ ID NO: 60430 - DNA, 1029 bp, Streptomyces avermitilis; identical to SEQ ID NO: 21235
  CDS (1)..(1029)

SEQ ID NO: 60431 - protein, 342 aa, Streptomyces avermitilis; identical to SEQ ID NO: 21236

SEQ ID NO: 60432 - DNA, 1080 bp, Coxiella burnetii; identical to SEQ ID NO: 21237
  CDS (1)..(1080)

SEQ ID NO: 60433 - protein, 359 aa, Coxiella burnetii; identical to SEQ ID NO: 21238

SEQ ID NO: 60434 - DNA, 1659 bp, Pantoea agglomerans; identical to SEQ ID NO: 21239
  CDS (223)..(1632)

SEQ ID NO: 60435 - protein, 469 aa, Pantoea agglomerans; identical to SEQ ID NO: 21240

SEQ ID NO: 60436 - DNA, 1401 bp, Securigera parviflora; identical to SEQ ID NO: 21241
  CDS (99)..(1169)

SEQ ID NO: 60437 - protein, 356 aa, Securigera parviflora; identical to SEQ ID NO: 21242

SEQ ID NO: 60438 - DNA, 1508 bp, Securigera parviflora; identical to SEQ ID NO: 21243
  CDS (105)..(1175)

SEQ ID NO: 60439 - protein, 356 aa, Securigera parviflora; identical to SEQ ID NO: 21244

SEQ ID NO: 60440 - DNA, 1313 bp, Arabidopsis thaliana; identical to SEQ ID NO: 21245
  CDS (53)..(1117)

SEQ ID NO: 60441 - protein, 354 aa, Arabidopsis thaliana; identical to SEQ ID NO: 21246

SEQ ID NO: 60442 - DNA, 1263 bp, Opsanus beta; identical to SEQ ID NO: 21247
  CDS (33)..(1154)

SEQ ID NO: 60443 - protein, 373 aa, Opsanus beta; identical to SEQ ID NO: 21248

SEQ ID NO: 60444 - DNA, 1434 bp, Yersinia pestis; identical to SEQ ID NO: 21249
  CDS (1)..(1434)

SEQ ID NO: 60445 - protein, 477 aa, Yersinia pestis; identical to SEQ ID NO: 21250

SEQ ID NO: 60446 - DNA, 1338 bp, Bifidobacterium longum; identical to SEQ ID NO: 21251
  CDS (1)..(1338)

SEQ ID NO: 60447 - protein, 445 aa, Bifidobacterium longum; identical to SEQ ID NO: 21252

SEQ ID NO: 60448 - DNA, 2681 bp, Acetobacter diazotrophicus; identical to SEQ ID NO: 21253
  CDS (832)..(2292)

SEQ ID NO: 60449 - protein, 486 aa, Acetobacter diazotrophicus; identical to SEQ ID NO: 21254

SEQ ID NO: 60450 - DNA, 1640 bp, Crataegus crus; identical to SEQ ID NO: 21255
  CDS (85)..(1383)

SEQ ID NO: 60451 - protein, 432 aa, Crataegus crus; identical to SEQ ID NO: 21256

SEQ ID NO: 60452 - DNA, 1340 bp, Phytophthora infestans; identical to SEQ ID NO: 21257
  CDS (56)..(1129)

SEQ ID NO: 60453 - protein, 357 aa, Phytophthora infestans; identical to SEQ ID NO: 21258

SEQ ID NO: 60454 - DNA, 1369 bp, Canis familiaris; identical to SEQ ID NO: 21259
  CDS (248)..(1369)

SEQ ID NO: 60455 - protein, 373 aa, Canis familiaris; identical to SEQ ID NO: 21260

SEQ ID NO: 60456 - DNA, 1905 bp, Homo sapiens; identical to SEQ ID NO: 21261
  CDS (644)..(1765)

SEQ ID NO: 60457 - protein, 373 aa, Homo sapiens [sequence omitted]

SEQ ID NO: 60458 - DNA, 1520 bp, Oncorhynchus mykiss; identical to SEQ ID NO: 21263
  CDS (7)..(1122)

SEQ ID NO: 60459 - protein, 371 aa, Oncorhynchus mykiss; identical to SEQ ID NO: 21264

SEQ ID NO: 60460 - DNA, 1840 bp, Oncorhynchus mykiss; identical to SEQ ID NO: 21265
  CDS (76)..(1191)

SEQ ID NO: 60461 - protein, 371 aa, Oncorhynchus mykiss; identical to SEQ ID NO: 21266

SEQ ID NO: 60462 - DNA, 1681 bp, Oncorhynchus mykiss; identical to SEQ ID NO: 21267
  CDS (160)..(1281)

SEQ ID NO: 60463 - protein, 373 aa, Oncorhynchus mykiss; identical to SEQ ID NO: 21268

SEQ ID NO: 60464 - DNA, 1926 bp, Oreochromis niloticus; identical to SEQ ID NO: 21269
  CDS (94)..(1209)

SEQ ID NO: 60465 - protein, 371 aa, Oreochromis niloticus; identical to SEQ ID NO: 21270

SEQ ID NO: 60466 - DNA, 1429 bp, Arabidopsis thaliana; identical to SEQ ID NO: 21271
  CDS (91)..(1161)

SEQ ID NO: 60467 - protein, 356 aa, Arabidopsis thaliana; identical to SEQ ID NO: 21272

SEQ ID NO: 60468 - DNA, 1356 bp, Oryza sativa; identical to SEQ ID NO: 21273
  CDS (1)..(1356)

SEQ ID NO: 60469 - protein, 451 aa, Oryza sativa; identical to SEQ ID NO: 21274

SEQ ID NO: 60470 - DNA, 1544 bp, Bostrychus sinensis; identical to SEQ ID NO: 21275
  CDS (90)..(1205)

SEQ ID NO: 60471 - protein, 371 aa, Bostrychus sinensis; identical to SEQ ID NO: 21276

SEQ ID NO: 60472 - DNA, 1696 bp, Lotus japonicus; identical to SEQ ID NO: 21277
  misc_feature (934)..(934): n is a, c, g, or t
  misc_feature (997)..(997): n is a, c, g, or t
  CDS (147)..(1439)

SEQ ID NO: 60473 - protein, 430 aa, Lotus japonicus; identical to SEQ ID NO: 21278
  misc_feature (263)..(263): Xaa can be any naturally occuring amino acid
  misc_feature (284)..(284): Xaa can be any naturally occuring amino acid

SEQ ID NO: 60474 - DNA, 1233 bp, Gelidium crinale; identical to SEQ ID NO: 21279
  misc_feature (1232)..(1232): n is a, c, g, or t
  CDS (66)..(1121)

SEQ ID NO: 60475 - protein, 351 aa, Gelidium crinale; identical to SEQ ID NO: 21280

SEQ ID NO: 60476 - DNA, 1338 bp, Vitis vinifera; identical to SEQ ID NO: 21281
  CDS (27)..(1097)

SEQ ID NO: 60477 - protein, 356 aa, Vitis vinifera; identical to SEQ ID NO: 21282

SEQ ID NO: 60478 - DNA, 1557 bp, Populus alba x Populus tremula; identical to SEQ ID NO: 21283
  CDS (114)..(1184)

SEQ ID NO: 60479 - protein, 356 aa, Populus alba x Populus tremula; identical to SEQ ID NO: 21284

SEQ ID NO: 60480 - DNA, 1541 bp, Glycine max; identical to SEQ ID NO: 21285
  CDS (30)..(1328)

SEQ ID NO: 60481 - protein, 432 aa, Glycine max; identical to SEQ ID NO: 21286

SEQ ID NO: 60482 - DNA, 1410 bp, Rhizobium loti; identical to SEQ ID NO: 21287
  CDS (1)..(1410)

SEQ ID NO: 60483 - protein, 469 aa, Rhizobium loti; identical to SEQ ID NO: 21288

SEQ ID NO: 60484 - DNA, 1041 bp, Rhizobium loti; identical to SEQ ID NO: 21289
  CDS (1)..(1041)

SEQ ID NO: 60485 - protein, 346 aa, Rhizobium loti; identical to SEQ ID NO: 21290

SEQ ID NO: 60486 - DNA, 1494 bp, Oryza sativa; identical to SEQ ID NO: 21291
  CDS (122)..(1234)

SEQ ID NO: 60487 - protein, 370 aa, Oryza sativa; identical to SEQ ID NO: 21292

SEQ ID NO: 60488 - DNA, 1296 bp, Beta vulgaris subsp; identical to SEQ ID NO: 21293
  CDS (1)..(1296)

SEQ ID NO: 60489 - protein, 431 aa, Beta vulgaris subsp; identical to SEQ ID NO: 21294

SEQ ID NO: 60490 - DNA, 1071 bp, Beta vulgaris subsp; identical to SEQ ID NO: 21295
  CDS (1)..(1071)

SEQ ID NO: 60491 - protein, 356 aa, Beta vulgaris subsp; identical to SEQ ID NO: 21296

SEQ ID NO: 60492 - DNA, 1374 bp, Avicennia marina; identical to SEQ ID NO: 21297
  CDS (65)..(1135)

SEQ ID NO: 60493 - protein, 356 aa, Avicennia marina; identical to SEQ ID NO: 21298

SEQ ID NO: 60494 - DNA, 1122 bp, Cricetulus griseus; identical to SEQ ID NO: 21299
  CDS (1)..(1122)

SEQ ID NO: 60495 - protein, 373 aa, Cricetulus griseus; identical to SEQ ID NO: 21300

SEQ ID NO: 60496 - DNA, 1410 bp, Shewanella violacea; identical to SEQ ID NO: 21301
  CDS (1)..(1410)

SEQ ID NO: 60497 - protein, 469 aa, Shewanella violacea; identical to SEQ ID NO: 21302

SEQ ID NO: 60498 - DNA, 1387 bp, Arabidopsis thaliana; identical to SEQ ID NO: 21303
  CDS (79)..(1149)

SEQ ID NO: 60499 - protein, 356 aa, Arabidopsis thaliana; identical to SEQ ID NO: 21304

SEQ ID NO: 60500 - DNA, 1269 bp, Arabidopsis thaliana; identical to SEQ ID NO: 21305
  CDS (44)..(1114)

SEQ ID NO: 60501 - protein, 356 aa, Arabidopsis thaliana; identical to SEQ ID NO: 21306

SEQ ID NO: 60502 - DNA, 1403 bp, Glycine max; identical to SEQ ID NO: 21307
  CDS (60)..(1130)

SEQ ID NO: 60503 - protein, 356 aa, Glycine max; identical to SEQ ID NO: 21308

SEQ ID NO: 60504 - DNA, 1044 bp, Arabidopsis thaliana; identical to SEQ ID NO: 21309
  CDS (1)..(1044)

SEQ ID NO: 60505 - protein, 347 aa, Arabidopsis thaliana; identical to SEQ ID NO: 21310

SEQ ID NO: 60506 - DNA, 1122 bp, Acomys cahirinus; identical to SEQ ID NO: 21311
  CDS (1)..(1122)

SEQ ID NO: 60507 - protein, 373 aa, Acomys cahirinus; identical to SEQ ID NO: 21312

SEQ ID NO: 60508 - DNA, 1577 bp, Canavalia lineata; identical to SEQ ID NO: 21313
  CDS (91)..(1383)

SEQ ID NO: 60509 - protein, 430 aa, Canavalia lineata; identical to SEQ ID NO: 21314

SEQ ID NO: 60510 - DNA, 1666 bp, Juglans nigra; identical to SEQ ID NO: 21315
  CDS (96)..(1394)

SEQ ID NO: 60511 - protein, 432 aa, Juglans nigra; identical to SEQ ID NO: 21316

SEQ ID NO: 60512 - DNA, 1590 bp, Nicotiana sylvestris; identical to SEQ ID NO: 21317
  CDS (67)..(1365)

SEQ ID NO: 60513 - protein, 432 aa, Nicotiana sylvestris; identical to SEQ ID NO: 21318

SEQ ID NO: 60514 - DNA, 1345 bp, Canavalia lineata; identical to SEQ ID NO: 21319
  CDS (83)..(1150)

SEQ ID NO: 60515 - protein, 355 aa, Canavalia lineata; identical to SEQ ID NO: 21320

SEQ ID NO: 60516 - DNA, 1668 bp, Opsanus beta; identical to SEQ ID NO: 21321
  CDS (1)..(1185)

SEQ ID NO: 60517 - protein, 394 aa, Opsanus beta; identical to SEQ ID NO: 21322

SEQ ID NO: 60518 - DNA, 1032 bp, Streptomyces coelicolor; identical to SEQ ID NO: 21323
  CDS (1)..(1032)

SEQ ID NO: 60519 - protein, 343 aa, Streptomyces coelicolor; identical to SEQ ID NO: 21324

SEQ ID NO: 60520 - DNA, 1579 bp, Mesembryanthemum crystallinum; identical to SEQ ID NO: 21325
  misc_feature (1405)..(1405): n is a, c, g, or t
  CDS (88)..(1389)

SEQ ID NO: 60521 - protein, 433 aa, Mesembryanthemum crystallinum; identical to SEQ ID NO: 21326

SEQ ID NO: 60522 - DNA, 1410 bp, Enterobacter gergoviae; identical to SEQ ID NO: 21327
  CDS (1)..(1410)

SEQ ID NO: 60523 - protein, 469 aa, Enterobacter gergoviae; identical to SEQ ID NO: 21328

SEQ ID NO: 60524 - DNA, 1451 bp, Pinus sylvestris; identical to SEQ ID NO: 21329
  CDS (78)..(1145)

SEQ ID NO: 60525 - protein, 355 aa, Pinus sylvestris; identical to SEQ ID NO: 21330

SEQ ID NO: 60526 - DNA, 1346 bp, Alnus glutinosa; identical to SEQ ID NO: 21331
  CDS (50)..(1120)

SEQ ID NO: 60527 - protein, 356 aa, Alnus glutinosa; identical to SEQ ID NO: 21332

SEQ ID NO: 60528 - DNA, 1821 bp, Drosophila melanogaster; identical to SEQ ID NO: 21333
  CDS (148)..(1257)

SEQ ID NO: 60529 - protein, 369 aa, Drosophila melanogaster; identical to SEQ ID NO: 21334

SEQ ID NO: 60530 - DNA, 1595 bp, Medicago sativa; identical to SEQ ID NO: 21335
  CDS (88)..(1374)

SEQ ID NO: 60531 - protein, 428 aa, Medicago sativa; identical to SEQ ID NO: 21336

SEQ ID NO: 60532 - DNA, 1071 bp, Glycine max; identical to SEQ ID NO: 21337
  CDS (1)..(1071)

SEQ ID NO: 60533 - protein, 356 aa, Glycine max; identical to SEQ ID NO: 21338

SEQ ID NO: 60534 - DNA, 1372 bp, Medicago sativa; identical to SEQ ID NO: 21339
  CDS (92)..(1162)

SEQ ID NO: 60535 - protein, 356 aa, Medicago sativa; identical to SEQ ID NO: 21340

SEQ ID NO: 60536 - DNA, 1065 bp, Agaricus bisporus; identical to SEQ ID NO: 21341
  CDS (1)..(1065)

SEQ ID NO: 60537 - protein, 354 aa, Agaricus bisporus; identical to SEQ ID NO: 21342

SEQ ID NO: 60538 - DNA, 1245 bp, Amanita muscaria; identical to SEQ ID NO: 21343
  CDS (96)..(1160)

SEQ ID NO: 60539 - protein, 354 aa, Amanita muscaria; identical to SEQ ID NO: 21344

SEQ ID NO: 60540 - DNA, 1110 bp, Ashbya gossypii; identical to SEQ ID NO: 21345
  CDS (1)..(1110)

SEQ ID NO: 60541 - protein, 369 aa, Ashbya gossypii; identical to SEQ ID NO: 21346

SEQ ID NO: 60542 - DNA, 1119 bp, Candida glabrata; identical to SEQ ID NO: 21347
  CDS (1)..(1119)

SEQ ID NO: 60543 - protein, 372 aa, Candida glabrata; identical to SEQ ID NO: 21348

SEQ ID NO: 60544 - DNA, 1083 bp, Colletotrichum gloeosporioides; identical to SEQ ID NO: 21349
  CDS (1)..(1083)

SEQ ID NO: 60545 - protein, 360 aa, Colletotrichum gloeosporioides; identical to SEQ ID NO: 21350

SEQ ID NO: 60546 - DNA, 1077 bp, Cryptococcus neoformans; identical to SEQ ID NO: 21351
  CDS (1)..(1077)

SEQ ID NO: 60547 - protein, 358 aa, Cryptococcus neoformans; identical to SEQ ID NO: 21352

SEQ ID NO: 60548 - DNA, 1113 bp, Debaryomyces hansenii; identical to SEQ ID NO: 21353
  CDS (1)..(1113)

SEQ ID NO: 60549 - protein, 370 aa, Debaryomyces hansenii; identical to SEQ ID NO: 21354

SEQ ID NO: 60550 - DNA, 1038 bp, Emericella nidulans; identical to SEQ ID NO: 21355
  CDS (1)..(1038)

SEQ ID NO: 60551 - protein, 345 aa, Emericella nidulans; identical to SEQ ID NO: 21356

SEQ ID NO: 60552 - DNA, 1335 bp, Fusarium solani; identical to SEQ ID NO: 21357
  CDS (91)..(1161)

SEQ ID NO: 60553 - protein, 356 aa, Fusarium solani; identical to SEQ ID NO: 21358

SEQ ID NO: 60554 - DNA, 1062 bp, Gibberella fujikuroi; identical to SEQ ID NO: 21359
  CDS (1)..(1062)

SEQ ID NO: 60555 - protein, 353 aa, Gibberella fujikuroi; identical to SEQ ID NO: 21360

SEQ ID NO: 60556 - DNA, 1119 bp, Kluyveromyces lactis; identical to SEQ ID NO: 21361
  CDS (1)..(1119)

SEQ ID NO: 60557 - protein, 372 aa, Kluyveromyces lactis; identical to SEQ ID NO: 21362

SEQ ID NO: 60558 - DNA, 1429 bp, Lactuca sativa; identical to SEQ ID NO: 21363
  CDS (16)..(1092)

SEQ ID NO: 60559 - protein, 358 aa, Lactuca sativa; identical to SEQ ID NO: 21364

SEQ ID NO: 60560 - DNA, 1062 bp, Lupinus luteus; identical to SEQ ID NO: 21365
  CDS (1)..(1062)

SEQ ID NO: 60561 - protein, 353 aa, Lupinus luteus; identical to SEQ ID NO: 21366

SEQ ID NO: 60562 - DNA, 1813 bp, Neisseria gonorrhoeae; identical to SEQ ID NO: 21367
  CDS (123)..(1541)

SEQ ID NO: 60563 - protein, 472 aa, Neisseria gonorrhoeae; identical to SEQ ID NO: 21368

SEQ ID NO: 60564 - DNA, 1089 bp, Neurospora crassa; identical to SEQ ID NO: 21369
  CDS (1)..(1089)

SEQ ID NO: 60565 - protein, 362 aa, Neurospora crassa; identical to SEQ ID NO: 21370

SEQ ID NO: 60566 - DNA, 1065 bp, Suillus bovinus; identical to SEQ ID NO: 21371
  CDS (1)..(1065)

SEQ ID NO: 60567 - protein, 354 aa, Suillus bovinus; identical to SEQ ID NO: 21372

SEQ ID NO: 60568 - DNA, 1300 bp, Tuber borchii; identical to SEQ ID NO: 21373
  CDS (45)..(1121)

SEQ ID NO: 60569 - protein, 358 aa, Tuber borchii; identical to SEQ ID NO: 21374

SEQ ID NO: 60570 - DNA, 1407 bp, Vigna aconitifolia; identical to SEQ ID NO: 21375
  CDS (78)..(1148)

SEQ ID NO: 60571 - protein, 356 aa, Vigna aconitifolia; identical to SEQ ID NO: 21376

SEQ ID NO: 60572 - DNA, 1095 bp, Yarrowia lipolytica; identical to SEQ ID NO: 21377
  CDS (1)..(1095)

SEQ ID NO: 60573 - protein, 364 aa, Yarrowia lipolytica; identical to SEQ ID NO: 21378

SEQ ID NO: 60574 - DNA, 24 bp, Artificial sequence
  Primer sequence
atggctgaagcaagcatcgaaaag

SEQ ID NO: 60575 - DNA, 27 bp, Artificial sequence
  Primer sequence
ttatgaagattctctttcaaattcctt

SEQ ID NO: 60576 - protein, 448 aa, Artificial sequence; identical to SEQ ID NO: 21381
  Consensus
  Variant (2)..(2): Xaa in position 2 is any amino acid
  Variant (4)..(12): Xaa in position 4 to 12 is any amino acid
  Variant (13)..(13): Xaa in position 13 is any or no amino acid
  Variant (18)..(18): Xaa in position 18 is any amino acid
  Variant (20)..(20): Xaa in position 20 is any amino acid
  Variant (22)..(22): Xaa in position 22 is any amino acid
  Variant (23)..(33): Xaa in position 23 to 33 is any or no amino acid
  Variant (35)..(35): Xaa in position 35 is any or no amino acid
  Variant (37)..(37): Xaa in position 37 is any or no amino acid
  Variant (39)..(39): Xaa in position 39 is any amino acid
  Variant (41)..(45): Xaa in position 41 to 45 is any amino acid
  Variant (46)..(51): Xaa in position 46 to 51 is any or no amino acid
  Variant (53)..(53): Xaa in position 53 is any amino acid
  Variant (54)..(54): Xaa in position 54 is any or no amino acid
  Variant (56)..(56): Xaa in position 56 is any amino acid
  Variant (63)..(63): Xaa in position 63 is any amino acid
  Variant (64)..(64): Xaa in position 64 is any or no amino acid
  Variant (67)..(67): Xaa in position 67 is any amino acid
  Variant (69)..(69): Xaa in position 69 is any amino acid
  Variant (70)..(70): Xaa in position 70 is any or no amino acid
  Variant (74)..(74): Xaa in position 74 is any or no amino acid
  Variant (76)..(76): Xaa in position 76 is any or no amino acid
  Variant (78)..(79): Xaa in position 78 to 79 is any amino acid
  Variant (80)..(88): Xaa in position 80 to 88 is any or no amino acid
  Variant (90)..(90): Xaa in position 90 is any amino acid
  Variant (95)..(98): Xaa in position 95 to 98 is any amino acid
  Variant (99)..(103): Xaa in position 99 to 103 is any or no amino acid
  Variant (109)..(114): Xaa in position 109 to 114 is any amino acid
  Variant (115)..(125): Xaa in position 115 to 125 is any or no amino acid
  Variant (127)..(129): Xaa in position 127 to 129 is any amino acid
  Variant (131)..(131): Xaa in position 131 is any amino acid
  Variant (133)..(141): Xaa in position 133 to 141 is any amino acid
  Variant (142)..(149): Xaa in position 142 to 149 is any or no amino acid
  Variant (152)..(153): Xaa in position 152 to 153 is any or no amino acid
  Variant (155)..(155): Xaa in position 155 is any amino acid
  Variant (162)..(165): Xaa in position 162 to 165 is any amino acid
  Variant (166)..(174): Xaa in position 166 to 174 is any or no amino acid
  Variant (176)..(176): Xaa in position 176 is any or no amino acid
  Variant (180)..(180): Xaa in position 180 is any amino acid
  Variant (181)..(183): Xaa in position 181 to 183 is any or no amino acid
  Variant (194)..(194): Xaa in position 194 is any amino acid
  Variant (196)..(196): Xaa in position 196 is any amino acid
  Variant (198)..(201): Xaa in position 198 to 201 is any amino acid
  Variant (202)..(222): Xaa in position 202 to 222 is any or no amino acid
  Variant (227)..(227): Xaa in position 227 is any amino acid
  Variant (231)..(233): Xaa in position 231 to 233 is any amino acid
  Variant (236)..(236): Xaa in position 236 is any amino acid
  Variant (240)..(240): Xaa in position 240 is any amino acid
  Variant (242)..(242): Xaa in position 242 is any amino acid
  Variant (244)..(244): Xaa in position 244 is any amino acid
  Variant (249)..(249): Xaa in position 249 is any amino acid
  Variant (252)..(252): Xaa in position 252 is any or no amino acid
  Variant (260)..(261): Xaa in position 260 to 261 is any amino acid
  Variant (262)..(269): Xaa in position 262 to 269 is any or no amino acid
  Variant (272)..(273): Xaa in position 272 to 273 is any amino acid
  Variant (276)..(276): Xaa in position 276 is any amino acid
  Variant (279)..(279): Xaa in position 279 is any amino acid
  Variant (285)..(285): Xaa in position 285 is any amino acid
  Variant (288)..(288): Xaa in position 288 is any amino acid
  Variant (290)..(291): Xaa in position 290 to 291 is any amino acid
  Variant (294)..(295): Xaa in position 294 to 295 is any amino acid
  Variant (297)..(298): Xaa in position 297 to 298 is any amino acid
  Variant (303)..(303): Xaa in position 303 is any amino acid
  Variant (304)..(304): Xaa in position 304 is any or no amino acid
  Variant (306)..(306): Xaa in position 306 is any amino acid
  Variant (311)..(314): Xaa in position 311 to 314 is any or no amino acid
  Variant (316)..(316): Xaa in position 316 is any amino acid
  Variant (318)..(318): Xaa in position 318 is any amino acid
  Variant (320)..(320): Xaa in position 320 is any amino acid
  Variant (321)..(322): Xaa in position 321 to 322 is any or no amino acid
  Variant (325)..(326): Xaa in position 325 to 326 is any amino acid
  Variant (329)..(331): Xaa in position 329 to 331 is any amino acid
  Variant (332)..(333): Xaa in position 332 to 333 is any or no amino acid
  Variant (335)..(336): Xaa in position 335 to 336 is any amino acid
  Variant (337)..(337): Xaa in position 337 is any or no amino acid
  Variant (339)..(341): Xaa in position 339 to 341 is any amino acid
  Variant (343)..(346): Xaa in position 343 to 346 is any amino acid
  Variant (347)..(347): Xaa in position 347 is any or no amino acid
  Variant (350)..(351): Xaa in position 350 to 351 is any amino acid
  Variant (354)..(354): Xaa in position 354 is any amino acid
  Variant (355)..(355): Xaa in position 355 is any or no amino acid
  Variant (357)..(360): Xaa in position 357 to 360 is any amino acid
  Variant (361)..(383): Xaa in position 361 to 383 is any or no amino acid
  Variant (389)..(389): Xaa in position 389 is any amino acid
  Variant (393)..(394): Xaa in position 393 to 394 is any amino acid
  Variant (396)..(397): Xaa in position 396 to 397 is any amino acid
  Variant (399)..(400): Xaa in position 399 to 400 is any amino acid
  Variant (412)..(417): Xaa in position 412 to 417 is any amino acid
  Variant (418)..(421): Xaa in position 418 to 421 is any or no amino acid
  Variant (424)..(424): Xaa in position 424 is any amino acid
  Variant (430)..(430): Xaa in position 430 is any amino acid
  Variant (431)..(431): Xaa in position 431 is any or no amino acid
  Variant (434)..(434): Xaa in position 434 is any amino acid
  Variant (438)..(438): Xaa in position 438 is any amino acid
  Variant (440)..(442): Xaa in position 440 to 442 is any amino acid
  Variant (444)..(445): Xaa in position 444 to 445 is any amino acid
  Variant (447)..(447): Xaa in position 447 is any amino acid

SEQ ID NO: 60577 - protein, 17 aa, Artificial sequence
  Consensus
  Variant (2)..(2): Xaa in position 2 is Asp, Gly, Asn, Gln or Ser
  Variant (3)..(3): Xaa in position 3 is Phe or Tyr
  Variant (9)..(9): Xaa in position 9 is any amino acid
  Variant (11)..(12): Xaa in position 11 to 12 is any amino acid
  Variant (13)..(13): Xaa in position 13 is any or no amino acid
  Variant (15)..(16): Xaa in position 15 to 16 is any or no amino acid
WXXDGSSTXQXXXGXXS

SEQ ID NO: 60578 - protein, 51 aa, Artificial sequence; identical to SEQ ID NO: 21383
  Consensus
  Variant (2)..(6): Xaa in position 2 to 6 is any amino acid
  Variant (8)..(23): Xaa in position 8 to 23 is any amino acid
  Variant (24)..(26): Xaa in position 24 to 26 is any or no amino acid
  Variant (28)..(28): Xaa in position 28 is any amino acid
  Variant (30)..(30): Xaa in position 30 is Asn, Pro, Gln or Thr
  Variant (32)..(32): Xaa in position 32 is Phe or Tyr
  Variant (33)..(33): Xaa in position 33 is any amino acid
  Variant (34)..(34): Xaa in position 34 is Phe, Ile, Leu, Met or Val
  Variant (35)..(35): Xaa in position 35 is Phe, Ile, Leu or Met
  Variant (36)..(50): Xaa in position 36 to 50 is any amino acid
  Variant (51)..(51): Xaa in position 51 is Ala, Gly, Ile, Leu or Pro

SEQ ID NO: 60579 - protein, 34 aa, Artificial sequence; identical to SEQ ID NO: 21384
  Consensus
  Variant (2)..(2): Xaa in position 2 is any amino acid
  Variant (3)..(3): Xaa in position 3 is Phe, Ile, Leu or Val
  Variant (4)..(4): Xaa in position 4 is any amino acid
  Variant (5)..(5): Xaa in position 5 is Asp, Glu or His
  Variant (6)..(11): Xaa in position 6 to 11 is any amino acid
  Variant (12)..(12): Xaa in position 12 is Ile, Leu, Met or Val
  Variant (13)..(13): Xaa in position 13 is any amino acid
  Variant (14)..(14): Xaa in position 14 is Ala or Ser
  Variant (15)..(15): Xaa in position 15 is Glu or Gly
  Variant (16)..(16): Xaa in position 16 is Phe, Ile, Leu or Val
  Variant (17)..(19): Xaa in position 17 to 19 is any amino acid
  Variant (21)..(21): Xaa in position 21 is any amino acid
  Variant (23)..(23): Xaa in position 23 is Ala, Gly or Pro
  Variant (26)..(27): Xaa in position 26 to 27 is any amino acid
  Variant (28)..(28): Xaa in position 28 is Ala, Gly or Ser
  Variant (32)..(32): Xaa in position 32 is Phe or Tyr
  Variant (34)..(34): Xaa in position 34 is Ile or Val

SEQ ID NO: 60580 - protein, 33 aa, Artificial sequence; identical to SEQ ID NO: 21385
  Consensus
  Variant (2)..(2): Xaa in position 2 is any amino acid
  Variant (3)..(3): Xaa in position 3 is Ala, Gly or Ser
  Variant (5)..(5): Xaa in position 5 is Phe, Trp or Tyr
  Variant (6)..(6): Xaa in position 6 is Phe, Ile or Leu
  Variant (7)..(7): Xaa in position 7 is Leu or Met
  Variant (8)..(8): Xaa in position 8 is any amino acid
  Variant (10)..(10): Xaa in position 10 is any amino acid
  Variant (11)..(11): Xaa in position 11 is Ala, Cys, Gly, Ser or Thr
  Variant (12)..(14): Xaa in position 12 to 14 is any amino acid
  Variant (15)..(15): Xaa in position 15 is Ala, Asp, Glu, Gly or Asn
  Variant (16)..(18): Xaa in position 16 to 18 is any amino acid
  Variant (19)..(19): Xaa in position 19 is Glu, Asn, Ser or Thr
  Variant (20)..(22): Xaa in position 20 to 22 is any amino acid
  Variant (25)..(25): Xaa in position 25 is any amino acid
  Variant (26)..(26): Xaa in position 26 is any or no amino acid
  Variant (28)..(28): Xaa in position 28 is any amino acid
  Variant (29)..(30): Xaa in position 29 to 30 is any or no amino acid

SEQ ID NO: 60581 - protein, 51 aa, Artificial sequence; identical to SEQ ID NO: 21386
  Consensus
  Variant (4)..(4): Xaa in position 4 is any or no amino acid
  Variant (6)..(6): Xaa in position 6 is any or no amino acid
  Variant (9)..(16): Xaa in position 9 to 16 is any amino acid
  Variant (18)..(18): Xaa in position 18 is Ala, Ile or Val
  Variant (19)..(19): Xaa in position 19 is Ala, Gly, Pro or Ser
  Variant (20)..(20): Xaa in position 20 is any amino acid
  Variant (22)..(22): Xaa in position 22 is Ala, Gly or Ser
  Variant (23)..(23): Xaa in position 23 is Ala, Cys, Gly, Ser or Thr
  Variant (25)..(25): Xaa in position 25 is any amino acid
  Variant (27)..(36): Xaa in position 27 to 36 is any amino acid
  Variant (37)..(37): Xaa in position 37 is any or no amino acid
  Variant (39)..(39): Xaa in position 39 is Trp or Tyr
  Variant (40)..(40): Xaa in position 40 is any amino acid
  Variant (45)..(45): Xaa in position 45 is Pro or Thr
  Variant (46)..(46): Xaa in position 46 is Ala, Gly, Asn, Ser or Thr
  Variant (47)..(47): Xaa in position 47 is Ala, Gly, Ser or Val
  Variant (48)..(48): Xaa in position 48 is Asn, Gln or Ser
  Variant (49)..(50): Xaa in position 49 to 50 is any amino acid
  Variant (51)..(51): Xaa in position 51 is Ala or Pro

SEQ ID NO: 60582 - DNA, 276 bp, Escherichia coli
  CDS (1)..(276)
atggtggtgggggaaggattactcagcgctgcgcgcttcgcccttcgggtcgttgcctgcggcaacgctctctcgctggcgctcaagtcgaaccttggtcgaagcttctcatccttccccgcttgggcagaatatttgattgcggattcgtttgagaattccggggcttttgaaagtgatggtggtgggggaaggattactcagcgctgcgcgcttcgcccttcgggtcgttgcctgcggcaacgctctctcgctgacgctcgagccgaaccttag

SEQ ID NO: 60583 - protein, 91 aa, Escherichia coli
MVVGEGLLSAARFALRVVACGNALSLALKSNLGRSFSSFPAWAEYLIADSFENSGAFESDGGGGRITQRCALRPSGRCLRQRSLADARAEP

SEQ ID NO: 60584 - DNA, 570 bp, Escherichia coli O157:H7 EDL933
  CDS (1)..(570): transl_table=11
gtgatggtggtgggggaaggattactcagcgctgcgcgcttcgcccttcaggtcgttgcctgcggcaacgctctctcgctggcgctcgagtcgaaccttagtcgaagcttctcatccttctccgcttgggcagaatatttatttacggattcgcttgagagttcagggacttttgaaagtgatggtggtgggggaaggattcgaaccttcgaagtcgatgacggcagatttacagtctgctccctttggccgctcgggaaccccaccaggggtaattcaaattttgaggtaatgcttgagatggcggtggggaaaggattattcgtcgcttcgctcctcacccttcgggccgttgcctgtgaaaacgttctctcgctttcgctcgagtcgaaccttagtcgaaggttctcacccttccccgatgagtgcaaactttcacaatctcaccgaagttaccacatcgctgtggtgaatcatggtggtgggggaaggattcgaaccttcgaagtcgatgacggcagatttacagtctgctccctttggccgctcgggaaccccaccacggggtaa

SEQ ID NO: 60585 - protein, 189 aa, Escherichia coli O157:H7 EDL933
MMVVGEGLLSAARFALQVVACGNALSLALESNLSRSFSSFSAWAEYLFTDSLESSGTFESDGGGGRIRTFEVDDGRFTVCSLWPLGNPTRGNSNFEVMLEMAVGKGLFVASLLTLRAVACENVLSLSLESNLSRRFSPFPDECKLSQSHRSYHIAVVNHGGGGRIRTFEVDDGRFTVCSLWPLGNPTTG

SEQ ID NO: 60586 - DNA, 276 bp, Escherichia coli O157:H7
  CDS (1)..(276): transl_table=11
atggtggtgggggaaggattactcagcgctgcgcgcttcgcccttcgggtcgttgcctgcggcaacgctctctcgctggcgctcaagtcgaaccttggtcgaagcttctcatccttccccgcttgggcagaatatttaattacggattcgtttgagagttcagggacttttgaaagtgatggtggtgggggaaggattactcagcgctgcgcgcttcgcccttcaggtcgttgcctgcggcaacgctctctcgctggcgctcgagtcgaaccttag

SEQ ID NO: 60587 - protein, 91 aa, Escherichia coli O157:H7
MVVGEGLLSAARFALRVVACGNALSLALKSNLGRSFSSFPAWAEYLITDSFESSGTFESDGGGGRITQRCALRPSGRCLRQRSLAGARVEP

SEQ ID NO: 60588 - DNA, 570 bp, Escherichia coli K12
  CDS (1)..(570): transl_table=11
gtgatggtggtgggggaaggattactcagcgctgcgcgcttcgcccttcgggtcgttgcctgcggcaacgctctctcgctggcgctcgagtcgaaccttggtcgaagcttctcatccttccccgcatgggcagaatatttaattgcggattcgttgggaagttcagggacttttgaaagtgatggtggtgggggaaggattcgaaccttcgaagtcgatgacggcagatttacagtctgctccctttggccgctcgggaaccccaccaggggtaattcaaattttgaggtaatgcttgagatggtggtgggggaaggattattcgtcgcttcgctcctcacccttcgggccgttgcctgtggcaacgttctctcgctttcgctcgaatcgaaccttagtcgaaggttctcacccttccccgatgagtgcaaactttcacaatctcaccgaagttaccacatcgctgtggtgaattatggtggtgggggaaggattcgaaccttcgaagtcgatgacggcagatttacagtctgctccctttggccgctcgggaaccccaccacggggtaa

SEQ ID NO: 60589 - protein, 189 aa, Escherichia coli K12
MMVVGEGLLSAARFALRVVACGNALSLALESNLGRSFSSFPAWAEYLIADSLGSSGTFESDGGGGRIRTFEVDDGRFTVCSLWPLGNPTRGNSNFEVMLEMVVGEGLFVASLLTLRAVACGNVLSLSLESNLSRRFSPFPDECKLSQSHRSYHIAVVNYGGGGRIRTFEVDDGRFTVCSLWPLGNPTTG

SEQ ID NO: 60590 - DNA, 22 bp, Artificial sequence
  Primer sequence
atggtggtgggggaaggattac

SEQ ID NO: 60591 - DNA, 23 bp, Artificial sequence
  Primer sequence
ttaaggttcggctcgagcgtcag

SEQ ID NO: 60592 - protein, 99 aa, Artificial sequence
  Consensus
  Variant (16)..(16): Xaa in position 16 is any amino acid
  Variant (29)..(29): Xaa in position 29 is any amino acid
  Variant (33)..(33): Xaa in position 33 is any amino acid
  Variant (40)..(40): Xaa in position 40 is any amino acid
  Variant (47)..(48): Xaa in position 47 to 48 is any amino acid
  Variant (51)..(53): Xaa in position 51 to 53 is any amino acid
  Variant (56)..(56): Xaa in position 56 is any amino acid
  Variant (67)..(69): Xaa in position 67 to 69 is any amino acid
  Variant (70)..(78): Xaa in position 70 to 78 is any or no amino acid
  Variant (80)..(80): Xaa in position 80 is any amino acid
  Variant (82)..(82): Xaa in position 82 is any amino acid
  Variant (84)..(84): Xaa in position 84 is any amino acid
  Variant (86)..(88): Xaa in position 86 to 88 is any amino acid
  Variant (90)..(91): Xaa in position 90 to 91 is any amino acid
  Variant (93)..(98): Xaa in position 93 to 98 is any amino acid
MVVGEGLLSAARFALXVVACGNALSLALXSNLXRSFSSFXAWAEYLXXDSXXXSGXFESDGGGGRIXXXXXXXXXXXXCXLXPXGXXXRXXSXXXXXXE

SEQ ID NO: 60593 - protein, 66 aa, Artificial sequence
  Consensus
  Variant (16)..(16): Xaa in position 16 is any amino acid
  Variant (29)..(29): Xaa in position 29 is any amino acid
  Variant (33)..(33): Xaa in position 33 is any amino acid
  Variant (40)..(40): Xaa in position 40 is any amino acid
  Variant (47)..(48): Xaa in position 47 to 48 is any amino acid
  Variant (51)..(53): Xaa in position 51 to 53 is any amino acid
  Variant (56)..(56): Xaa in position 56 is any amino acid
MVVGEGLLSAARFALXVVACGNALSLALXSNLXRSFSSFXAWAEYLXXDSXXXSGXFESDGGGGRI

SEQ ID NO: 60594 - DNA, 264 bp, Escherichia coli
  CDS (1)..(264)
atgcacactaactggcaagtttgcagcctggtcgtgcaggccaaaagcgaacgaatttcagacatcagcacccaactgaacgcctttcccggctgtgaagttgctgtcagcgacgcgccgagcggtcagttgattgtggtggtggaagcagaagacagcgaaacgctgatccaaaccattgagtcagtacgcaacgtagagggcgtgctggcggtgtcgctggtttatcaccagcaggaagagcaaggtgaggaaacaccatga

SEQ ID NO: 60595 - protein, 87 aa, Escherichia coli
MHTNWQVCSLVVQAKSERISDISTQLNAFPGCEVAVSDAPSGQLIVVVEAEDSETLIQTIESVRNVEGVLAVSLVYHQQEEQGEETP

SEQ ID NO: 60596 - DNA, 342 bp, Vibrio cholerae O1 biovar eltor str. N16961
  CDS (1)..(342): transl_table=11
gtggataaattggagagcaagatgtcacaaccctcagcttcactgcacgaagtacacatttccagcttggtggttcacaccttgccagagcatttgctcacagtgaaacagcaggtgagcgagctgcgtgatgtggaaatttacggcgaggatccgcaaggcaaactcgtcgttgtgattgaaaccgatcgtcaaggcttcatcaccgaaaccatagaacatattaataatcttcccaatgtgctcaacgcttttctggtgtttcatcagatagagacggtaacggaagaagaacaattacacactggaaataccttttctgaactcgagggtaatgtatga

SEQ ID NO: 60597 - protein, 113 aa, Vibrio cholerae O1 biovar eltor str. N16961
MDKLESKMSQPSASLHEVHISSLVVHTLPEHLLTVKQQVSELRDVEIYGEDPQGKLVVVIETDRQGFITETIEHINNLPNVLNAFLVFHQIETVTEEEQLHTGNTFSELEGNV

SEQ ID NO: 60598 - DNA, 276 bp, Pasteurella multocida subsp. multocida str. Pm70
  CDS (1)..(276): transl_table=11
atgactgaacaaatcacaatggaaaatgcgaaaaattggcatgtctgtgggcttgtgattcaagggaatccccaaaaattagaagcaattcagaccgcacttttagcaataccgtatacggaaattcctgcattggacgcggaaaccggtaagcttgttgtggtgatgcaatcgcacgatcaacatcttttacatcaacaaatggaagcgacacgcgatattgacggcgtcattgacgtgtccttggtttaccatcaacaagacgaaaacgaataa

SEQ ID NO: 60599 - protein, 91 aa, Pasteurella multocida subsp. multocida str. Pm70
MTEQITMENAKNWHVCGLVIQGNPQKLEAIQTALLAIPYTEIPALDAETGKLVVVMQSHDQHLLHQQMEATRDIDGVIDVSLVYHQQDENE

SEQ ID NO: 60600 - DNA, 330 bp, Pseudomonas aeruginosa PAO1
  CDS (1)..(330): transl_table=11
atgcctgaagccctgcagatcgccagcctcatcctgcattgccgacccgagcgactgccggcggtgaaggccaacctggcgctgctcgacggcctggagatctaccaggaaagcccgcagggcaagctgatcctggtgctggaagccgaacgcgaagaacagattctcgacaccctgggccagttgcagaacctgccaggagtgctcaacgccgtgctggtctaccacgagatcctgcacgacgacgatagcaacgacgcggcggccatgaccgaccgcgcgataccgtgctcgcccgaggagacaatcgatgaacctcacccgtcgtga

SEQ ID NO: 60601 - protein, 109 aa, Pseudomonas aeruginosa PAO1
MPEALQIASLILHCRPERLPAVKANLALLDGLEIYQESPQGKLILVLEAEREEQILDTLGQLQNLPGVLNAVLVYHEILHDDDSNDAAAMTDRAIPCSPEETIDEPHPS

SEQ ID NO: 60602 - DNA, 264 bp, Salmonella typhimurium LT2
  CDS (1)..(264): transl_table=11
atgcgcactaactggcaggtctgtagcctggtcgtgcaggccaaaagtcagaacatcgccgccattggcacacagttgaacacgttgccgggttgcgaagtcgcgttaagcgatgttgaaagcgggcaactgatcgtggtggcggaagcagatcagagtgaaacgctgatgcaaacaattgagtcagtacgcaatgtcgagggcgtactggcggtgtcgctggtttatcaccagcaggatgagcaaggtgaggaaacaccatga

SEQ ID NO: 60603 - protein, 87 aa, Salmonella typhimurium LT2
MRTNWQVCSLVVQAKSQNIAAIGTQLNTLPGCEVALSDVESGQLIVVAEADQSETLMQTIESVRNVEGVLAVSLVYHQQDEQGEETP

SEQ ID NO: 60604 - DNA, 273 bp, Yersinia pestis KIM
  CDS (1)..(273): transl_table=11
gtgaagatggacgataacgaatggcatgtttgtggattggtgctgcaagccaaaccggcacgttttgtgcagctgatggaccacctgctcgctatcccgggaacagaaatacccaccagtgaccctgctttgggcaagttggtggtggttatgcaggcagcgcgctcagacacgctcctgaatcatattgagtcagcacgtaatctggatggtgtgttggctgtatcgctggtttatcaccagcaggatttgcaaggtgaggaaatgccatga

SEQ ID NO: 60605 - protein, 90 aa, Yersinia pestis KIM
MKMDDNEWHVCGLVLQAKPARFVQLMDHLLAIPGTEIPTSDPALGKLVVVMQAARSDTLLNHIESARNLDGVLAVSLVYHQQDLQGEEMP

SEQ ID NO: 60606 - DNA, 285 bp, Shewanella oneidensis MR-1
  CDS (1)..(285): transl_table=11
atgagtcaggaataccatgttaccagcctcgtggtacatgccgcgcccaatgccttacaacaggtagaggccgatataaccgccttaaagggctgcgatatccacgccatttcccccgaaggtaaattggttattaccctcgaaggagatagccaaaaggccattctcgataatgttgaagccatcaatgccctgtccggcgtgttatccgccagtttgatttaccaccaagtcgagcccctagaacaagaactgttagaaaaaatgagtgaggaaacactatga

SEQ ID NO: 60607 - protein, 94 aa, Shewanella oneidensis MR-1
MSQEYHVTSLVVHAAPNALQQVEADITALKGCDIHAISPEGKLVITLEGDSQKAILDNVEAINALSGVLSASLIYHQVEPLEQELLEKMSEETL

SEQ ID NO: 60608 - DNA, 306 bp, Vibrio vulnificus CMCP6
  CDS (1)..(306): transl_table=11
atggcactaaatgaagtgcatatttcaagtttagtggtacacgtggcccctgagcacttaggcacgataaagacgcagatcgaaaccatcgagaacgcggaaatttatggtgatagcccagaaggcaaaatcgtcgtggttctggaaaccgaaaaccaaggtttcgttaccgacaccattgaaaccatcaacaatttaccgaacgttctcagcacggttctggtttatcaccaaattgaaaccgatctggatgacacggacgaagacactggaacacaacattcccaaatcgagggtgaagtatga

SEQ ID NO: 60609 - protein, 101 aa, Vibrio vulnificus CMCP6
MALNEVHISSLVVHVAPEHLGTIKTQIETIENAEIYGDSPEGKIVVVLETENQGFVTDTIETINNLPNVLSTVLVYHQIETDLDDTDEDTGTQHSQIEGEV

SEQ ID NO: 60610 - DNA, 333 bp, Bradyrhizobium japonicum USDA 110
  CDS (1)..(333): transl_table=11
atggcccaaccctcactcaatcataaagtcacgctcaaccgccgcgccttgatcaccggccgggtgctcagcgccgaccgtatcgtgccgccgccgggctacgaaatcgccagcatcatcgtgcaggcgcgccccgagcgcctcgccgaggtcgaagccgagatcattgcgcttgccggctgcgagatccacggccgcgacccgcgcggcaagctcgtcgtcgtgaccgaagcgccggatgccggcagcctcggcaccatgctcaacaccatccagtcgctgcaacacgtctattccgcggcgctggtcttccacgccatcgaaaccgcctga

SEQ ID NO: 60611 - protein, 110 aa, Bradyrhizobium japonicum USDA 110
MAQPSLNHKVTLNRRALITGRVLSADRIVPPPGYEIASIIVQARPERLAEVEAEIIALAGCEIHGRDPRGKLVVVTEAPDAGSLGTMLNTIQSLQHVYSAALVFHAIETA

SEQ ID NO: 60612 - DNA, 309 bp, Vibrio parahaemolyticus RIMD 2210633
  CDS (1)..(309): transl_table=11
atgtcactaaatgaagtgcatatttcaagtttggtagtgcacgtgctgcctgagcatctggatgaaattaagacgcaaattgaaacgtatgaaaacgcggaaatttacggagacagtccagaaggcaaaatcgttgtagtgcttgaaaccgaaaaccaaggtttcatcacagacactatcgatgccattaacaatttaccgaatgttttgagcacagtgttggtttatcaccaaatcgaaactgcgcttgaagaaacggatgaagaagacactggaacacaacattcccaaatcgagggtgaagtatga

SEQ ID NO: 60613 - protein, 102 aa, Vibrio parahaemolyticus RIMD 2210633
MSLNEVHISSLVVHVLPEHLDEIKTQIETYENAEIYGDSPEGKIVVVLETENQGFITDTIDAINNLPNVLSTVLVYHQIETALEETDEEDTGTQHSQIEGEV

SEQ ID NO: 60614 - DNA, 360 bp, Helicobacter hepaticus ATCC 51449
  CDS (1)..(360): transl_table=11
atgaatatctcaagtatcgttgtgaaaactactcaagaaagttttgaatctgtaaaaaatgctattaaagaaatacagggttgtgaaatatatattgaagacaaagctacaaatcagcttattgtcgttatagaatctcaaaacaccgaagaagaagtagctattaacaaacatatagaatctatggcgggagtaatgagcgcaaatatgcactatgcctatcaagaagatgagattaacgcacaacttaaatccatagatggtggtataagcgagtttctcaataatgattctatccctgctgaaaatattgcttactctggttctatagcacatcttatggggaaaaagcgcaaataa

SEQ ID NO: 60615 - protein, 119 aa, Helicobacter hepaticus ATCC 51449
MNISSIVVKTTQESFESVKNAIKEIQGCEIYIEDKATNQLIVVIESQNTEEEVAINKHIESMAGVMSANMHYAYQEDEINAQLKSIDGGISEFLNNDSIPAENIAYSGSIAHLMGKKRK

SEQ ID NO: 60616 - DNA, 264 bp, Haemophilus ducreyi 35000HP
  CDS (1)..(264): transl_table=11
atgaatacttttcgtgaagaccaaaattggtatgtttgtagtttagtagtacaagcgaagcctgccaaattaccccaagtgaaagcggatattttaactattcctcacgctgaaattcatggcgaaaaagcagaagaaggtaaattagtcgtgactttagagagtgatcatcaattagcgttagcggacttaattgataagctaaaagagatcaacggcgtgatcgttgtttcgttaatatctaattaccttgatgaaaaataa

SEQ ID NO: 60617 - protein, 87 aa, Haemophilus ducreyi 35000HP
MNTFREDQNWYVCSLVVQAKPAKLPQVKADILTIPHAEIHGEKAEEGKLVVTLESDHQLALADLIDKLKEINGVIVVSLISNYLDEK

SEQ ID NO: 60618 - DNA, 336 bp, Bordetella bronchiseptica RB50
  CDS (1)..(336): transl_table=11
atggcgcagccccccatgtcagcgcttccctcccgcgcactcgccccgccgccggtggccgagctgcatatcaccagcatggtcgtgcacgccctgcccgggcgcgcgcaggcgctgggcgcggccatcgccgccctgcccggcgcggaaatccatgcggtgtccgataccggcaagctggtcgtcacgctcgaagcccacagcacaggcgaaatgctggagcgcatcgccgccgtgcagggccaggacggcgtgctcgcttcggcgatggtctatcaacatatcgatactttggactcgatgaacgaggagattgacgatgtcaatggctcgtag

SEQ ID NO: 60619 - protein, 111 aa, Bordetella bronchiseptica RB50
MAQPPMSALPSRALAPPPVAELHITSMVVHALPGRAQALGAAIAALPGAEIHAVSDTGKLVVTLEAHSTGEMLERIAAVQGQDGVLASAMVYQHIDTLDSMNEEIDDVNGS

SEQ ID NO: 60620 - DNA, 306 bp, Vibrio vulnificus YJ016
  CDS (1)..(306): transl_table=11
atggcactaaatgaagtgcatatttcaagtttagtggtacacgtagcccctgagcacctaggcacgataaagacgcagatcgaagccatcgagaacgcggaaatttatggtgatagcccagaaggcaaaatcgtcgtggttctggaaaccgaaaaccaaggtttcgttaccgacaccattgaaaccatcaacaatttaccgaacgttctcagcacggttctggtttatcaccaaattgaaaccgatctggatgacacggacgaagacactggaacacaacattcccaaatcgagggtgaagtatga

SEQ ID NO: 60621 - protein, 101 aa, Vibrio vulnificus YJ016
MALNEVHISSLVVHVAPEHLGTIKTQIEAIENAEIYGDSPEGKIVVVLETENQGFVTDTIETINNLPNVLSTVLVYHQIETDLDDTDEDTGTQHSQIEGEV

SEQ ID NO: 60622 - DNA, 330 bp, Cupriavidus necator
  CDS (1)..(330): transl_table=11
atgccgactgcgaagcgtgccatccccatacagccactcccatgcggcgaggagtggcatatcgccggcatcgtggtgcacacccttcccgacagcctgccccaggtgcgagcggccattgaggccataaccggcgccgagatccacgcggtcagcgacgacggcaagctggtcgtcaccgtcgaggcgcccacgtcgcgcgccattgccgcacacctcacctgcctccaccagttggagggcgtgctctccgccgcgctggtctaccagcacaacgaagacgccgcagcgatgaacgaggagatggccgatgaagatctctcgtcgtga

SEQ ID NO: 60623 - protein, 109 aa, Cupriavidus necator
MPTAKRAIPIQPLPCGEEWHIAGIVVHTLPDSLPQVRAAIEAITGAEIHAVSDDGKLVVTVEAPTSRAIAAHLTCLHQLEGVLSAALVYQHNEDAAAMNEEMADEDLSS

SEQ ID NO: 60624 - DNA, 270 bp, Erwinia carotovora subsp. atroseptica SCRI1043
  CDS (1)..(270): transl_table=11
atgagcacagtctggcatgtttgcagtgtcgtggttcacgtcaagacggaacgtatggcggcggtgagcgacgtattggaaaaattacccaatgtggaggttgccgccagcgatagcgataccggaaaaatggccgtggtgctggagtcagattcagaagacacgctgttaaaacacatagcgtcaatacgcgagcttgcaggcgtattggcggtttcgctggtttatcaccagcttgatgaacaatctcagggtgaggaaataccatga

SEQ ID NO: 60625 - protein, 89 aa, Erwinia carotovora subsp. atroseptica SCRI1043
MSTVWHVCSVVVHVKTERMAAVSDVLEKLPNVEVAASDSDTGKMAVVLESDSEDTLLKHIASIRELAGVLAVSLVYHQLDEQSQGEEIP

SEQ ID NO: 60626 - DNA, 267 bp, Yersinia pseudotuberculosis IP 32953
  CDS (1)..(267): transl_table=11
atggacgataacgaatggcatgtttgtggattggtgctgcaagccaaaccggcacgttttgtgcagcttatggaccacctgctcgctatcccgggaacagaaatacccaccagtgaccctgctttgggcaagttggtggtggttatgcaggcagcgcgctcagacacgctcctgaatcatattgagtcagcgcgtaatctggatggtgtgctggctgtatcgctggtttatcaccagcaggatttgcaaggtgaggaaatgccatga

SEQ ID NO: 60627 - protein, 88 aa, Yersinia pseudotuberculosis IP 32953
MDDNEWHVCGLVLQAKPARFVQLMDHLLAIPGTEIPTSDPALGKLVVVMQAARSDTLLNHIESARNLDGVLAVSLVYHQQDLQGEEMP

SEQ ID NO: 60628 - DNA, 264 bp, Mannheimia succiniciproducens MBEL55E
  CDS (1)..(264): transl_table=11
atgagtaattttaatttaaacgaaaactggtatgtgtgtagtcttgtagttcaagccagaccggaaaaactttcacaggtgaaagcggatattttagctattccgaccgctgaaattcacggtgaaaagctggaagaaggtaaacttgtggttaccttggaaagtagcagacagcttgccttagctgatttaatcgatgaagttaaagatataagcggagtgatcgtggtgtctttaatttcaaattatcttgatgaaaaatag

SEQ ID NO: 60629 - protein, 87 aa, Mannheimia succiniciproducens MBEL55E
MSNFNLNENWYVCSLVVQARPEKLSQVKADILAIPTAEIHGEKLEEGKLVVTLESSRQLALADLIDEVKDISGVIVVSLISNYLDEK

SEQ ID NO: 60630 - DNA, 273 bp, Photobacterium profundum SS9
  CDS (1)..(273): transl_table=11
atggcgcaagaagaagtacatatatcaagcctagttgttcatgtaaaacctgaatatttagaagaagtaaaagctcagatacttgaaatgccaaatactgaaatacctggcgaaagccctgagggaaagattattgtagtattggaaacagcaaatcaaggatatgttactgatactatagataaaataaataatttagaacatgtgttaataacttttttagtgtatcaccaaattgaacactttgattcgcaatctgaggatgattcatga

SEQ ID NO: 60631 - protein, 90 aa, Photobacterium profundum SS9
MAQEEVHISSLVVHVKPEYLEEVKAQILEMPNTEIPGESPEGKIIVVLETANQGYVTDTIDKINNLEHVLITFLVYHQIEHFDSQSEDDS

SEQ ID NO: 60632 - DNA, 264 bp, Salmonella enterica subsp. enterica serovar Paratyphi A str. ATCC
  CDS (1)..(264): transl_table=11
atgcacactaactggcaggtctgtagcctggtcgtgcaggccaaaagtcagaacatcgccgccattggcacacaattgaacacgttgccgggttgcgaagtcgcgttaagcgacgttgaaagcgggcaactgatcgtggtggcggaagcagatcagagtgaaacgctgatgcaaacaattgagtcagtacgcaatgttgagggcgtgctggcggtgtcgctggtttatcaccagcaggatgagcaaggtgaggaaacaccatga

SEQ ID NO: 60633 - protein, 87 aa, Salmonella enterica subsp. enterica serovar Paratyphi A str. ATCC
MHTNWQVCSLVVQAKSQNIAAIGTQLNTLPGCEVALSDVESGQLIVVAEADQSETLMQTIESVRNVEGVLAVSLVYHQQDEQGEETP

SEQ ID NO: 60634 - DNA, 285 bp, Vibrio fischeri ES114
  CDS (1)..(285): transl_table=11
atgttagagaatttgcctgaaaatgaagttcatatttcaagcttagtggttcatgtaagacctgagtcactggaaataacaaaagaaaagatattagcactgccgaatacggaaatatatggagaaagtgaagagggcaagattattgttgttcttgaaactgaaaaccaaggatatatcaccgattcaatcgataaaataaatgacttcgaagacgtactaaatgtcgctttagtatttcaccaaatcgagcactttgattcgcaatgtgaggatgaatcatga

SEQ ID NO: 60635 - protein, 94 aa, Vibrio fischeri ES114
MLENLPENEVHISSLVVHVRPESLEITKEKILALPNTEIYGESEEGKIIVVLETENQGYITDSIDKINDFEDVLNVALVFHQIEHFDSQCEDES

SEQ ID NO: 60636 - DNA, 531 bp, Salmonella enterica subsp. enterica serovar Choleraesuis str
  CDS (1)..(531): transl_table=11
atgcctgtgcgcaggcctgtactgaatcgctttttcttccgcgccacaccagggcctgggatctggtttttacgctcacggaaaactgcctcgccaggcaatcggttgaatgccatcgttgccaggacagttgtgaacctatggccattacctttcgtcccacgctatccggcatttaccagccgcagcttgacccgcaggcctgtaacggatgcggggcgtgtgtggctatctgtcccgtgtcagccatcaaagcggagaaccaccatgcgcactaactggcaggtctgtagcctggtcgtgcaggccaaaagtcagaacatcgccgccattggcacacagttgaacacgttgccgggttgcgaagtcgcgttaagcgacgttgaaagcgggcaactgatcgtggtggcggaagcagaccagagtgaaacgctgatgcaaacaattgagtcagtacgcaatgtcgagggcgtactggcggtgtcgctggtttatcaccagcaggatgagcaaggtgaggaaacaccatga

SEQ ID NO: 60637 - protein, 176 aa, Salmonella enterica subsp. enterica serovar Choleraesuis str
MPVRRPVLNRFFFRATPGPGIWFLRSRKTASPGNRLNAIVARTVVNLWPLPFVPRYPAFTSRSLTRRPVTDAGRVWLSVPCQPSKRRTTMRTNWQVCSLVVQAKSQNIAAIGTQLNTLPGCEVALSDVESGQLIVVAEADQSETLMQTIESVRNVEGVLAVSLVYHQQDEQGEETP

SEQ ID NO: 60638 - DNA, 282 bp, Haemophilus influenzae 86-028NP
  CDS (1)..(282): transl_table=11
atgaataatacaaatttaatattagaaaatgcgagggattggcacgttgttggattgatcgtgcaaggtaatccaaaaaaattatcagcaattcaaaccgcacttttagcgattgagcatactgaaattccgacttttgatgaaaaacttggaaaatttgtggtggtaatgcaatcgaacgatcagcatctcttgcttgaaaaaatggaaagtgtgaaagatatcgacggtgtgattaatgtatcgttggtgtatcacgagcaagatgaacaaaataaataa

SEQ ID NO: 60639 - protein, 93 aa, Haemophilus influenzae 86-028NP
MNNTNLILENARDWHVVGLIVQGNPKKLSAIQTALLAIEHTEIPTFDEKLGKFVVVMQSNDQHLLLEKMESVKDIDGVINVSLVYHEQDEQNK

SEQ ID NO: 60640 - DNA, 339 bp, Ralstonia eutropha JMP134
  CDS (1)..(339): transl_table=11
atgccagctgcaagatcttttatacccatcgggccggtctccgccggcgaggaatggcatatcgccgggattgtcgtgtacgcgcatcccgacagcgtgagccgcgtgcgcgccgccgtcgaagccatgacgggcgtggagatccatgctgccagcgaagccggcaagctggtcgtcaccgtcgaagccccctcctcccgcgccattgccgcgcagctgacctgccttcaccagctcgaaggcgtgctgtcggccaccctggtctatcagcacaacgaagacgccgaagccatgaacgaggagatcgacgatgaaagtctctcgtcgggatttcattaa

SEQ ID NO: 60641 - protein, 112 aa, Ralstonia eutropha JMP134
MPAARSFIPIGPVSAGEEWHIAGIVVYAHPDSVSRVRAAVEAMTGVEIHAASEAGKLVVTVEAPSSRAIAAQLTCLHQLEGVLSATLVYQHNEDAEAMNEEIDDESLSSGFH

SEQ ID NO: 60642 - DNA, 315 bp, Magnetospirillum magnetotacticum MS-1
  CDS (1)..(315)
atgagactcgcgaacttcgttgccaccgagaagtccaagcccagggagcaggtggagaatatctgcggcgtgctgatccacgccaagccggagcgcaggcacgaggttcaggacgccctcggccggatacccggcgtcgaggttcacaccatgaccgacgatggccggatggttgttaccgtcgaggatgcccagggcaactgggcgggcgccaccatcaccagcctgaccgacatccggggcattttgaacgtgtccttggtctatcaccattttgattccgatcttgatctggaaggggagagtttttcatga

SEQ ID NO: 60643 - protein, 104 aa, Magnetospirillum magnetotacticum MS-1
MRLANFVATEKSKPREQVENICGVLIHAKPERRHEVQDALGRIPGVEVHTMTDDGRMVVTVEDAQGNWAGATITSLTDIRGILNVSLVYHHFDSDLDLEGESFS

SEQ ID NO: 60644 - DNA, 270 bp, Actinobacillus pleuropneumoniae serovar 1 str. 4074
  CDS (1)..(270)
atgagtacggaaaacttaaacgaagcgaaaaactggtatgtatgtagcttagtcgttcaagcaaaaccagcaaaattagcgcaagtgaaagcggacattcttaccattccgtttgcagaaattcatggtgagaaagccgaggaaggcaaactggtagtgacacttgagagtgacagacagcttgctttagccgatttaatcgatcaggtaaaggatattgacggtgtgattgtcgtattgttaatttccaattatctggatgaacaatag

SEQ ID NO: 60645 - protein, 89 aa, Actinobacillus pleuropneumoniae serovar 1 str. 4074
MSTENLNEAKNWYVCSLVVQAKPAKLAQVKADILTIPFAEIHGEKAEEGKLVVTLESDRQLALADLIDQVKDIDGVIVVLLISNYLDEQ

SEQ ID NO: 60646 - DNA, 282 bp, Haemophilus influenzae R2846
  CDS (1)..(282)
atgaataatacaaatttaatattagaaaatgcgggagattggcacgttgttggattgatcgtgcaaggtaatccaaaaaaactatcagcaattcaaaccgcacttttagcgattgagcatactgaaattccgacttttgatgaaaaacttgggaaatttgtggtggtaatgcaatcgtacgatcagcatctcttgcttgaaaaaatggaaagtgtgaaagatatcgacggtgtgattaatgtatcgttggtgtatcacgagcaagatgaacaaaataaataa

SEQ ID NO: 60647 - protein, 93 aa, Haemophilus influenzae R2846
MNNTNLILENAGDWHVVGLIVQGNPKKLSAIQTALLAIEHTEIPTFDEKLGKFVVVMQSYDQHLLLEKMESVKDIDGVINVSLVYHEQDEQNK

SEQ ID NO: 60648 - DNA, 258 bp, Shewanella baltica OS155
  CDS (1)..(258): transl_table=11
atgagcaacgaactccatatcaccagtttagtggtgcaggtcttaccgcagaaaatggcagacgttagacaagagatcatgaccattgaaaatgccgaactttccgtcaacaacgaagtgaagttggtcgtagtcatcgagggcgagactcagcgcgccttgatggacagtatagaagcgatcaatgccattccgggcgtgttatccgccactatggtttaccaccagagtgaagtgctcgaagagggtgaagaatga

SEQ ID NO: 60649 - protein, 85 aa, Shewanella baltica OS155
MSNELHITSLVVQVLPQKMADVRQEIMTIENAELSVNNEVKLVVVIEGETQRALMDSIEAINAIPGVLSATMVYHQSEVLEEGEE

SEQ ID NO: 60650 - DNA, 270 bp, Shewanella baltica OS155
  CDS (1)..(270): transl_table=11
atgagtcaggaataccacgtcaccagccttgtggtgcatgccgcacctaaagtcttacagcaggttgaagccaatatccgctcattaatgggcgccgatattcatgcggttacgcccgaagggaaattggttgtcaccctcgaagggagtagccaaagggcgatactcgacaatattgaagccatcaatgccctgtccggcgtgttatctgccagtttgatttaccaccaagtcgcacctttagaacaagagagtgaggaaagattatga

SEQ ID NO: 60651 - protein, 89 aa, Shewanella baltica OS155
MSQEYHVTSLVVHAAPKVLQQVEANIRSLMGADIHAVTPEGKLVVTLEGSSQRAILDNIEAINALSGVLSASLIYHQVAPLEQESEERL

SEQ ID NO: 60652 - DNA, 270 bp, Shewanella amazonensis SB2B
  CDS (1)..(270): transl_table=11
atgacacaggaatatcacgtcaccagtctggtggtgcatgccgcccccagccaggccaatgtcatcagtgatgccattgacgccctgcccggcgccgaggttcatgccaccagtcccgaaggcaagttggtcgtcaccctggaagggtcaacccagcgagccattctcgacaatgtcgaggccatcaatgcccttaacggggtgctatccagcagtctgatctatcaccaatcagagcaagaacaacaagtgagtgaggaaacaccatga

SEQ ID NO: 60653 - protein, 89 aa, Shewanella amazonensis SB2B
MTQEYHVTSLVVHAAPSQANVISDAIDALPGAEVHATSPEGKLVVTLEGSTQRAILDNVEAINALNGVLSSSLIYHQSEQEQQVSEETP

SEQ ID NO: 60654 - DNA, 330 bp, Ralstonia metallidurans CH34
  CDS (1)..(330): transl_table=11
atgccagcatcaggagtgtcgattcccatcgtgcccgtgccggccggcgaagagtggcatatcgccggcatcatggtgtacgcgaacccggaaaagctcgatgccgtctgctcggccatcgacgccatgactggcatggagatccatgcgatcagtgacgccggcaagatcgtcgtcaccgcggaagcacccagctcgcgcgccatcgccgcgcaactcacctgtctgcatcaactcgaaggcgtcttttccgccacgctggtctaccagcacaacgaagatgccgccgccatgaacgaggagatctccgatgccactcacgcgccgtga

SEQ ID NO: 60655 - protein, 109 aa, Ralstonia metallidurans CH34
MPASGVSIPIVPVPAGEEWHIAGIMVYANPEKLDAVCSAIDAMTGMEIHAISDAGKIVVTAEAPSSRAIAAQLTCLHQLEGVFSATLVYQHNEDAAAMNEEISDATHAP

SEQ ID NO: 60656 - DNA, 258 bp, Shewanella frigidimarina NCIMB 400
  CDS (1)..(258): transl_table=11
atgagcaatgaacttcacgtaaccagcctaattgtccaagtacaccctgagcaaatggctgaagtaagacaaaaaattatggccatcaaaaatgctgagttgtcagctaataatgacgttaagttagttgttgtcgttgaaggtccgagccaacgatcgttgatggatgatatatcaacaattaatgccattccgggtgtgttgactgccaccatggtgtatcaccaaagtgaagagcttgaagaaggtgaagtatga

SEQ ID NO: 60657 - protein, 85 aa, Shewanella frigidimarina NCIMB 400
MSNELHVTSLIVQVHPEQMAEVRQKIMAIKNAELSANNDVKLVVVVEGPSQRSLMDDISTINAIPGVLTATMVYHQSEELEEGEV

SEQ ID NO: 60658 - DNA, 255 bp, Pseudomonas stutzeri
  CDS (1)..(255): transl_table=11
atgggacaccctttgcatatcgccagcctcctggtgcactgccgccccgagtggctggccgcgctgaaaaccaacctccagttgctacccggtctcgagctgcatcaggaaagccccagcggcaagctggtggtggtgctcgaggccgagcacgagtcgcgcatcctcgctgcgatcgaccacatccagcagctgcctggcgtccttaacgccgccctggtctaccacgaagaactcctcgaaggagacgcctga

SEQ ID NO: 60659 - protein, 84 aa, Pseudomonas stutzeri
MGHPLHIASLLVHCRPEWLAALKTNLQLLPGLELHQESPSGKLVVVLEAEHESRILAAIDHIQQLPGVLNAALVYHEELLEGDA

SEQ ID NO: 60660 - DNA, 315 bp, Magnetospirillum magnetotacticum
  CDS (1)..(315): transl_table=11
atgagactcgcgaccttcgttgccaccgagaagtccaagcccagggagcaggtggagaatatctgcggcgtgctgatccacgccaagccggagcgcaggcacgaggttcaggacgccctcggccggatacccggcgtcgaggttcacaccatgaccgacgatggccggatggttgttaccgtcgaggatgcccagggcaactgggcgggcgccaccatcaccagcctgaccgacatccggggcattttgaacgtgtccttggtctatcaccattttgattccgatcttgatctggaaggggagagtttttcatga

SEQ ID NO: 60661 - protein, 104 aa, Magnetospirillum magnetotacticum
MRLATFVATEKSKPREQVENICGVLIHAKPERRHEVQDALGRIPGVEVHTMTDDGRMVVTVEDAQGNWAGATITSLTDIRGILNVSLVYHHFDSDLDLEGESFS

SEQ ID NO: 60662 - DNA, 348 bp, Rhodopseudomonas sp
  CDS (1)..(348): transl_table=11
gtgacgcccgccctgccaacggaggttcccgtgccaaataatcccgtcctcgatcgccgcgcgctgttctccggccgcttcaagaatccgaacgccgtggtgcgaccgcccggcggcgagatcgccagcatcctggtgcaggctcgtccggaacggctcgacgaggtcgccgccgcgatcgtagccttcgccggctgcgaagtgttcgcccgcgatccgcaaggcaagctggtggtggtgatcgacgccgaggattccggcgtgatcggctcgacgctcaacgccatcgcggcgctgcccaacgtgtattccgccgccttggtgttccacgccatcgaagccggctag

SEQ ID NO: 60663 - protein, 115 aa, Rhodopseudomonas sp
MTPALPTEVPVPNNPVLDRRALFSGRFKNPNAVVRPPGGEIASILVQARPERLDEVAAAIVAFAGCEVFARDPQGKLVVVIDAEDSGVIGSTLNAIAALPNVYSAALVFHAIEAG

SEQ ID NO: 60664 - DNA, 282 bp, Haemophilus influenzae
  misc_feature (48)..(48): n is a, c, g, or t
  CDS (1)..(282): transl_table=11
atgaataatacaaatttaatattagaaaatgcgagagattggcacgtngttggattgatcgtgcaaggtaatccaaaaaaattatcagcaattcaaaccgcacttttagcgattgagcatactgaaattccgactcttgatgaaaaacttggaaaatttgtggtggtaatgcaatcgaacgatcagcatctcttgcttgaaaaaatggaaagtgtgaaagatatcgacggtgtgattaatgtatcgttggtgtatcacgagcaagatgaacaaaataaatag

SEQ ID NO: 60665 - protein, 93 aa, Haemophilus influenzae
MNNTNLILENARDWHVVGLIVQGNPKKLSAIQTALLAIEHTEIPTLDEKLGKFVVVMQSNDQHLLLEKMESVKDIDGVINVSLVYHEQDEQNK

SEQ ID NO: 60666 - DNA, 20 bp, Artificial sequence
  Primer sequence
atgcacactaactggcaagt

SEQ ID NO: 60667 - DNA, 25 bp, Artificial sequence
  Primer sequence
ttatggtgtttcctcaccttgctct

SEQ ID NO: 60668 - protein, 74 aa, Artificial sequence
  Consensus
  Variant (2)..(3): Xaa in position 2 to 3 is any amino acid
  Variant (7)..(9): Xaa in position 7 to 9 is any amino acid
  Variant (11)..(12): Xaa in position 11 to 12 is any amino acid
  Variant (14)..(15): Xaa in position 14 to 15 is any amino acid
  Variant (17)..(19): Xaa in position 17 to 19 is any amino acid
  Variant (21)..(22): Xaa in position 21 to 22 is any amino acid
  Variant (24)..(26): Xaa in position 24 to 26 is any amino acid
  Variant (29)..(34): Xaa in position 29 to 34 is any amino acid
  Variant (35)..(35): Xaa in position 35 is any or no amino acid
  Variant (41)..(41): Xaa in position 41 is any amino acid
  Variant (44)..(49): Xaa in position 44 to 49 is any amino acid
  Variant (51)..(53): Xaa in position 51 to 53 is any amino acid
  Variant (55)..(56): Xaa in position 55 to 56 is any amino acid
  Variant (58)..(59): Xaa in position 58 to 59 is any amino acid
  Variant (61)..(62): Xaa in position 61 to 62 is any amino acid
  Variant (65)..(67): Xaa in position 65 to 67 is any amino acid
  Variant (71)..(73): Xaa in position 71 to 73 is any amino acid
IXXLVVXXXPXXLXXVXXXIXXIXXXEIXXXXXXXGKLVVXLEXXXXXXLXXXIXXIXXLXXVLXXXLVYXXXE

SEQ ID NO: 60669 - protein, 43 aa, Artificial sequence
  Consensus
  Variant (2)..(8): Xaa in position 2 to 8 is any amino acid
  Variant (9)..(9): Xaa in position 9 is any or no amino acid
  Variant (11)..(11): Xaa in position 11 is any amino acid
  Variant (12)..(12): Xaa in position 12 is Phe, Ile, Leu or Met
  Variant (13)..(13): Xaa in position 13 is Ala, Ile or Val
  Variant (15)..(15): Xaa in position 15 is Thr or Val
  Variant (16)..(16): Xaa in position 16 is any amino acid
  Variant (17)..(17): Xaa in position 17 is Asp, Glu or Gln
  Variant (18)..(18): Xaa in position 18 is Ala, Asp, Gly, Ser or Thr
  Variant (19)..(20): Xaa in position 19 to 20 is any amino acid
  Variant (21)..(21): Xaa in position 21 is Ala, Glu, Gly, Gln or Ser
  Variant (22)..(23): Xaa in position 22 to 23 is any amino acid
  Variant (24)..(24): Xaa in position 24 is Ala, Ile, Leu or Val
  Variant (25)..(27): Xaa in position 25 to 27 is any amino acid
  Variant (28)..(28): Xaa in position 28 is Ile, Leu, Met or Val
  Variant (29)..(29): Xaa in position 29 is Ala, Asp, Glu, Asn or Thr
  Variant (30)..(32): Xaa in position 30 to 32 is any amino acid
  Variant (33)..(33): Xaa in position 33 is Ala, Asp, Glu, Asn, Gln or Ser
  Variant (34)..(34): Xaa in position 34 is Phe, Ile, Leu or Val
  Variant (35)..(36): Xaa in position 35 to 36 is any amino acid
  Variant (37)..(37): Xaa in position 37 is Ile or Val
  Variant (38)..(39): Xaa in position 38 to 39 is any amino acid
  Variant (40)..(40): Xaa in position 40 is Ala, Ser, Thr or Val
  Variant (41)..(41): Xaa in position 41 is any amino acid
  Variant (43)..(43): Xaa in position 43 is Ile or Val
EXXXXXXXXGXXXVXXXXXXXXXXXXXXXXXXXXXXXXXXXLX

SEQ ID NO: 60670 - DNA, 2374 bp, Escherichia coli K12; identical to SEQ ID NO: 1805
  CDS (86)..(2281)

SEQ ID NO: 60671 - protein, 731 aa, Escherichia coli K12; identical to SEQ ID NO: 1806

SEQ ID NO: 60672 - DNA, 2961 bp, Hafnia alvei; identical to SEQ ID NO: 1807
  CDS (185)..(2404)

SEQ ID NO: 60673 - protein, 739 aa, Hafnia alvei; identical to SEQ ID NO: 1808

SEQ ID NO: 60674 - DNA, 4341 bp, Escherichia coli; identical to SEQ ID NO: 1809
  CDS (660)..(2858)

SEQ ID NO: 60675 - protein, 732 aa, Escherichia coli; identical to SEQ ID NO: 1810

SEQ ID NO: 60676 - DNA, 1850 bp, Bacillus subtilis; identical to SEQ ID NO: 1811
  CDS (312)..(1784)

SEQ ID NO: 60677 - protein, 490 aa, Bacillus subtilis; identical to SEQ ID NO: 1812

SEQ ID NO: 60678 - DNA, 3091 bp, Lactobacillus sp; identical to SEQ ID NO: 1813
  CDS (572)..(2767)

SEQ ID NO: 60679 - protein, 731 aa, Lactobacillus sp; identical to SEQ ID NO: 1814

SEQ ID NO: 60680 - DNA, 1449 bp, Bacillus halodurans; identical to SEQ ID NO: 1815
  CDS (1)..(1449)

SEQ ID NO: 60681 - protein, 482 aa, Bacillus halodurans; identical to SEQ ID NO: 1816

SEQ ID NO: 60682 - DNA, 2196 bp, Sinorhizobium meliloti; identical to SEQ ID NO: 1817
  CDS (1)..(2196)

SEQ ID NO: 60683 - protein, 731 aa, Sinorhizobium meliloti; identical to SEQ ID NO: 1818

SEQ ID NO: 60684 - DNA, 1380 bp, Listeria innocua; identical to SEQ ID NO: 1819
  CDS (1)..(1380)

SEQ ID NO: 60685 - protein, 459 aa, Listeria innocua; identical to SEQ ID NO: 1820

SEQ ID NO: 60686 - DNA, 2307 bp, Yersinia pestis; identical to SEQ ID NO: 1821
  CDS (1)..(2307)

SEQ ID NO: 60687 - protein, 768 aa, Yersinia pestis; identical to SEQ ID NO: 1822

SEQ ID NO: 60688 - DNA, 2145 bp, Salmonella enterica subsp. enterica serovar Typhi; identical to SEQ ID NO: 1823
  CDS (1)..(2145)

SEQ ID NO: 60689 - protein, 714 aa, Salmonella enterica subsp. enterica serovar Typhi; identical to SEQ ID NO: 1824

SEQ ID NO: 60690 - DNA, 1467 bp, Nostoc sp. PCC 7120; identical to SEQ ID NO: 1825
  CDS (1)..(1467)

SEQ ID NO: 60691 - protein, 488 aa, Nostoc sp. PCC 7120; identical to SEQ ID NO: 1826

SEQ ID NO: 60692 - DNA, 2163 bp, Yersinia pestis; identical to SEQ ID NO: 1827
  CDS (1)..(2163)

SEQ ID NO: 60693 - protein, 720 aa, Yersinia pestis; identical to SEQ ID NO: 1828

SEQ ID NO: 60694 - DNA, 2271 bp, Salmonella enterica subsp. enterica serovar Typhi; identical to SEQ ID NO: 1829
  CDS (1)..(2271)

SEQ ID NO: 60695 - protein, 756 aa, Salmonella enterica subsp. enterica serovar Typhi; identical to SEQ ID NO: 1830

SEQ ID NO: 60696 - DNA, 2148 bp, Escherichia coli; identical to SEQ ID NO: 1831
  CDS (1)..(2148)

SEQ ID NO: 60697 - protein, 715 aa, Escherichia coli; identical to SEQ ID NO: 1832

SEQ ID NO: 60698 - DNA, 2835 bp, Escherichia coli; identical to SEQ ID NO: 1833
  CDS (571)..(2712)

SEQ ID NO: 60699 - protein, 713 aa, Escherichia coli; identical to SEQ ID NO: 1834

SEQ ID NO: 60700 - DNA, 1446 bp, Clostridium acetobutylicum; identical to SEQ ID NO: 1835
  CDS (1)..(1446)

SEQ ID NO: 60701 - protein, 481 aa, Clostridium acetobutylicum; identical to SEQ ID NO: 1836

SEQ ID NO: 60702 - DNA, 1464 bp, Clostridium acetobutylicum; identical to SEQ ID NO: 1837
  CDS (1)..(1464)

SEQ ID NO: 60703 - protein, 487 aa, Clostridium acetobutylicum; identical to SEQ ID NO: 1838

SEQ ID NO: 60704 - DNA, 2256 bp, Pseudomonas aeruginosa; identical to SEQ ID NO: 1839
  CDS (1)..(2256)

SEQ ID NO: 60705 - protein, 751 aa, Pseudomonas aeruginosa; identical to SEQ ID NO: 1840

SEQ ID NO: 60706 - DNA, 2853 bp, Mycobacterium leprae; identical to SEQ ID NO: 1841
  CDS (1)..(2853)

SEQ ID NO: 60707 - protein, 950 aa, Mycobacterium leprae; identical to SEQ ID NO: 1842

SEQ ID NO: 60708 - DNA, 2202 bp, Vibrio cholerae; identical to SEQ ID NO: 1843
  CDS (1)..(2202)

SEQ ID NO: 60709 - protein, 733 aa, Vibrio cholerae; identical to SEQ ID NO: 1844

SEQ ID NO: 60710 - DNA, 2163 bp, Vibrio cholerae; identical to SEQ ID NO: 1845
  CDS (1)..(2163)

SEQ ID NO: 60711 - protein, 720 aa, Vibrio cholerae; identical to SEQ ID NO: 1846

SEQ ID NO: 60712 - DNA, 2163 bp, Haemophilus influenzae; identical to SEQ ID NO: 1847
  CDS (1)..(2163)

SEQ ID NO: 60713 - protein, 720 aa, Haemophilus influenzae; identical to SEQ ID NO: 1848

SEQ ID NO: 60714 - DNA, 2844 bp, Mycobacterium tuberculosis; identical to SEQ ID NO: 1849
  CDS (1)..(2844)

SEQ ID NO: 60715 - protein, 947 aa, Mycobacterium tuberculosis; identical to SEQ ID NO: 1850

SEQ ID NO: 60716 - DNA, 1476 bp, Streptococcus pneumoniae; identical to SEQ ID NO: 1851
  CDS (1)..(1476)

SEQ ID NO: 60717 - protein, 491 aa, Streptococcus pneumoniae; identical to SEQ ID NO: 1852

SEQ ID NO: 60718 - DNA, 1476 bp, Bacillus halodurans; identical to SEQ ID NO: 1853
  CDS (1)..(1476)

SEQ ID NO: 60719 - protein, 491 aa, Bacillus halodurans; identical to SEQ ID NO: 1854

SEQ ID NO: 60720 - DNA, 2349 bp, Sinorhizobium meliloti; identical to SEQ ID NO: 1855
  CDS (1)..(2349)

SEQ ID NO: 60721 - protein, 782 aa, Sinorhizobium meliloti; identical to SEQ ID NO: 1856

SEQ ID NO: 60722 - DNA, 1476 bp, Streptococcus pneumoniae; identical to SEQ ID NO: 1857
  CDS (1)..(1476)

SEQ ID NO: 60723 - protein, 491 aa, Streptococcus pneumoniae; identical to SEQ ID NO: 1858

SEQ ID NO: 60724 - DNA, 2271 bp, Escherichia coli; identical to SEQ ID NO: 1859
  CDS (1)..(2271)

SEQ ID NO: 60725 - protein, 756 aa, Escherichia coli; identical to SEQ ID NO: 1860

SEQ ID NO: 60726 - DNA, 1443 bp, Bacillus subtilis; identical to SEQ ID NO: 1861
  CDS (1)..(1443)

SEQ ID NO: 60727 - protein, 480 aa, Bacillus subtilis; identical to SEQ ID NO: 1862

SEQ ID NO: 60728 - DNA, 1452 bp, Synechocystis sp; identical to SEQ ID NO: 1863
  CDS (1)..(1452)

SEQ ID NO: 60729 - protein, 483 aa, Synechocystis sp; identical to SEQ ID NO: 1864

SEQ ID NO: 60730 - DNA, 2307 bp, Yersinia pseudotuberculosis IP 32953; identical to SEQ ID NO: 1865
  CDS (1)..(2307)

SEQ ID NO: 60731 - protein, 768 aa, Yersinia pseudotuberculosis IP 32953; identical to SEQ ID NO: 1866

SEQ ID NO: 60732 - DNA, 1467 bp, Symbiobacterium thermophilum; identical to SEQ ID NO: 1867
  CDS (1)..(1467)

SEQ ID NO: 60733 - protein, 488 aa, Symbiobacterium thermophilum; identical to SEQ ID NO: 1868

SEQ ID NO: 60734 - DNA, 1410 bp, Symbiobacterium thermophilum; identical to SEQ ID NO: 1869
  CDS (1)..(1410)

SEQ ID NO: 60735 - protein, 469 aa, Symbiobacterium thermophilum; identical to SEQ ID NO: 1870

SEQ ID NO: 60736 - DNA, 2154 bp, Erwinia carotovora; identical to SEQ ID NO: 1871
  CDS (1)..(2154)

SEQ ID NO: 60737 - protein, 717 aa, Erwinia carotovora; identical to SEQ ID NO: 1872

SEQ ID NO: 60738 - DNA, 2790 bp, Acinetobacter sp; identical to SEQ ID NO: 1873
  CDS (1)..(2790)

SEQ ID NO: 60739 - protein, 929 aa, Acinetobacter sp; identical to SEQ ID NO: 1874

SEQ ID NO: 60740 - DNA, 1482 bp, Bacillus thuringiensis; identical to SEQ ID NO: 1875
  CDS (1)..(1482)

SEQ ID NO: 60741 - protein, 493 aa, Bacillus thuringiensis; identical to SEQ ID NO: 1876

SEQ ID NO: 60742 - DNA, 1422 bp, Bacillus thuringiensis; identical to SEQ ID NO: 1877
  CDS (1)..(1422)

SEQ ID NO: 60743 - protein, 473 aa, Bacillus thuringiensis; identical to SEQ ID NO: 1878

SEQ ID NO: 60744 - DNA, 2358 bp, Rhodopseudomonas palustris; identical to SEQ ID NO: 1879
  CDS (1)..(2358)

SEQ ID NO: 60745 - protein, 785 aa, Rhodopseudomonas palustris; identical to SEQ ID NO: 1880

SEQ ID NO: 60746 - DNA, 2837 bp, Shigella boydii; identical to SEQ ID NO: 1881
  CDS (165)..(2435)

SEQ ID NO: 60747 - protein, 756 aa, Shigella boydii; identical to SEQ ID NO: 1882

SEQ ID NO: 60748 - DNA, 1380 bp, Listeria monocytogenes; identical to SEQ ID NO: 1883
  CDS (1)..(1380)

SEQ ID NO: 60749 - protein, 459 aa, Listeria monocytogenes; identical to SEQ ID NO: 1884

SEQ ID NO: 60750 - DNA, 1482 bp, Bacillus cereus; identical to SEQ ID NO: 1885
  CDS (1)..(1482)

SEQ ID NO: 60751 - protein, 493 aa, Bacillus cereus; identical to SEQ ID NO: 1886

SEQ ID NO: 60752 - DNA, 1422 bp, Bacillus cereus; identical to SEQ ID NO: 1887
  CDS (1)..(1422)

SEQ ID NO: 60753 - protein, 473 aa, Bacillus cereus; identical to SEQ ID NO: 1888

SEQ ID NO: 60754 - DNA, 1458 bp, Mycobacterium paratuberculosis; identical to SEQ ID NO: 1889
  CDS (1)..(1458)

SEQ ID NO: 60755 - protein, 485 aa, Mycobacterium paratuberculosis; identical to SEQ ID NO: 1890

SEQ ID NO: 60756 - DNA, 2853 bp, Mycobacterium paratuberculosis; identical to SEQ ID NO: 1891
  CDS (1)..(2853)

SEQ ID NO: 60757 - protein, 950 aa, Mycobacterium paratuberculosis; identical to SEQ ID NO: 1892

SEQ ID NO: 60758 - DNA, 2100 bp, Lactobacillus johnsonii; identical to SEQ ID NO: 1893
  CDS (1)..(2100)

SEQ ID NO: 60759 - protein, 699 aa, Lactobacillus johnsonii; identical to SEQ ID NO: 1894

SEQ ID NO: 60760 - DNA, 3625 bp, Vibrio parahaemolyticus; identical to SEQ ID NO: 1895
  CDS (1451)..(3625)

SEQ ID NO: 60761 - protein, 724 aa, Vibrio parahaemolyticus; identical to SEQ ID NO: 1896

SEQ ID NO: 60762 - DNA, 2142 bp, Shigella flexneri; identical to SEQ ID NO: 1897
  CDS (1)..(2142)

SEQ ID NO: 60763 - protein, 713 aa, Shigella flexneri; identical to SEQ ID NO: 1898

SEQ ID NO: 60764 - DNA, 2181 bp, Vibrio vulnificus; identical to SEQ ID NO: 1899
  CDS (1)..(2181)

SEQ ID NO: 60765 - protein, 726 aa, Vibrio vulnificus; identical to SEQ ID NO: 1900

SEQ ID NO: 60766 - DNA, 2307 bp, Photorhabdus luminescens; identical to SEQ ID NO: 1901
  CDS (1)..(2307)

SEQ ID NO: 60767 - protein, 768 aa, Photorhabdus luminescens; identical to SEQ ID NO: 1902

SEQ ID NO: 60768 - DNA, 1404 bp, Gloeobacter violaceus; identical to SEQ ID NO: 1903
  CDS (1)..(1404)

SEQ ID NO: 60769 - protein, 467 aa, Gloeobacter violaceus; identical to SEQ ID NO: 1904

SEQ ID NO: 60770 - DNA, 2259 bp, Chromobacterium violaceum; identical to SEQ ID NO: 1905
  CDS (1)..(2259)

SEQ ID NO: 60771 - protein, 752 aa, Chromobacterium violaceum; identical to SEQ ID NO: 1906

SEQ ID NO: 60772 - DNA, 1251 bp, Chromobacterium violaceum; identical to SEQ ID NO: 1907
  CDS (1)..(1251)

SEQ ID NO: 60773 - protein, 416 aa, Chromobacterium violaceum; identical to SEQ ID NO: 1908

SEQ ID NO: 60774 - DNA, 2352 bp, Fusobacterium nucleatum subsp; identical to SEQ ID NO: 1909
  CDS (1)..(2352)

SEQ ID NO: 60775 - protein, 783 aa, Fusobacterium nucleatum subsp; identical to SEQ ID NO: 1910

SEQ ID NO: 60776 - DNA, 2196 bp, Shigella flexneri; identical to SEQ ID NO: 1911
  CDS (1)..(2196)

SEQ ID NO: 60777 - protein, 731 aa, Shigella flexneri; identical to SEQ ID NO: 1912

SEQ ID NO: 60778 - DNA, 2271 bp, Bordetella pertussis; identical to SEQ ID NO: 1913
  CDS (1)..(2271)

SEQ ID NO: 60779 - protein, 756 aa, Bordetella pertussis; identical to SEQ ID NO: 1914

SEQ ID NO: 60780 - DNA, 2271 bp, Bordetella parapertussis; identical to SEQ ID NO: 1915
  CDS (1)..(2271)

SEQ ID NO: 60781 - protein, 756 aa, Bordetella parapertussis; identical to SEQ ID NO: 1916

SEQ ID NO: 60782 - DNA, 1422 bp, Bacillus cereus; identical to SEQ ID NO: 1917
  CDS (1)..(1422)

SEQ ID NO: 60783 - protein, 473 aa, Bacillus cereus; identical to SEQ ID NO: 1918

SEQ ID NO: 60784 - DNA, 1422 bp, Bacillus anthracis; identical to SEQ ID NO: 1919
  CDS (1)..(1422)

SEQ ID NO: 60785 - protein, 473 aa, Bacillus anthracis; identical to SEQ ID NO: 1920

SEQ ID NO: 60786 - DNA, 2271 bp, Shigella flexneri; identical to SEQ ID NO: 1921
  CDS (1)..(2271)

SEQ ID NO: 60787 - protein, 756 aa, Shigella flexneri; identical to SEQ ID NO: 1922

SEQ ID NO: 60788 - DNA, 2136 bp, Shigella flexneri; identical to SEQ ID NO: 1923
  CDS (1)..(2136)

SEQ ID NO: 60789 - protein, 711 aa, Shigella flexneri; identical to SEQ ID NO: 1924

SEQ ID NO: 60790 - DNA, 2127 bp, Escherichia coli; identical to SEQ ID NO: 1925
  CDS (1)..(2127)

SEQ ID NO: 60791 - protein, 708 aa, Escherichia coli; identical to SEQ ID NO: 1926

SEQ ID NO: 60792 - DNA, 1563 bp, Oryza sativa; identical to SEQ ID NO: 1927
  CDS (1)..(1563)

SEQ ID NO: 60793 - protein, 520 aa, Oryza sativa; identical to SEQ ID NO: 1928

SEQ ID NO: 60794 - DNA, 2181 bp, Vibrio parahaemolyticus; identical to SEQ ID NO: 1929
  CDS (1)..(2181)

SEQ ID NO: 60795 - protein, 726 aa, Vibrio parahaemolyticus; identical to SEQ ID NO: 1930

SEQ ID NO: 60796 - DNA, 4026 bp, Vibrio parahaemolyticus; identical to SEQ ID NO: 1931
  CDS (1779)..(3914)

SEQ ID NO: 60797 - protein, 711 aa, Vibrio parahaemolyticus; identical to SEQ ID NO: 1932

SEQ ID NO: 60798 - DNA, 1461 bp, Clostridium tetani; identical to SEQ ID NO: 1933
  CDS (1)..(1461)

SEQ ID NO: 60799 - protein, 486 aa, Clostridium tetani; identical to SEQ ID NO: 1934

SEQ ID NO: 60800 - DNA, 1416 bp, Clostridium tetani; identical to SEQ ID NO: 1935
  CDS (1)..(1416)

SEQ ID NO: 60801 - protein, 471 aa, Clostridium tetani; identical to SEQ ID NO: 1936

SEQ ID NO: 60802 - DNA, 2766 bp, Bradyrhizobium japonicum; identical to SEQ ID NO: 1937
  CDS (1)..(2766)

SEQ ID NO: 60803 - protein, 921 aa, Bradyrhizobium japonicum; identical to SEQ ID NO: 1938

SEQ ID NO: 60804 - DNA, 2517 bp, Bradyrhizobium japonicum; identical to SEQ ID NO: 1939
  CDS (1)..(2517)

SEQ ID NO: 60805 - protein, 838 aa, Bradyrhizobium japonicum; identical to SEQ ID NO: 1940

SEQ ID NO: 60806 - DNA, 2181 bp, Vibrio vulnificus; identical to SEQ ID NO: 1941
  CDS (1)..(2181)

SEQ ID NO: 60807 - protein, 726 aa, Vibrio vulnificus; identical to SEQ ID NO: 1942

SEQ ID NO: 60808 - DNA, 2109 bp, Vibrio vulnificus; identical to SEQ ID NO: 1943
  CDS (1)..(2109)

SEQ ID NO: 60809 - protein, 702 aa, Vibrio vulnificus; identical to SEQ ID NO: 1944

SEQ ID NO: 60810 - DNA, 2163 bp, Shewanella oneidensis; identical to SEQ ID NO: 1945
  CDS (1)..(2163)

SEQ ID NO: 60811 - protein, 720 aa, Shewanella oneidensis; identical to SEQ ID NO: 1946

SEQ ID NO: 60812 - DNA, 1419 bp, Oceanobacillus iheyensis; identical to SEQ ID NO: 1947
  CDS (1)..(1419)

SEQ ID NO: 60813 - protein, 472 aa, Oceanobacillus iheyensis; identical to SEQ ID NO: 1948

SEQ ID NO: 60814 - DNA, 2154 bp, Escherichia coli O6; identical to SEQ ID NO: 1949
  CDS (1)..(2154)

SEQ ID NO: 60815 - protein, 717 aa, Escherichia coli O6; identical to SEQ ID NO: 1950

SEQ ID NO: 60816 - DNA, 2271 bp, Escherichia coli O6; identical to SEQ ID NO: 1951
  CDS (1)..(2271)

SEQ ID NO: 60817 - protein, 756 aa, Escherichia coli O6; identical to SEQ ID NO: 1952

SEQ ID NO: 60818 - DNA, 2370 bp, Escherichia coli O6; identical to SEQ ID NO: 1953
  CDS (1)..(2370)

SEQ ID NO: 60819 - protein, 789 aa, Escherichia coli O6; identical to SEQ ID NO: 1954

SEQ ID NO: 60820 - DNA, 2136 bp, Escherichia coli O6; identical to SEQ ID NO: 1955
  CDS (1)..(2136)

SEQ ID NO: 60821 - protein, 711 aa, Escherichia coli O6; identical to SEQ ID NO: 1956

SEQ ID NO: 60822 - DNA, 2208 bp, Escherichia coli O6; identical to SEQ ID NO: 1957
  CDS (1)..(2208)

SEQ ID NO: 60823 - protein, 735 aa, Escherichia coli O6; identical to SEQ ID NO: 1958

SEQ ID NO: 60824 - DNA, 2142 bp, Escherichia coli O6; identical to SEQ ID NO: 1959
  CDS (1)..(2142)

SEQ ID NO: 60825 - protein, 713 aa, Escherichia coli O6; identical to SEQ ID NO: 1960

SEQ ID NO: 60826 - DNA, 1488 bp, Thermoanaerobacter tengcongensis; identical to SEQ ID NO: 1961
  CDS (1)..(1488)

SEQ ID NO: 60827 - protein, 495 aa, Thermoanaerobacter tengcongensis; identical to SEQ ID NO: 1962

SEQ ID NO: 60828 - DNA, 1419 bp, Thermoanaerobacter tengcongensis; identical to SEQ ID NO: 1963
  CDS (1)..(1419)

SEQ ID NO: 60829 - protein, 472 aa, Thermoanaerobacter tengcongensis; identical to SEQ ID NO: 1964

SEQ ID NO: 60830 - DNA, 2352 bp, Fusobacterium nucleatum; identical to SEQ ID NO: 1965
  CDS (1)..(2352)

SEQ ID NO: 60831 - protein, 783 aa, Fusobacterium nucleatum; identical to SEQ ID NO: 1966

SEQ ID NO: 60832 - DNA, 1431 bp, Clostridium perfringens; identical to SEQ ID NO: 1967
  CDS (1)..(1431)

SEQ ID NO: 60833 - protein, 476 aa, Clostridium perfringens; identical to SEQ ID NO: 1968

SEQ ID NO: 60834 - DNA, 1455 bp, Clostridium perfringens; identical to SEQ ID NO: 1969
  CDS (1)..(1455)

SEQ ID NO: 60835 - protein, 484 aa, Clostridium perfringens; identical to SEQ ID NO: 1970

SEQ ID NO: 60836 - DNA, 2280 bp, Ralstonia solanacearum; identical to SEQ ID NO: 1971
  CDS (1)..(2280)

SEQ ID NO: 60837 - protein, 759 aa, Ralstonia solanacearum; identical to SEQ ID NO: 1972

SEQ ID NO: 60838 - DNA, 2271 bp, Salmonella typhimurium; identical to SEQ ID NO: 1973
  CDS (1)..(2271)

SEQ ID NO: 60839 - protein, 756 aa, Salmonella typhimurium; identical to SEQ ID NO: 1974

SEQ ID NO: 60840 - DNA, 2136 bp, Salmonella typhimurium; identical to SEQ ID NO: 1975
  CDS (1)..(2136)

SEQ ID NO: 60841 - protein, 711 aa, Salmonella typhimurium; identical to SEQ ID NO: 1976

SEQ ID NO: 60842 - DNA, 2199 bp, Salmonella typhimurium; identical to SEQ ID NO: 1977
  CDS (1)..(2199)

SEQ ID NO: 60843 - protein, 732 aa, Salmonella typhimurium; identical to SEQ ID NO: 1978

SEQ ID NO: 60844 - DNA, 2142 bp, Salmonella typhimurium; identical to SEQ ID NO: 1979
  CDS (1)..(2142)

SEQ ID NO: 60845 - protein, 713 aa, Salmonella typhimurium; identical to SEQ ID NO: 1980

SEQ ID NO: 60846 - DNA, 2136 bp, Vibrio vulnificus; identical to SEQ ID NO: 1981
  CDS (1)..(2136)

SEQ ID NO: 60847 - protein, 711 aa, Vibrio vulnificus; identical to SEQ ID NO: 1982

SEQ ID NO: 60848 - DNA, 2163 bp, Pasteurella multocida; identical to SEQ ID NO: 1983
  CDS (1)..(2163)

SEQ ID NO: 60849 - protein, 720 aa, Pasteurella multocida; identical to SEQ ID NO: 1984

SEQ ID NO: 60850 - DNA, 2139 bp, Moritella japonica; identical to SEQ ID NO: 1985
  CDS (1)..(2139)

SEQ ID NO: 60851 - protein, 712 aa, Moritella japonica; identical to SEQ ID NO: 1986

SEQ ID NO: 60852 - DNA, 1479 bp, Streptomyces coelicolor; identical to SEQ ID NO: 1987
  CDS (1)..(1479)

SEQ ID NO: 60853 - protein, 492 aa, Streptomyces coelicolor; identical to SEQ ID NO: 1988

SEQ ID NO: 60854 - DNA, 2130 bp, Eikenella corrodens; identical to SEQ ID NO: 1989
  CDS (1)..(2130)

SEQ ID NO: 60855 - protein, 709 aa, Eikenella corrodens; identical to SEQ ID NO: 1990

SEQ ID NO: 60856 - DNA, 2271 bp, Escherichia coli; identical to SEQ ID NO: 1859
  CDS (4)..(2271)

SEQ ID NO: 60857 - protein, 755 aa, Escherichia coli; identical to SEQ ID NO: 1992

SEQ ID NO: 60858 - DNA, 2196 bp, Lactobacillus sp; identical to SEQ ID NO: 1993
  CDS (1)..(2196)

SEQ ID NO: 60859 - protein, 731 aa, Lactobacillus sp; identical to SEQ ID NO: 1814

SEQ ID NO: 60860 - DNA, 1482 bp, Bacillus anthracis; identical to SEQ ID NO: 1995
  CDS (1)..(1482)

SEQ ID NO: 60861 - protein, 493 aa, Bacillus anthracis; identical to SEQ ID NO: 1996

SEQ ID NO: 60862 - DNA, 1383 bp, Bacillus cereus; identical to SEQ ID NO: 1997
  CDS (1)..(1383)

SEQ ID NO: 60863 - protein, 460 aa, Bacillus cereus; identical to SEQ ID NO: 1998

SEQ ID NO: 60864 - DNA, 20 bp, Artificial sequence
  Primer sequence
atggggcagggttttccacc

SEQ ID NO: 60865 - DNA, 25 bp, Artificial sequence
  Primer sequence
ttacttcaacacataaccgtacaac

SEQ ID NO: 60866 - protein, 642 aa, Artificial sequence; identical to SEQ ID NO: 2902
  Consensus
  Variant (2)..(5): Xaa in position 2 to 5 is any amino acid
  Variant (7)..(58): Xaa in position 7 to 58 is any amino acid
  Variant (60)..(61): Xaa in position 60 to 61 is any amino acid
  Variant (63)..(66): Xaa in position 63 to 66 is any amino acid
  Variant (68)..(71): Xaa in position 68 to 71 is any amino acid
  Variant (73)..(76): Xaa in position 73 to 76 is any amino acid
  Variant (78)..(90): Xaa in position 78 to 90 is any amino acid
  Variant (92)..(92): Xaa in position 92 is any amino acid
  Variant (94)..(113): Xaa in position 94 to 113 is any amino acid
  Variant (116)..(116): Xaa in position 116 is any amino acid
  Variant (120)..(131): Xaa in position 120 to 131 is any amino acid
  Variant (133)..(188): Xaa in position 133 to 188 is any amino acid
  Variant (191)..(191): Xaa in position 191 is any amino acid
  Variant (193)..(215): Xaa in position 193 to 215 is any amino acid
  Variant (217)..(217): Xaa in position 217 is any amino acid
  Variant (219)..(224): Xaa in position 219 to 224 is any amino acid
  Variant (226)..(290): Xaa in position 226 to 290 is any amino acid
  Variant (292)..(292): Xaa in position 292 is any amino acid
  Variant (295)..(300): Xaa in position 295 to 300 is any amino acid
  Variant (302)..(302): Xaa in position 302 is any amino acid
  Variant (304)..(305): Xaa in position 304 to 305 is any amino acid
  Variant (307)..(333): Xaa in position 307 to 333 is any amino acid
  Variant (337)..(337): Xaa in position 337 is any amino acid
  Variant (339)..(341): Xaa in position 339 to 341 is any amino acid
  Variant (343)..(355): Xaa in position 343 to 355 is any amino acid
  Variant (357)..(370): Xaa in position 357 to 370 is any amino acid
  Variant (372)..(457): Xaa in position 372 to 457 is any amino acid
  Variant (460)..(460): Xaa in position 460 is any amino acid
  Variant (462)..(494): Xaa in position 462 to 494 is any amino acid
  Variant (496)..(497): Xaa in position 496 to 497 is any amino acid
  Variant (499)..(505): Xaa in position 499 to 505 is any amino acid
  Variant (507)..(520): Xaa in position 507 to 520 is any amino acid
  Variant (522)..(524): Xaa in position 522 to 524 is any amino acid
  Variant (526)..(620): Xaa in position 526 to 620 is any amino acid
  Variant (622)..(624): Xaa in position 622 to 624 is any amino acid
  Variant (626)..(630): Xaa in position 626 to 630 is any amino acid
  Variant (635)..(640): Xaa in position 635 to 640 is any amino acid

SEQ ID NO: 60867 - protein, 101 aa, Artificial sequence; identical to SEQ ID NO: 1322
  Consensus
  Variant (2)..(23): Xaa in position 2 to 23 is any amino acid
  Variant (24)..(30): Xaa in position 24 to 30 is any or no amino acid
  Variant (32)..(32): Xaa in position 32 is any amino acid
  Variant (37)..(39): Xaa in position 37 to 39 is any amino acid
  Variant (41)..(55): Xaa in position 41 to 55 is any amino acid
  Variant (56)..(57): Xaa in position 56 to 57 is any or no amino acid
  Variant (59)..(62): Xaa in position 59 to 62 is any amino acid
  Variant (64)..(64): Xaa in position 64 is any amino acid
  Variant (67)..(70): Xaa in position 67 to 70 is any amino acid
  Variant (72)..(72): Xaa in position 72 is any amino acid
  Variant (75)..(77): Xaa in position 75 to 77 is any amino acid
  Variant (79)..(85): Xaa in position 79 to 85 is any amino acid
  Variant (87)..(90): Xaa in position 87 to 90 is any amino acid
  Variant (92)..(93): Xaa in position 92 to 93 is any amino acid
  Variant (97)..(97): Xaa in position 97 is any amino acid
  Variant (100)..(100): Xaa in position 100 is any amino acid

SEQ ID NO: 60868 - protein, 76 aa, Artificial sequence; identical to SEQ ID NO: 2897
  Consensus
  Variant (1)..(1): Xaa in position 1 is Leu, Met or Val
  Variant (2)..(2): Xaa in position 2 is Gly or Asp
  Variant (3)..(3): Xaa in position 3 is Asp, Ser, Asn, Gln or Gly
  Variant (4)..(4): Xaa in position 4 is Leu or Arg
  Variant (5)..(6): Xaa in position 5 to 6 is any amino acid
  Variant (7)..(7): Xaa in position 7 is His or Pro
  Variant (8)..(8): Xaa in position 8 is any amino acid
  Variant (9)..(9): Xaa in position 9 is Gly, Ser, Glu or Asp
  Variant (10)..(13): Xaa in position 10 to 13 is any amino acid
  Variant (14)..(14): Xaa in position 14 is Ala or Ser
  Variant (15)..(15): Xaa in position 15 is Gln, Glu or Met
  Variant (16)..(18): Xaa in position 16 to 18 is any amino acid
  Variant (19)..(19): Xaa in position 19 is Ala or Ser
  Variant (20)..(21): Xaa in position 20 to 21 is any amino acid
  Variant (22)..(22): Xaa in position 22 is Phe, Tyr, Trp or Val
  Variant (23)..(23): Xaa in position 23 is any amino acid
  Variant (24)..(24): Xaa in position 24 is Ala, Ser or Val
  Variant (25)..(27): Xaa in position 25 to 27 is any amino acid
  Variant (28)..(28): Xaa in position 28 is Tyr, Phe or Trp
  Variant (29)..(30): Xaa in position 29 to 30 is any amino acid
  Variant (31)..(31): Xaa in position 31 is Val, Thr, Leu or Ile
  Variant (32)..(32): Xaa in position 32 is any amino acid
  Variant (34)..(34): Xaa in position 34 is Thr or Ser
  Variant (35)..(35): Xaa in position 35 is Ser or Thr
  Variant (36)..(36): Xaa in position 36 is any amino acid
  Variant (37)..(37): Xaa in position 37 is Ser, Ala or Gly
  Variant (38)..(38): Xaa in position 38 is Asn, Ile, Val or Ser
  Variant (39)..(51): Xaa in position 39 to 51 is any amino acid
  Variant (52)..(52): Xaa in position 52 is Val, Ile, Leu or Ala
  Variant (53)..(53): Xaa in position 53 is Leu, Ile, Val or Met
  Variant (54)..(55): Xaa in position 54 to 55 is any amino acid
  Variant (57)..(57): Xaa in position 57 is Asn or Asp
  Variant (58)..(58): Xaa in position 58 is any amino acid
  Variant (60)..(60): Xaa in position 60 is Lys, Gln or Arg
  Variant (61)..(61): Xaa in position 61 is Ser or Ala
  Variant (62)..(65): Xaa in position 62 to 65 is any amino acid
  Variant (66)..(66): Xaa in position 66 is any or no amino acid
  Variant (67)..(67): Xaa in position 67 is Leu, Ile, Met or Val
  Variant (68)..(73): Xaa in position 68 to 73 is any amino acid
  Variant (74)..(74): Xaa in position 74 is Pro or Ala
  Variant (75)..(75): Xaa in position 75 is any amino acid
  Variant (76)..(76): Xaa in position 76 is Tyr, Phe or Trp

SEQ ID NO: 60869 - protein, 39 aa, Artificial sequence; identical to SEQ ID NO: 2898
  Consensus
  Variant (1)..(1): Xaa in position 1 is Val, Ile, Leu, Phe or Thr
  Variant (2)..(2): Xaa in position 2 is Ile, Val, Leu, Phe or Ala
  Variant (3)..(5): Xaa in position 3 to 5 is any amino acid
  Variant (6)..(6): Xaa in position 6 is Thr, Asn or Ser
  Variant (7)..(7): Xaa in position 7 is Tyr, Phe or Pro
  Variant (8)..(8): Xaa in position 8 is Asp, Tyr, Phe or His
  Variant (10)..(12): Xaa in position 10 to 12 is any amino acid
  Variant (13)..(13): Xaa in position 13 is Asn, Asp or Ser
  Variant (14)..(25): Xaa in position 14 to 25 is any amino acid
  Variant (26)..(29): Xaa in position 26 to 29 is any or no amino acid
  Variant (30)..(30): Xaa in position 30 is Ile, Val, Leu or Phe
  Variant (31)..(31): Xaa in position 31 is any amino acid
  Variant (32)..(32): Xaa in position 32 is Phe, Val, Trp or Ile
  Variant (34)..(34): Xaa in position 34 is Glu, Ser or Cys
  Variant (36)..(36): Xaa in position 36 is Trp or His
  Variant (37)..(37): Xaa in position 37 is any amino acid
  Variant (38)..(38): Xaa in position 38 is Ala, Gly, Pro or Val
  Variant (39)..(39): Xaa in position 39 is Tyr, His or Phe

SEQ ID NO: 60870 - protein, 84 aa, Artificial sequence; identical to SEQ ID NO: 2899
  Consensus
  Variant (1)..(1): Xaa in position 1 is Ser or Leu
  Variant (2)..(2): Xaa in position 2 is any amino acid
  Variant (5)..(7): Xaa in position 5 to 7 is any amino acid
  Variant (8)..(8): Xaa in position 8 is Ala, Gly or Ser
  Variant (9)..(9): Xaa in position 9 is Leu, Phe, Met or Ile
  Variant (10)..(10): Xaa in position 10 is Ser, Thr, Arg or Glu
  Variant (11)..(11): Xaa in position 11 is Gln or Met
  Variant (12)..(12): Xaa in position 12 is any amino acid
  Variant (13)..(13): Xaa in position 13 is Ser or Ala
  Variant (14)..(14): Xaa in position 14 is any amino acid
  Variant (15)..(15): Xaa in position 15 is Ile, Leu, Met, Val or Phe
  Variant (16)..(16): Xaa in position 16 is His, Asn, Leu or Ile
  Variant (17)..(25): Xaa in position 17 to 25 is any amino acid
  Variant (26)..(33): Xaa in position 26 to 33 is any or no amino acid
  Variant (34)..(34): Xaa in position 34 is Phe, Val, Leu, Met or Ile
  Variant (35)..(42): Xaa in position 35 to 42 is any amino acid
  Variant (43)..(43): Xaa in position 43 is Ser or Thr
  Variant (44)..(44): Xaa in position 44 is Thr or Ser
  Variant (46)..(47): Xaa in position 46 to 47 is any amino acid
  Variant (48)..(48): Xaa in position 48 is Tyr, Gln or Val
  Variant (49)..(49): Xaa in position 49 is any amino acid
  Variant (50)..(50): Xaa in position 50 is Leu, Ile, Phe or Met
  Variant (51)..(51): Xaa in position 51 is any amino acid
  Variant (52)..(52): Xaa in position 52 is Ala or Ser
  Variant (53)..(53): Xaa in position 53 is Ser, Ala or Thr
  Variant (54)..(54): Xaa in position 54 is any amino acid
  Variant (55)..(55): Xaa in position 55 is Asp or Glu
  Variant (56)..(63): Xaa in position 56 to 63 is any amino acid
  Variant (64)..(65): Xaa in position 64 to 65 is any or no amino acid
  Variant (66)..(66): Xaa in position 66 is Gly, Ala, Lys or Asn
  Variant (67)..(73): Xaa in position 67 to 73 is any amino acid
  Variant (74)..(74): Xaa in position 74 is Ile, Val, Leu, Tyr or Phe
  Variant (75)..(80): Xaa in position 75 to 80 is any amino acid
  Variant (81)..(81): Xaa in position 81 is Arg or Lys
  Variant (82)..(83): Xaa in position 82 to 83 is any amino acid
  Variant (84)..(84): Xaa in position 84 is Ile, Leu, Val, Met, Phe, Ala or Thr

SEQ ID NO: 60871 - protein, 31 aa, Artificial sequence; identical to SEQ ID NO: 2900
  Consensus
  Variant (1)..(1): Xaa in position 1 is Val, Ile, Leu, Cys or Arg
  Variant (2)..(5): Xaa in position 2 to 5 is any amino acid
  Variant (6)..(9): Xaa in position 6 to 9 is any or no amino acid
  Variant (10)..(10): Xaa in position 10 is Gly, Thr, Asp or Asn
  Variant (11)..(11): Xaa in position 11 is any amino acid
  Variant (12)..(12): Xaa in position 12 is Ile, Val or Thr
  Variant (13)..(13): Xaa in position 13 is any amino acid
  Variant (14)..(14): Xaa in position 14 is Ala, Gly, Thr or Leu
  Variant (15)..(16): Xaa in position 15 to 16 is any amino acid
  Variant (17)..(17): Xaa in position 17 is Val, Ile, Ala, Leu or Phe
  Variant (18)..(19): Xaa in position 18 to 19 is any amino acid
  Variant (24)..(24): Xaa in position 24 is Ile, Val or Phe
  Variant (25)..(26): Xaa in position 25 to 26 is any amino acid
  Variant (27)..(27): Xaa in position 27 is Val, Leu, Ile, Phe or Met
  Variant (28)..(29): Xaa in position 28 to 29 is any amino acid
  Variant (31)..(31): Xaa in position 31 is Glu or Gln

SEQ ID NO: 60872 - DNA, 1182 bp, Escherichia coli; identical to SEQ ID NO: 40261
  CDS (1)..(1182)

SEQ ID NO: 60873 - protein, 393 aa, Escherichia coli; identical to SEQ ID NO: 40262

SEQ ID NO: 60874 - DNA, 996 bp, Mesorhizobium loti MAFF303099; identical to SEQ ID NO: 40263
  CDS (1)..(996): transl_table=11

SEQ ID NO: 60875 - protein, 331 aa, Mesorhizobium loti MAFF303099; identical to SEQ ID NO: 40264

SEQ ID NO: 60876 - DNA, 987 bp, Mesorhizobium loti MAFF303099; identical to SEQ ID NO: 40265
  CDS (1)..(987): transl_table=11

SEQ ID NO: 60877 - protein, 328 aa, Mesorhizobium loti MAFF303099; identical to SEQ ID NO: 40266

SEQ ID NO: 60878 - DNA, 1017 bp, Mesorhizobium loti MAFF303099; identical to SEQ ID NO: 40267
  CDS (1)..(1017): transl_table=11

SEQ ID NO: 60879 - protein, 338 aa, Mesorhizobium loti MAFF303099; identical to SEQ ID NO: 40268

SEQ ID NO: 60880 - DNA, 1098 bp, Mesorhizobium loti MAFF303099; identical to SEQ ID NO: 40269
  CDS (1)..(1098): transl_table=11

SEQ ID NO: 60881 - protein, 365 aa, Mesorhizobium loti MAFF303099; identical to SEQ ID NO: 40270

SEQ ID NO: 60882 - DNA, 969 bp, Mesorhizobium loti MAFF303099; identical to SEQ ID NO: 40271
  CDS (1)..(969): transl_table=11

SEQ ID NO: 60883 - protein, 322 aa, Mesorhizobium loti MAFF303099; identical to SEQ ID NO: 40272

SEQ ID NO: 60884 - DNA, 993 bp, Mesorhizobium loti MAFF303099; identical to SEQ ID NO: 40273
  CDS (1)..(993): transl_table=11

SEQ ID NO: 60885 - protein, 330 aa, Mesorhizobium loti MAFF303099; identical to SEQ ID NO: 40274

SEQ ID NO: 60886 - DNA, 1332 bp, Mesorhizobium loti MAFF303099; identical to SEQ ID NO: 40275
  CDS (1)..(1332): transl_table=11

SEQ ID NO: 60887 - protein, 443 aa, Mesorhizobium loti MAFF303099; identical to SEQ ID NO: 40276

SEQ ID NO: 60888 - DNA, 1287 bp, Mesorhizobium loti MAFF303099; identical to SEQ ID NO: 40277
  CDS (1)..(1287): transl_table=11

SEQ ID NO: 60889 - protein, 428 aa, Mesorhizobium loti MAFF303099; identical to SEQ ID NO: 40278

SEQ ID NO: 60890 - DNA, 996 bp, Mesorhizobium loti MAFF303099; identical to SEQ ID NO: 40279
  CDS (1)..(996): transl_table=11

SEQ ID NO: 60891 - protein, 331 aa, Mesorhizobium loti MAFF303099; identical to SEQ ID NO: 40280

SEQ ID NO: 60892 - DNA, 978 bp, Mesorhizobium loti MAFF303099; identical to SEQ ID NO: 40281
  CDS (1)..(978): transl_table=11

SEQ ID NO: 60893 - protein, 325 aa, Mesorhizobium loti MAFF303099; identical to SEQ ID NO: 40282

SEQ ID NO: 60894 - DNA, 999 bp, Mesorhizobium loti MAFF303099; identical to SEQ ID NO: 40283
  CDS (1)..(999): transl_table=11

SEQ ID NO: 60895 - protein, 332 aa, Mesorhizobium loti MAFF303099; identical to SEQ ID NO: 40284

SEQ ID NO: 60896 - DNA, 1002 bp, Mesorhizobium loti MAFF303099; identical to SEQ ID NO: 40285
  CDS (1)..(1002): transl_table=11

SEQ ID NO: 60897 - protein, 333 aa, Mesorhizobium loti MAFF303099; identical to SEQ ID NO: 40286

SEQ ID NO: 60898 - DNA, 1029 bp, Mesorhizobium loti MAFF303099; identical to SEQ ID NO: 40287
  CDS (1)..(1029): transl_table=11

SEQ ID NO: 60899 - protein, 342 aa, Mesorhizobium loti MAFF303099; identical to SEQ ID NO: 40288

SEQ ID NO: 60900 - DNA, 1062 bp, Mesorhizobium loti MAFF303099; identical to SEQ ID NO: 40289
  CDS (1)..(1062): transl_table=11

SEQ ID NO: 60901 - protein, 353 aa, Mesorhizobium loti MAFF303099; identical to SEQ ID NO: 40290

SEQ ID NO: 60902 - DNA, 975 bp, Mesorhizobium loti MAFF303099; identical to SEQ ID NO: 40291
  CDS (1)..(975): transl_table=11

SEQ ID NO: 60903 - protein, 324 aa, Mesorhizobium loti MAFF303099; identical to SEQ ID NO: 40292

SEQ ID NO: 60904 - DNA, 954 bp, Thermotoga maritima MSB8; identical to SEQ ID NO: 40293
  CDS (1)..(954): transl_table=11

SEQ ID NO: 60905 - protein, 317 aa, Thermotoga maritima MSB8; identical to SEQ ID NO: 40294

SEQ ID NO: 60906 - DNA, 996 bp, Thermotoga maritima MSB8; identical to SEQ ID NO: 40295
  CDS (1)..(996): transl_table=11

SEQ ID NO: 60907 - protein, 331 aa, Thermotoga maritima MSB8; identical to SEQ ID NO: 40296

SEQ ID NO: 60908 - DNA, 1014 bp, Vibrio cholerae O1 biovar eltor str. N16961; identical to SEQ ID NO: 40297
  CDS (1)..(1014): transl_table=11

SEQ ID NO: 60909 - protein, 337 aa, Vibrio cholerae O1 biovar eltor str. N16961; identical to SEQ ID NO: 40298

SEQ ID NO: 60910 - DNA, 999 bp, Vibrio cholerae O1 biovar eltor str. N16961; identical to SEQ ID NO: 40299
  CDS (1)..(999): transl_table=11

SEQ ID NO: 60911 - protein, 332 aa, Vibrio cholerae O1 biovar eltor str. N16961; identical to SEQ ID NO: 40300

SEQ ID NO: 60912 - DNA, 1167 bp, Bacillus halodurans C-125; identical to SEQ ID NO: 40301
  CDS (1)..(1167): transl_table=11

SEQ ID NO: 60913 - protein, 388 aa, Bacillus halodurans C-125; identical to SEQ ID NO: 40302

SEQ ID NO: 60914 - DNA, 945 bp, Bacillus halodurans C-125; identical to SEQ ID NO: 40303
  CDS (1)..(945): transl_table=11

SEQ ID NO: 60915 - protein, 314 aa, Bacillus halodurans C-125; identical to SEQ ID NO: 40304

SEQ ID NO: 60916 - DNA, 969 bp, Pasteurella multocida subsp. multocida str. Pm70; identical to SEQ ID NO: 40305
  CDS (1)..(969): transl_table=11

SEQ ID NO: 60917 - protein, 322 aa, Pasteurella multocida subsp. multocida str. Pm70; identical to SEQ ID NO: 40306

SEQ ID NO: 60918 - DNA, 1011 bp, Pasteurella multocida subsp. multocida str. Pm70; identical to SEQ ID NO: 40307
  CDS (1)..(1011): transl_table=11

SEQ ID NO: 60919 - protein, 336 aa, Pasteurella multocida subsp. multocida str. Pm70; identical to SEQ ID NO: 40308

SEQ ID NO: 60920 - DNA, 993 bp, Pasteurella multocida subsp. multocida str. Pm70; identical to SEQ ID NO: 40309
  CDS (1)..(993): transl_table=11

SEQ ID NO: 60921 - protein, 330 aa, Pasteurella multocida subsp. multocida str. Pm70; identical to SEQ ID NO: 40310

SEQ ID NO: 60922 - DNA, 1044 bp, Pasteurella multocida subsp. multocida str. Pm70; identical to SEQ ID NO: 40311
  CDS (1)..(1044): transl_table=11

SEQ ID NO: 60923 - protein, 347 aa, Pasteurella multocida subsp. multocida str. Pm70; identical to SEQ ID NO: 40312

SEQ ID NO: 60924 - DNA, 972 bp, Pasteurella multocida subsp. multocida str. Pm70; identical to SEQ ID NO: 40313
  CDS (1)..(972): transl_table=11

SEQ ID NO: 60925 - protein, 323 aa, Pasteurella multocida subsp. multocida str. Pm70; identical to SEQ ID NO: 40314

SEQ ID NO: 60926 - DNA, 999 bp, Pseudomonas aeruginosa PAO1; identical to SEQ ID NO: 40315
  CDS (1)..(999): transl_table=11

SEQ ID NO: 60927 - protein, 332 aa, Pseudomonas aeruginosa PAO1; identical to SEQ ID NO: 40316

SEQ ID NO: 60928 - DNA, 942 bp, Lactococcus lactis subsp. lactis Il1403; identical to SEQ ID NO: 40317
  CDS (1)..(942): transl_table=11

SEQ ID NO: 60929 - protein, 313 aa, Lactococcus lactis subsp. lactis Il1403; identical to SEQ ID NO: 40318

SEQ ID NO: 60930 - DNA, 1011 bp, Escherichia coli O157:H7 EDL933; identical to SEQ ID NO: 40319
  CDS (1)..(1011): transl_table=11

SEQ ID NO: 60931 - protein, 336 aa, Escherichia coli O157:H7 EDL933; identical to SEQ ID NO: 40320
  misc_feature (300)..(300): Xaa can be any naturally occuring amino acid

SEQ ID NO: 60932 - DNA, 966 bp, Escherichia coli O157:H7 EDL933; identical to SEQ ID NO: 40321
  CDS (1)..(966): transl_table=11

SEQ ID NO: 60933 - protein, 321 aa, Escherichia coli O157:H7 EDL933; identical to SEQ ID NO: 40322
  misc_feature (201)..(201): Xaa can be any naturally occuring amino acid

SEQ ID NO: 60934 - DNA, 1809 bp, Mycobacterium leprae TN; identical to SEQ ID NO: 40323
  CDS (1)..(1809): transl_table=11

SEQ ID NO: 60935 - protein, 602 aa, Mycobacterium leprae TN; identical to SEQ ID NO: 40324

SEQ ID NO: 60936 - DNA, 1029 bp, Escherichia coli O157:H7; identical to SEQ ID NO: 40325
  CDS (1)..(1029): transl_table=11

SEQ ID NO: 60937 - protein, 342 aa, Escherichia coli O157:H7; identical to SEQ ID NO: 40326

SEQ ID NO: 60938 - DNA, 1011 bp, Escherichia coli O157:H7; identical to SEQ ID NO: 40327
  CDS (1)..(1011): transl_table=11

SEQ ID NO: 60939 - protein, 336 aa, Escherichia coli O157:H7; identical to SEQ ID NO: 40328

SEQ ID NO: 60940 - DNA, 999 bp, Escherichia coli O157:H7; identical to SEQ ID NO: 40329
  CDS (1)..(999): transl_table=11

SEQ ID NO: 60941 - protein, 332 aa, Escherichia coli O157:H7; identical to SEQ ID NO: 40330

SEQ ID NO: 60942 - DNA, 975 bp, Escherichia coli O157:H7; identical to SEQ ID NO: 40331
  CDS (1)..(975): transl_table=11

SEQ ID NO: 60943 - protein, 324 aa, Escherichia coli O157:H7; identical to SEQ ID NO: 40332

SEQ ID NO: 60944 - DNA, 1917 bp, Mycoplasma pulmonis UAB CTIP; identical to SEQ ID NO: 40333
  CDS (1)..(1917): transl_table=4

SEQ ID NO: 60945 - protein, 638 aa, Mycoplasma pulmonis UAB CTIP; identical to SEQ ID NO: 40334

SEQ ID NO: 60946 - DNA, 1035 bp, Agrobacterium tumefaciens str. C58; identical to SEQ ID NO: 40335
  CDS (1)..(1035): transl_table=11

SEQ ID NO: 60947 - protein, 344 aa, Agrobacterium tumefaciens str. C58; identical to SEQ ID NO: 40336

SEQ ID NO: 60948 - DNA, 1377 bp, Agrobacterium tumefaciens str. C58; identical to SEQ ID NO: 40337
  CDS (1)..(1377): transl_table=11

SEQ ID NO: 60949 - protein, 458 aa, Agrobacterium tumefaciens str. C58; identical to SEQ ID NO: 40338

SEQ ID NO: 60950 - DNA, 975 bp, Sinorhizobium meliloti 1021; identical to SEQ ID NO: 40339
  CDS (1)..(975): transl_table=11

SEQ ID NO: 60951 - protein, 324 aa, Sinorhizobium meliloti 1021; identical to SEQ ID NO: 40340

SEQ ID NO: 60952 - DNA, 1083 bp, Sinorhizobium meliloti 1021; identical to SEQ ID NO: 40341
  CDS (1)..(1083): transl_table=11

SEQ ID NO: 60953 - protein, 360 aa, Sinorhizobium meliloti 1021; identical to SEQ ID NO: 40342

SEQ ID NO: 60954 - DNA, 1005 bp, Sinorhizobium meliloti 1021; identical to SEQ ID NO: 40343
  CDS (1)..(1005): transl_table=11

SEQ ID NO: 60955 - protein, 334 aa, Sinorhizobium meliloti 1021; identical to SEQ ID NO: 40344

SEQ ID NO: 60956 - DNA, 1050 bp, Sinorhizobium meliloti 1021; identical to SEQ ID NO: 40345
  CDS (1)..(1050): transl_table=11

SEQ ID NO: 60957 - protein, 349 aa, Sinorhizobium meliloti 1021; identical to SEQ ID NO: 40346

SEQ ID NO: 60958 - DNA, 1008 bp, Sinorhizobium meliloti 1021; identical to SEQ ID NO: 40347
  CDS (1)..(1008): transl_table=11

SEQ ID NO: 60959 - protein, 335 aa, Sinorhizobium meliloti 1021; identical to SEQ ID NO: 40348

SEQ ID NO: 60960 - DNA, 1050 bp, Yersinia pestis CO92; identical to SEQ ID NO: 40349
  CDS (1)..(1050): transl_table=11

SEQ ID NO: 60961 - protein, 349 aa, Yersinia pestis CO92; identical to SEQ ID NO: 40350

SEQ ID NO: 60962 - DNA, 999 bp, Caulobacter crescentus CB15; identical to SEQ ID NO: 40351
  CDS (1)..(999): transl_table=11

SEQ ID NO: 60963 - protein, 332 aa, Caulobacter crescentus CB15; identical to SEQ ID NO: 40352

SEQ ID NO: 60964 - DNA, 996 bp, Sinorhizobium meliloti 1021; identical to SEQ ID NO: 40353
  CDS (1)..(996): transl_table=11

SEQ ID NO: 60965 - protein, 331 aa, Sinorhizobium meliloti 1021; identical to SEQ ID NO: 40354

SEQ ID NO: 60966 - DNA, 1065 bp, Sinorhizobium meliloti 1021; identical to SEQ ID NO: 40355
  CDS (1)..(1065): transl_table=11

SEQ ID NO: 60967 - protein, 354 aa, Sinorhizobium meliloti 1021; identical to SEQ ID NO: 40356

SEQ ID NO: 60968 - DNA, 954 bp, Sinorhizobium meliloti 1021; identical to SEQ ID NO: 40357
  CDS (1)..(954): transl_table=11

SEQ ID NO: 60969 - protein, 317 aa, Sinorhizobium meliloti 1021; identical to SEQ ID NO: 40358

SEQ ID NO: 60970 - DNA, 1032 bp, Sinorhizobium meliloti 1021; identical to SEQ ID NO: 40359
  CDS (1)..(1032): transl_table=11

SEQ ID NO: 60971 - protein, 343 aa, Sinorhizobium meliloti 1021; identical to SEQ ID NO: 40360

SEQ ID NO: 60972 - DNA, 963 bp, Sinorhizobium meliloti 1021; identical to SEQ ID NO: 40361
  CDS (1)..(963): transl_table=11

SEQ ID NO: 60973 - protein, 320 aa, Sinorhizobium meliloti 1021; identical to SEQ ID NO: 40362

SEQ ID NO: 60974 - DNA, 999 bp, Sinorhizobium meliloti 1021; identical to SEQ ID NO: 40363
  CDS (1)..(999): transl_table=11

SEQ ID NO: 60975 - protein, 332 aa, Sinorhizobium meliloti 1021; identical to SEQ ID NO: 40364

SEQ ID NO: 60976 - DNA, 996 bp, Sinorhizobium meliloti 1021; identical to SEQ ID NO: 40365
  CDS (1)..(996): transl_table=11

SEQ ID NO: 60977 - protein, 331 aa, Sinorhizobium meliloti 1021; identical to SEQ ID NO: 40366

SEQ ID NO: 60978 - DNA, 1215 bp, Sinorhizobium meliloti 1021; identical to SEQ ID NO: 40367
  CDS (1)..(1215): transl_table=11

SEQ ID NO: 60979 - protein, 404 aa, Sinorhizobium meliloti 1021; identical to SEQ ID NO: 40368

SEQ ID NO: 60980 - DNA, 1362 bp, Sinorhizobium meliloti 1021; identical to SEQ ID NO: 40369
  CDS (1)..(1362): transl_table=11

SEQ ID NO: 60981 - protein, 453 aa, Sinorhizobium meliloti 1021; identical to SEQ ID NO: 40370

SEQ ID NO: 60982 - DNA, 1323 bp, Sinorhizobium meliloti 1021; identical to SEQ ID NO: 40371
  CDS (1)..(1323): transl_table=11

SEQ ID NO: 60983 - protein, 440 aa, Sinorhizobium meliloti 1021; identical to SEQ ID NO: 40372

SEQ ID NO: 60984 - DNA, 1026 bp, Sinorhizobium meliloti 1021; identical to SEQ ID NO: 40373
  CDS (1)..(1026): transl_table=11

SEQ ID NO: 60985 - protein, 341 aa, Sinorhizobium meliloti 1021; identical to SEQ ID NO: 40374

SEQ ID NO: 60986 - DNA, 957 bp, Sinorhizobium meliloti 1021; identical to SEQ ID NO: 40375
  CDS (1)..(957): transl_table=11

SEQ ID NO: 60987 - protein, 318 aa, Sinorhizobium meliloti 1021; identical to SEQ ID NO: 40376

SEQ ID NO: 60988 - DNA, 966 bp, Salmonella typhimurium LT2; identical to SEQ ID NO: 40377
  CDS (1)..(966): transl_table=11

SEQ ID NO: 60989 - protein, 321 aa, Salmonella typhimurium LT2; identical to SEQ ID NO: 40378

SEQ ID NO: 60990 - DNA, 1047 bp, Ralstonia solanacearum GMI1000; identical to SEQ ID NO: 40379
  CDS (1)..(1047): transl_table=11

SEQ ID NO: 60991 - protein, 348 aa, Ralstonia solanacearum GMI1000; identical to SEQ ID NO: 40380

SEQ ID NO: 60992 - DNA, 1008 bp, Ralstonia solanacearum GMI1000; identical to SEQ ID NO: 40381
  CDS (1)..(1008): transl_table=11

SEQ ID NO: 60993 - protein, 335 aa, Ralstonia solanacearum GMI1000; identical to SEQ ID NO: 40382

SEQ ID NO: 60994 - DNA, 1197 bp, Ralstonia solanacearum GMI1000; identical to SEQ ID NO: 40383
  CDS (1)..(1197): transl_table=11

SEQ ID NO: 60995 - protein, 398 aa, Ralstonia solanacearum GMI1000; identical to SEQ ID NO: 40384

SEQ ID NO: 60996 - DNA, 1107 bp, Agrobacterium tumefaciens str. C58; identical to SEQ ID NO: 40385
  CDS (1)..(1107): transl_table=11

SEQ ID NO: 60997 - protein, 368 aa, Agrobacterium tumefaciens str. C58; identical to SEQ ID NO: 40386

SEQ ID NO: 60998 - DNA, 981 bp, Agrobacterium tumefaciens str. C58; identical to SEQ ID NO: 40387
  CDS (1)..(981): transl_table=11

SEQ ID NO: 60999 - protein, 326 aa, Agrobacterium tumefaciens str. C58; identical to SEQ ID NO: 40388

SEQ ID NO: 61000 - DNA, 1197 bp, Agrobacterium tumefaciens str. C58; identical to SEQ ID NO: 40389
  CDS (1)..(1197): transl_table=11

SEQ ID NO: 61001 - protein, 398 aa, Agrobacterium tumefaciens str. C58; identical to SEQ ID NO: 40390

SEQ ID NO: 61002 - DNA, 1023 bp, Agrobacterium tumefaciens str. C58; identical to SEQ ID NO: 40391
  CDS (1)..(1023): transl_table=11

SEQ ID NO: 61003 - protein, 340 aa, Agrobacterium tumefaciens str. C58; identical to SEQ ID NO: 40392

SEQ ID NO: 61004 - DNA, 1005 bp, Agrobacterium tumefaciens str. C58; identical to SEQ ID NO: 40393
  CDS (1)..(1005): transl_table=11

SEQ ID NO: 61005 - protein, 334 aa, Agrobacterium tumefaciens str. C58; identical to SEQ ID NO: 40394

SEQ ID NO: 61006 - DNA, 981 bp, Agrobacterium tumefaciens str. C58; identical to SEQ ID NO: 40395
  CDS (1)..(981): transl_table=11

SEQ ID NO: 61007 - protein, 326 aa, Agrobacterium tumefaciens str. C58; identical to SEQ ID NO: 40396

SEQ ID NO: 61008 - DNA, 1065 bp, Agrobacterium tumefaciens str. C58; identical to SEQ ID NO: 40397
  CDS (1)..(1065): transl_table=11

SEQ ID NO: 61009 - protein, 354 aa, Agrobacterium tumefaciens str. C58; identical to SEQ ID NO: 40398

SEQ ID NO: 61010 - DNA, 1002 bp, Agrobacterium tumefaciens str. C58; identical to SEQ ID NO: 40399
  CDS (1)..(1002): transl_table=11

SEQ ID NO: 61011 - protein, 333 aa, Agrobacterium tumefaciens str. C58; identical to SEQ ID NO: 40400

SEQ ID NO: 61012 - DNA, 1314 bp, Agrobacterium tumefaciens str. C58; identical to SEQ ID NO: 40401
  CDS (1)..(1314): transl_table=11

SEQ ID NO: 61013 - protein, 437 aa, Agrobacterium tumefaciens str. C58; identical to SEQ ID NO: 40402

SEQ ID NO: 61014 - DNA, 984 bp, Agrobacterium tumefaciens str. C58; identical to SEQ ID NO: 40403
  CDS (1)..(984): transl_table=11

SEQ ID NO: 61015 - protein, 327 aa, Agrobacterium tumefaciens str. C58; identical to SEQ ID NO: 40404

SEQ ID NO: 61016 - DNA, 1164 bp, Brucella melitensis 16M; identical to SEQ ID NO: 40405
  CDS (1)..(1164): transl_table=11

SEQ ID NO: 61017 - protein, 387 aa, Brucella melitensis 16M; identical to SEQ ID NO: 40406

SEQ ID NO: 61018 - DNA, 1170 bp, Brucella melitensis 16M; identical to SEQ ID NO: 40407
  CDS (1)..(1170): transl_table=11

SEQ ID NO: 61019 - protein, 389 aa, Brucella melitensis 16M; identical to SEQ ID NO: 40408

SEQ ID NO: 61020 - DNA, 1191 bp, Brucella melitensis 16M; identical to SEQ ID NO: 40409
  CDS (1)..(1191): transl_table=11

SEQ ID NO: 61021 - protein, 396 aa, Brucella melitensis 16M; identical to SEQ ID NO: 40410

SEQ ID NO: 61022 - DNA, 1197 bp, Brucella melitensis 16M; identical to SEQ ID NO: 40411
  CDS (1)..(1197): transl_table=11

SEQ ID NO: 61023 - protein, 398 aa, Brucella melitensis 16M; identical to SEQ ID NO: 40412

SEQ ID NO: 61024 - DNA, 1029 bp, Clostridium perfringens str. 13; identical to SEQ ID NO: 40413
  CDS (1)..(1029): transl_table=11

SEQ ID NO: 61025 - protein, 342 aa, Clostridium perfringens str. 13; identical to SEQ ID NO: 40414

SEQ ID NO: 61026 - DNA, 936 bp, Clostridium perfringens str. 13; identical to SEQ ID NO: 40415
  CDS (1)..(936): transl_table=11

SEQ ID NO: 61027 - protein, 311 aa, Clostridium perfringens str. 13; identical to SEQ ID NO: 40416

SEQ ID NO: 61028 - DNA, 915 bp, Corynebacterium glutamicum ATCC 13032; identical to SEQ ID NO: 40417
  CDS (1)..(915): transl_table=11

SEQ ID NO: 61029 - protein, 304 aa, Corynebacterium glutamicum ATCC 13032; identical to SEQ ID NO: 40418

SEQ ID NO: 61030 - DNA, 1020 bp, Fusobacterium nucleatum subsp. nucleatum ATCC 25586; identical to SEQ ID NO: 40419
  CDS (1)..(1020): transl_table=11

SEQ ID NO: 61031 - protein, 339 aa, Fusobacterium nucleatum subsp. nucleatum ATCC 25586; identical to SEQ ID NO: 40420

SEQ ID NO: 61032 - DNA, 957 bp, Thermoanaerobacter tengcongensis MB4; identical to SEQ ID NO: 40421
  CDS (1)..(957): transl_table=11

SEQ ID NO: 61033 - protein, 318 aa, Thermoanaerobacter tengcongensis MB4; identical to SEQ ID NO: 40422

SEQ ID NO: 61034 - DNA, 1191 bp, Thermoanaerobacter tengcongensis MB4; identical to SEQ ID NO: 40423
  CDS (1)..(1191): transl_table=11

SEQ ID NO: 61035 - protein, 396 aa, Thermoanaerobacter tengcongensis MB4; identical to SEQ ID NO: 40424

SEQ ID NO: 61036 - DNA, 975 bp, Thermoanaerobacter tengcongensis MB4; identical to SEQ ID NO: 40425
  CDS (1)..(975): transl_table=11

SEQ ID NO: 61037 - protein, 324 aa, Thermoanaerobacter tengcongensis MB4; identical to SEQ ID NO: 40426

SEQ ID NO: 61038 - DNA, 1245 bp, Streptomyces coelicolor A3(2); identical to SEQ ID NO: 40427
  CDS (1)..(1245): transl_table=11

SEQ ID NO: 61039 - protein, 414 aa, Streptomyces coelicolor A3(2); identical to SEQ ID NO: 40428

SEQ ID NO: 61040 - DNA, 1956 bp, Streptomyces coelicolor A3(2); identical to SEQ ID NO: 40429
  CDS (1)..(1956): transl_table=11

SEQ ID NO: 61041 - protein, 651 aa, Streptomyces coelicolor A3(2); identical to SEQ ID NO: 40430

SEQ ID NO: 61042 - DNA, 1293 bp, Streptomyces coelicolor A3(2); identical to SEQ ID NO: 40431
  CDS (1)..(1293): transl_table=11

SEQ ID NO: 61043 - protein, 430 aa, Streptomyces coelicolor A3(2); identical to SEQ ID NO: 40432

SEQ ID NO: 61044 - DNA, 1020 bp, Streptomyces coelicolor A3(2); identical to SEQ ID NO: 40433
  CDS (1)..(1020): transl_table=11

SEQ ID NO: 61045 - protein, 339 aa, Streptomyces coelicolor A3(2); identical to SEQ ID NO: 40434

SEQ ID NO: 61046 - DNA, 1146 bp, Yersinia pestis KIM; identical to SEQ ID NO: 40435
  CDS (1)..(1146): transl_table=11

SEQ ID NO: 61047 - protein, 381 aa, Yersinia pestis KIM; identical to SEQ ID NO: 40436

SEQ ID NO: 61048 - DNA, 1065 bp, Yersinia pestis KIM; identical to SEQ ID NO: 40437
  CDS (1)..(1065): transl_table=11

SEQ ID NO: 61049 - protein, 354 aa, Yersinia pestis KIM; identical to SEQ ID NO: 40438

SEQ ID NO: 61050 - DNA, 996 bp, Yersinia pestis KIM; identical to SEQ ID NO: 40439
  CDS (1)..(996): transl_table=11

SEQ ID NO: 61051 - protein, 331 aa, Yersinia pestis KIM; identical to SEQ ID NO: 40440

SEQ ID NO: 61052 - DNA, 1026 bp, Yersinia pestis KIM; identical to SEQ ID NO: 40441
  CDS (1)..(1026): transl_table=11

SEQ ID NO: 61053 - protein, 341 aa, Yersinia pestis KIM; identical to SEQ ID NO: 40442

SEQ ID NO: 61054 - DNA, 999 bp, Yersinia pestis KIM; identical to SEQ ID NO: 40443
  CDS (1)..(999): transl_table=11

SEQ ID NO: 61055 - protein, 332 aa, Yersinia pestis KIM; identical to SEQ ID NO: 40444

SEQ ID NO: 61056 - DNA, 1011 bp, Yersinia pestis KIM; identical to SEQ ID NO: 40445
  CDS (1)..(1011): transl_table=11

SEQ ID NO: 61057 - protein, 336 aa, Yersinia pestis KIM; identical to SEQ ID NO: 40446

SEQ ID NO: 61058 - DNA, 1194 bp, Yersinia pestis KIM; identical to SEQ ID NO: 40447
  CDS (1)..(1194): transl_table=11

SEQ ID NO: 61059 - protein, 397 aa, Yersinia pestis KIM; identical to SEQ ID NO: 40448

SEQ ID NO: 61060 - DNA, 933 bp, Streptococcus agalactiae 2603V/R; identical to SEQ ID NO: 40449
  CDS (1)..(933): transl_table=11

SEQ ID NO: 61061 - protein, 310 aa, Streptococcus agalactiae 2603V/R; identical to SEQ ID NO: 40450

SEQ ID NO: 61062 - DNA, 939 bp, Oceanobacillus iheyensis HTE831; identical to SEQ ID NO: 40451
  CDS (1)..(939): transl_table=11

SEQ ID NO: 61063 - protein, 312 aa, Oceanobacillus iheyensis HTE831; identical to SEQ ID NO: 40452

SEQ ID NO: 61064 - DNA, 1218 bp, Bifidobacterium longum NCC2705; identical to SEQ ID NO: 40453
  CDS (1)..(1218): transl_table=11

SEQ ID NO: 61065 - protein, 405 aa, Bifidobacterium longum NCC2705; identical to SEQ ID NO: 40454

SEQ ID NO: 61066 - DNA, 1128 bp, Brucella suis 1330; identical to SEQ ID NO: 40455
  CDS (1)..(1128): transl_table=11

SEQ ID NO: 61067 - protein, 375 aa, Brucella suis 1330; identical to SEQ ID NO: 40456

SEQ ID NO: 61068 - DNA, 1239 bp, Brucella suis 1330; identical to SEQ ID NO: 40457
  CDS (1)..(1239): transl_table=11

SEQ ID NO: 61069 - protein, 412 aa, Brucella suis 1330; identical to SEQ ID NO: 40458

SEQ ID NO: 61070 - DNA, 1191 bp, Brucella suis 1330; identical to SEQ ID NO: 40459
  CDS (1)..(1191): transl_table=11

SEQ ID NO: 61071 - protein, 396 aa, Brucella suis 1330; identical to SEQ ID NO: 40460

SEQ ID NO: 61072 - DNA, 1170 bp, Brucella suis 1330; identical to SEQ ID NO: 40461
  CDS (1)..(1170): transl_table=11

SEQ ID NO: 61073 - protein, 389 aa, Brucella suis 1330; identical to SEQ ID NO: 40462

SEQ ID NO: 61074 - DNA, 1029 bp, Shigella flexneri 2a str. 301; identical to SEQ ID NO: 40463
  CDS (1)..(1029): transl_table=11

SEQ ID NO: 61075 - protein, 342 aa, Shigella flexneri 2a str. 301; identical to SEQ ID NO: 40464

SEQ ID NO: 61076 - DNA, 1011 bp, Shigella flexneri 2a str. 301; identical to SEQ ID NO: 40465
  CDS (1)..(1011): transl_table=11

SEQ ID NO: 61077 - protein, 336 aa, Shigella flexneri 2a str. 301; identical to SEQ ID NO: 40466

SEQ ID NO: 61078 - DNA, 999 bp, Shigella flexneri 2a str. 301; identical to SEQ ID NO: 40467
  CDS (1)..(999): transl_table=11

SEQ ID NO: 61079 - protein, 332 aa, Shigella flexneri 2a str. 301; identical to SEQ ID NO: 40468

SEQ ID NO: 61080 - DNA, 966 bp, Shigella flexneri 2a str. 301; identical to SEQ ID NO: 40469
  CDS (1)..(966): transl_table=11

SEQ ID NO: 61081 - protein, 321 aa, Shigella flexneri 2a str. 301; identical to SEQ ID NO: 40470

SEQ ID NO: 61082 - DNA, 942 bp, Streptococcus agalactiae NEM316; identical to SEQ ID NO: 40471
  CDS (1)..(942): transl_table=11

SEQ ID NO: 61083 - protein, 313 aa, Streptococcus agalactiae NEM316; identical to SEQ ID NO: 40472

SEQ ID NO: 61084 - DNA, 990 bp, Escherichia coli CFT073; identical to SEQ ID NO: 40473
  CDS (1)..(990): transl_table=11

SEQ ID NO: 61085 - protein, 329 aa, Escherichia coli CFT073; identical to SEQ ID NO: 40474

SEQ ID NO: 61086 - DNA, 1011 bp, Escherichia coli CFT073; identical to SEQ ID NO: 40475
  CDS (1)..(1011): transl_table=11

SEQ ID NO: 61087 - protein, 336 aa, Escherichia coli CFT073; identical to SEQ ID NO: 40476

SEQ ID NO: 61088 - DNA, 999 bp, Escherichia coli CFT073; identical to SEQ ID NO: 40477
  CDS (1)..(999): transl_table=11

SEQ ID NO: 61089 - protein, 332 aa, Escherichia coli CFT073; identical to SEQ ID NO: 40478

SEQ ID NO: 61090 - DNA, 990 bp, Escherichia coli CFT073; identical to SEQ ID NO: 40479
  CDS (1)..(990): transl_table=11

SEQ ID NO: 61091 - protein, 329 aa, Escherichia coli CFT073; identical to SEQ ID NO: 40480

SEQ ID NO: 61092 - DNA, 987 bp, Vibrio vulnificus CMCP6; identical to SEQ ID NO: 40481
  CDS (1)..(987): transl_table=11

SEQ ID NO: 61093 - protein, 328 aa, Vibrio vulnificus CMCP6; identical to SEQ ID NO: 40482

SEQ ID NO: 61094 - DNA, 1086 bp, Bradyrhizobium japonicum USDA 110; identical to SEQ ID NO: 40483
  CDS (1)..(1086): transl_table=11

SEQ ID NO: 61095 - protein, 361 aa, Bradyrhizobium japonicum USDA 110; identical to SEQ ID NO: 40484

SEQ ID NO: 61096 - DNA, 978 bp, Bradyrhizobium japonicum USDA 110; identical to SEQ ID NO: 40485
  CDS (1)..(978): transl_table=11

SEQ ID NO: 61097 - protein, 325 aa, Bradyrhizobium japonicum USDA 110; identical to SEQ ID NO: 40486

SEQ ID NO: 61098 - DNA, 1191 bp, Bradyrhizobium japonicum USDA 110; identical to SEQ ID NO: 40487
  CDS (1)..(1191): transl_table=11

SEQ ID NO: 61099 - protein, 396 aa, Bradyrhizobium japonicum USDA 110; identical to SEQ ID NO: 40488

SEQ ID NO: 61100 - DNA, 1029 bp, Bradyrhizobium japonicum USDA 110; identical to SEQ ID NO: 40489
  CDS (1)..(1029): transl_table=11

SEQ ID NO: 61101 - protein, 342 aa, Bradyrhizobium japonicum USDA 110; identical to SEQ ID NO: 40490

SEQ ID NO: 61102 - DNA, 1041 bp, Bradyrhizobium japonicum USDA 110; identical to SEQ ID NO: 40491
  CDS (1)..(1041): transl_table=11

SEQ ID NO: 61103 - protein, 346 aa, Bradyrhizobium japonicum USDA 110; identical to SEQ ID NO: 40492

SEQ ID NO: 61104 - DNA, 1011 bp, Clostridium tetani E88; identical to SEQ ID NO: 40493
  CDS (1)..(1011): transl_table=11

SEQ ID NO: 61105 - protein, 336 aa, Clostridium tetani E88; identical to SEQ ID NO: 40494

SEQ ID NO: 61106 - DNA, 987 bp, Clostridium tetani E88; identical to SEQ ID NO: 40495
  CDS (1)..(987): transl_table=11

SEQ ID NO: 61107 - protein, 328 aa, Clostridium tetani E88; identical to SEQ ID NO: 40496

SEQ ID NO: 61108 - DNA, 951 bp, Clostridium tetani E88; identical to SEQ ID NO: 40497
  CDS (1)..(951): transl_table=11

SEQ ID NO: 61109 - protein, 316 aa, Clostridium tetani E88; identical to SEQ ID NO: 40498

SEQ ID NO: 61110 - DNA, 1233 bp, Tropheryma whipplei str. Twist; identical to SEQ ID NO: 40499
  CDS (1)..(1233): transl_table=11

SEQ ID NO: 61111 - protein, 410 aa, Tropheryma whipplei str. Twist; identical to SEQ ID NO: 40500

SEQ ID NO: 61112 - DNA, 1224 bp, Tropheryma whipplei TW08/27; identical to SEQ ID NO: 40501
  CDS (1)..(1224): transl_table=11

SEQ ID NO: 61113 - protein, 407 aa, Tropheryma whipplei TW08/27; identical to SEQ ID NO: 40502

SEQ ID NO: 61114 - DNA, 1005 bp, Pseudomonas syringae pv. tomato str. DC3000; identical to SEQ ID NO: 40503
  CDS (1)..(1005): transl_table=11

SEQ ID NO: 61115 - protein, 334 aa, Pseudomonas syringae pv. tomato str. DC3000; identical to SEQ ID NO: 40504

SEQ ID NO: 61116 - DNA, 990 bp, Pseudomonas syringae pv. tomato str. DC3000; identical to SEQ ID NO: 40505
  CDS (1)..(990): transl_table=11

SEQ ID NO: 61117 - protein, 329 aa, Pseudomonas syringae pv. tomato str. DC3000; identical to SEQ ID NO: 40506

SEQ ID NO: 61118 - DNA, 1137 bp, Pseudomonas syringae pv. tomato str. DC3000; identical to SEQ ID NO: 40507
  CDS (1)..(1137): transl_table=11

SEQ ID NO: 61119 - protein, 378 aa, Pseudomonas syringae pv. tomato str. DC3000; identical to SEQ ID NO: 40508

SEQ ID NO: 61120 - DNA, 1026 bp, Pseudomonas syringae pv. tomato str. DC3000; identical to SEQ ID NO: 40509
  CDS (1)..(1026): transl_table=11

SEQ ID NO: 61121 - protein, 341 aa, Pseudomonas syringae pv. tomato str. DC3000; identical to SEQ ID NO: 40510

SEQ ID NO: 61122 - DNA, 984 bp, Vibrio parahaemolyticus RIMD 2210633; identical to SEQ ID NO: 40511
  CDS (1)..(984): transl_table=11

SEQ ID NO: 61123 - protein, 327 aa, Vibrio parahaemolyticus RIMD 2210633; identical to SEQ ID NO: 40512

SEQ ID NO: 61124 - DNA, 990 bp, Vibrio parahaemolyticus RIMD 2210633; identical to SEQ ID NO: 40513
  CDS (1)..(990): transl_table=11

SEQ ID NO: 61125 - protein, 329 aa, Vibrio parahaemolyticus RIMD 2210633; identical to SEQ ID NO: 40514

SEQ ID NO: 61126 - DNA, 1011 bp, Salmonella enterica subsp. enterica serovar Typhi Ty2; identical to SEQ ID NO: 40515
  CDS (1)..(1011): transl_table=11

SEQ ID NO: 61127 - protein, 336 aa, Salmonella enterica subsp. enterica serovar Typhi Ty2; identical to SEQ ID NO: 40516

SEQ ID NO: 61128 - DNA, 1044 bp, Salmonella enterica subsp. enterica serovar Typhi Ty2; identical to SEQ ID NO: 40517
  CDS (1)..(1044): transl_table=11

SEQ ID NO: 61129 - protein, 347 aa, Salmonella enterica subsp. enterica serovar Typhi Ty2; identical to SEQ ID NO: 40518

SEQ ID NO: 61130 - DNA, 999 bp, Streptomyces avermitilis MA-4680; identical to SEQ ID NO: 40519
  CDS (1)..(999): transl_table=11

SEQ ID NO: 61131 - protein, 332 aa, Streptomyces avermitilis MA-4680; identical to SEQ ID NO: 40520

SEQ ID NO: 61132 - DNA, 1020 bp, Streptomyces avermitilis MA-4680; identical to SEQ ID NO: 40521
  CDS (1)..(1020): transl_table=11

SEQ ID NO: 61133 - protein, 339 aa, Streptomyces avermitilis MA-4680; identical to SEQ ID NO: 40522

SEQ ID NO: 61134 - DNA, 1293 bp, Streptomyces avermitilis MA-4680; identical to SEQ ID NO: 40523
  CDS (1)..(1293): transl_table=11

SEQ ID NO: 61135 - protein, 430 aa, Streptomyces avermitilis MA-4680; identical to SEQ ID NO: 40524

SEQ ID NO: 61136 - DNA, 1947 bp, Streptomyces avermitilis MA-4680; identical to SEQ ID NO: 40525
  CDS (1)..(1947): transl_table=11

SEQ ID NO: 61137 - protein, 648 aa, Streptomyces avermitilis MA-4680; identical to SEQ ID NO: 40526

SEQ ID NO: 61138 - DNA, 1245 bp, Streptomyces avermitilis MA-4680; identical to SEQ ID NO: 40527
  CDS (1)..(1245): transl_table=11

SEQ ID NO: 61139 - protein, 414 aa, Streptomyces avermitilis MA-4680; identical to SEQ ID NO: 40528

SEQ ID NO: 61140 - DNA, 960 bp, Streptomyces avermitilis MA-4680; identical to SEQ ID NO: 40529
  CDS (1)..(960): transl_table=11

SEQ ID NO: 61141 - protein, 319 aa, Streptomyces avermitilis MA-4680; identical to SEQ ID NO: 40530

SEQ ID NO: 61142 - DNA, 936 bp, Bacillus cereus ATCC 14579; identical to SEQ ID NO: 40531
  CDS (1)..(936): transl_table=11

SEQ ID NO: 61143 - protein, 311 aa, Bacillus cereus ATCC 14579; identical to SEQ ID NO: 40532

SEQ ID NO: 61144 - DNA, 996 bp, Bacillus cereus ATCC 14579; identical to SEQ ID NO: 40533
  CDS (1)..(996): transl_table=11

SEQ ID NO: 61145 - protein, 331 aa, Bacillus cereus ATCC 14579; identical to SEQ ID NO: 40534

SEQ ID NO: 61146 - DNA, 954 bp, Bacillus cereus ATCC 14579; identical to SEQ ID NO: 40535
  CDS (1)..(954): transl_table=11

SEQ ID NO: 61147 - protein, 317 aa, Bacillus cereus ATCC 14579; identical to SEQ ID NO: 40536

SEQ ID NO: 61148 - DNA, 1011 bp, Shigella flexneri 2a str. 2457T; identical to SEQ ID NO: 40537
  CDS (1)..(1011): transl_table=11

SEQ ID NO: 61149 - protein, 336 aa, Shigella flexneri 2a str. 2457T; identical to SEQ ID NO: 40538

SEQ ID NO: 61150 - DNA, 1062 bp, Rhodopirellula baltica SH 1; identical to SEQ ID NO: 40539
  CDS (1)..(1062): transl_table=11

SEQ ID NO: 61151 - protein, 353 aa, Rhodopirellula baltica SH 1; identical to SEQ ID NO: 40540

SEQ ID NO: 61152 - DNA, 972 bp, Rhodopirellula baltica SH 1; identical to SEQ ID NO: 40541
  CDS (1)..(972): transl_table=11

SEQ ID NO: 61153 - protein, 323 aa, Rhodopirellula baltica SH 1; identical to SEQ ID NO: 40542

SEQ ID NO: 61154 - DNA, 939 bp, Chromobacterium violaceum ATCC 12472; identical to SEQ ID NO: 40543
  CDS (1)..(939): transl_table=11

SEQ ID NO: 61155 - protein, 312 aa, Chromobacterium violaceum ATCC 12472; identical to SEQ ID NO: 40544

SEQ ID NO: 61156 - DNA, 981 bp, Gloeobacter violaceus PCC 7421; identical to SEQ ID NO: 40545
  CDS (1)..(981): transl_table=11

SEQ ID NO: 61157 - protein, 326 aa, Gloeobacter violaceus PCC 7421; identical to SEQ ID NO: 40546

SEQ ID NO: 61158 - DNA, 972 bp, Photorhabdus luminescens subsp. laumondii TTO1; identical to SEQ ID NO: 40547
  CDS (1)..(972): transl_table=11

SEQ ID NO: 61159 - protein, 323 aa, Photorhabdus luminescens subsp. laumondii TTO1; identical to SEQ ID NO: 40548

SEQ ID NO: 61160 - DNA, 1008 bp, Vibrio vulnificus YJ016; identical to SEQ ID NO: 40549
  CDS (1)..(1008): transl_table=11

SEQ ID NO: 61161 - protein, 335 aa, Vibrio vulnificus YJ016; identical to SEQ ID NO: 40550

SEQ ID NO: 61162 - DNA, 987 bp, Vibrio vulnificus YJ016; identical to SEQ ID NO: 40551
  CDS (1)..(987): transl_table=11

SEQ ID NO: 61163 - protein, 328 aa, Vibrio vulnificus YJ016; identical to SEQ ID NO: 40552

SEQ ID NO: 61164 - DNA, 954 bp, Bacillus cereus ATCC 10987; identical to SEQ ID NO: 40553
  CDS (1)..(954): transl_table=11

SEQ ID NO: 61165 - protein, 317 aa, Bacillus cereus ATCC 10987; identical to SEQ ID NO: 40554

SEQ ID NO: 61166 - DNA, 1323 bp, Mycoplasma mobile 163K; identical to SEQ ID NO: 40555
  CDS (1)..(1323): transl_table=4

SEQ ID NO: 61167 - protein, 440 aa, Mycoplasma mobile 163K; identical to SEQ ID NO: 40556

SEQ ID NO: 61168 - DNA, 936 bp, Bacillus anthracis str. Sterne; identical to SEQ ID NO: 40557
  CDS (1)..(936): transl_table=11

SEQ ID NO: 61169 - protein, 311 aa, Bacillus anthracis str. Sterne; identical to SEQ ID NO: 40558

SEQ ID NO: 61170 - DNA, 954 bp, Bacillus anthracis str. Sterne; identical to SEQ ID NO: 40559
  CDS (1)..(954): transl_table=11

SEQ ID NO: 61171 - protein, 317 aa, Bacillus anthracis str. Sterne; identical to SEQ ID NO: 40560

SEQ ID NO: 61172 - DNA, 936 bp, Bacillus thuringiensis serovar konkukian str. 97-27; identical to SEQ ID NO: 40561
  CDS (1)..(936): transl_table=11

SEQ ID NO: 61173 - protein, 311 aa, Bacillus thuringiensis serovar konkukian str. 97-27; identical to SEQ ID NO: 40562

SEQ ID NO: 61174 - DNA, 990 bp, Bacillus thuringiensis serovar konkukian str. 97-27; identical to SEQ ID NO: 40563
  CDS (1)..(990): transl_table=11

SEQ ID NO: 61175 - protein, 329 aa, Bacillus thuringiensis serovar konkukian str. 97-27; identical to SEQ ID NO: 40564

SEQ ID NO: 61176 - DNA, 954 bp, Bacillus thuringiensis serovar konkukian str. 97-27; identical to SEQ ID NO: 40565
  CDS (1)..(954): transl_table=11

SEQ ID NO: 61177 - protein, 317 aa, Bacillus thuringiensis serovar konkukian str. 97-27; identical to SEQ ID NO: 40566

SEQ ID NO: 61178 - DNA, 969 bp, Erwinia carotovora subsp. atroseptica SCRI1043; identical to SEQ ID NO: 40567
  CDS (1)..(969): transl_table=11

SEQ ID NO: 61179 - protein, 322 aa, Erwinia carotovora subsp. atroseptica SCRI1043; identical to SEQ ID NO: 40568

SEQ ID NO: 61180 - DNA, 1182 bp, Erwinia carotovora subsp. atroseptica SCRI1043; identical to SEQ ID NO: 40569
  CDS (1)..(1182): transl_table=11

SEQ ID NO: 61181 - protein, 393 aa, Erwinia carotovora subsp. atroseptica SCRI1043; identical to SEQ ID NO: 40570

SEQ ID NO: 61182 - DNA, 1032 bp, Erwinia carotovora subsp. atroseptica SCRI1043; identical to SEQ ID NO: 40571
  CDS (1)..(1032): transl_table=11

SEQ ID NO: 61183 - protein, 343 aa, Erwinia carotovora subsp. atroseptica SCRI1043; identical to SEQ ID NO: 40572

SEQ ID NO: 61184 - DNA, 1098 bp, Erwinia carotovora subsp. atroseptica SCRI1043; identical to SEQ ID NO: 40573
  CDS (1)..(1098): transl_table=11

SEQ ID NO: 61185 - protein, 365 aa, Erwinia carotovora subsp. atroseptica SCRI1043; identical to SEQ ID NO: 40574

SEQ ID NO: 61186 - DNA, 987 bp, Erwinia carotovora subsp. atroseptica SCRI1043; identical to SEQ ID NO: 40575
  CDS (1)..(987): transl_table=11

SEQ ID NO: 61187 - protein, 328 aa, Erwinia carotovora subsp. atroseptica SCRI1043; identical to SEQ ID NO: 40576

SEQ ID NO: 61188 - DNA, 996 bp, Erwinia carotovora subsp. atroseptica SCRI1043; identical to SEQ ID NO: 40577
  CDS (1)..(996): transl_table=11

SEQ ID NO: 61189 - protein, 331 aa, Erwinia carotovora subsp. atroseptica SCRI1043; identical to SEQ ID NO: 40578

SEQ ID NO: 61190 - DNA, 963 bp, Erwinia carotovora subsp. atroseptica SCRI1043; identical to SEQ ID NO: 40579
  CDS (1)..(963): transl_table=11

SEQ ID NO: 61191 - protein, 320 aa, Erwinia carotovora subsp. atroseptica SCRI1043; identical to SEQ ID NO: 40580

SEQ ID NO: 61192 - DNA, 978 bp, Propionibacterium acnes KPA171202; identical to SEQ ID NO: 40581
  CDS (1)..(978): transl_table=11

SEQ ID NO: 61193 - protein, 325 aa, Propionibacterium acnes KPA171202; identical to SEQ ID NO: 40582

SEQ ID NO: 61194 - DNA, 1350 bp, Leifsonia xyli subsp. xyli str. CTCB07; identical to SEQ ID NO: 40583
  CDS (1)..(1350): transl_table=11

SEQ ID NO: 61195 - protein, 449 aa, Leifsonia xyli subsp. xyli str. CTCB07; identical to SEQ ID NO: 40584

SEQ ID NO: 61196 - DNA, 1128 bp, Yersinia pseudotuberculosis IP 32953; identical to SEQ ID NO: 40585
  CDS (1)..(1128): transl_table=11

SEQ ID NO: 61197 - protein, 375 aa, Yersinia pseudotuberculosis IP 32953; identical to SEQ ID NO: 40586

SEQ ID NO: 61198 - DNA, 1029 bp, Yersinia pseudotuberculosis IP 32953; identical to SEQ ID NO: 40587
  CDS (1)..(1029): transl_table=11

SEQ ID NO: 61199 - protein, 342 aa, Yersinia pseudotuberculosis IP 32953; identical to SEQ ID NO: 40588

SEQ ID NO: 61200 - DNA, 999 bp, Yersinia pseudotuberculosis IP 32953; identical to SEQ ID NO: 40589
  CDS (1)..(999): transl_table=11

SEQ ID NO: 61201 - protein, 332 aa, Yersinia pseudotuberculosis IP 32953; identical to SEQ ID NO: 40590

SEQ ID NO: 61202 - DNA, 1011 bp, Yersinia pseudotuberculosis IP 32953; identical to SEQ ID NO: 40591
  CDS (1)..(1011): transl_table=11

SEQ ID NO: 61203 - protein, 336 aa, Yersinia pseudotuberculosis IP 32953; identical to SEQ ID NO: 40592

SEQ ID NO: 61204 - DNA, 1050 bp, Yersinia pseudotuberculosis IP 32953; identical to SEQ ID NO: 40593
  CDS (1)..(1050): transl_table=11

SEQ ID NO: 61205 - protein, 349 aa, Yersinia pseudotuberculosis IP 32953; identical to SEQ ID NO: 40594

SEQ ID NO: 61206 - DNA, 1062 bp, Yersinia pseudotuberculosis IP 32953; identical to SEQ ID NO: 40595
  CDS (1)..(1062): transl_table=11

SEQ ID NO: 61207 - protein, 353 aa, Yersinia pseudotuberculosis IP 32953; identical to SEQ ID NO: 40596

SEQ ID NO: 61208 - DNA, 993 bp, Yersinia pseudotuberculosis IP 32953; identical to SEQ ID NO: 40597
  CDS (1)..(993): transl_table=11

SEQ ID NO: 61209 - protein, 330 aa, Yersinia pseudotuberculosis IP 32953; identical to SEQ ID NO: 40598

SEQ ID NO: 61210 - DNA, 1029 bp, Yersinia pseudotuberculosis IP 32953; identical to SEQ ID NO: 40599
  CDS (1)..(1029): transl_table=11

SEQ ID NO: 61211 - protein, 342 aa, Yersinia pseudotuberculosis IP 32953; identical to SEQ ID NO: 40600

SEQ ID NO: 61212 - DNA, 993 bp, Yersinia pseudotuberculosis IP 32953; identical to SEQ ID NO: 40601
  CDS (1)..(993): transl_table=11

SEQ ID NO: 61213 - protein, 330 aa, Yersinia pseudotuberculosis IP 32953; identical to SEQ ID NO: 40602

SEQ ID NO: 61214 - DNA, 1185 bp, Yersinia pseudotuberculosis IP 32953; identical to SEQ ID NO: 40603
  CDS (1)..(1185): transl_table=11

SEQ ID NO: 61215 - protein, 394 aa, Yersinia pseudotuberculosis IP 32953; identical to SEQ ID NO: 40604

SEQ ID NO: 61216 - DNA, 996 bp, Symbiobacterium thermophilum IAM 14863; identical to SEQ ID NO: 40605
  CDS (1)..(996): transl_table=11

SEQ ID NO: 61217 - protein, 331 aa, Symbiobacterium thermophilum IAM 14863; identical to SEQ ID NO: 40606

SEQ ID NO: 61218 - DNA, 1212 bp, Bacillus licheniformis ATCC 14580; identical to SEQ ID NO: 40607
  CDS (1)..(1212): transl_table=11

SEQ ID NO: 61219 - protein, 403 aa, Bacillus licheniformis ATCC 14580; identical to SEQ ID NO: 40608

SEQ ID NO: 61220 - DNA, 963 bp, Bacillus licheniformis ATCC 14580; identical to SEQ ID NO: 40609
  CDS (1)..(963): transl_table=11

SEQ ID NO: 61221 - protein, 320 aa, Bacillus licheniformis ATCC 14580; identical to SEQ ID NO: 40610

SEQ ID NO: 61222 - DNA, 936 bp, Bacillus cereus E33L; identical to SEQ ID NO: 40611
  CDS (1)..(936): transl_table=11

SEQ ID NO: 61223 - protein, 311 aa, Bacillus cereus E33L; identical to SEQ ID NO: 40612

SEQ ID NO: 61224 - DNA, 954 bp, Bacillus cereus E33L; identical to SEQ ID NO: 40613
  CDS (1)..(954): transl_table=11

SEQ ID NO: 61225 - protein, 317 aa, Bacillus cereus E33L; identical to SEQ ID NO: 40614

SEQ ID NO: 61226 - DNA, 975 bp, Mannheimia succiniciproducens MBEL55E; identical to SEQ ID NO: 40615
  CDS (1)..(975): transl_table=11

SEQ ID NO: 61227 - protein, 324 aa, Mannheimia succiniciproducens MBEL55E; identical to SEQ ID NO: 40616

SEQ ID NO: 61228 - DNA, 933 bp, Mannheimia succiniciproducens MBEL55E; identical to SEQ ID NO: 40617
  CDS (1)..(933): transl_table=11

SEQ ID NO: 61229 - protein, 310 aa, Mannheimia succiniciproducens MBEL55E; identical to SEQ ID NO: 40618

SEQ ID NO: 61230 - DNA, 1008 bp, Mannheimia succiniciproducens MBEL55E; identical to SEQ ID NO: 40619
  CDS (1)..(1008): transl_table=11

SEQ ID NO: 61231 - protein, 335 aa, Mannheimia succiniciproducens MBEL55E; identical to SEQ ID NO: 40620

SEQ ID NO: 61232 - DNA, 1029 bp, Mannheimia succiniciproducens MBEL55E; identical to SEQ ID NO: 40621
  CDS (1)..(1029): transl_table=11

SEQ ID NO: 61233 - protein, 342 aa, Mannheimia succiniciproducens MBEL55E; identical to SEQ ID NO: 40622

SEQ ID NO: 61234 - DNA, 1005 bp, Burkholderia mallei ATCC 23344; identical to SEQ ID NO: 40623
  CDS (1)..(1005): transl_table=11

SEQ ID NO: 61235 - protein, 334 aa, Burkholderia mallei ATCC 23344; identical to SEQ ID NO: 40624

SEQ ID NO: 61236 - DNA, 1005 bp, Burkholderia mallei ATCC 23344; identical to SEQ ID NO: 40625
  CDS (1)..(1005): transl_table=11

SEQ ID NO: 61237 - protein, 334 aa, Burkholderia mallei ATCC 23344; identical to SEQ ID NO: 40626

SEQ ID NO: 61238 - DNA, 1035 bp, Burkholderia pseudomallei K96243; identical to SEQ ID NO: 40627
  CDS (1)..(1035): transl_table=11

SEQ ID NO: 61239 - protein, 344 aa, Burkholderia pseudomallei K96243; identical to SEQ ID NO: 40628

SEQ ID NO: 61240 - DNA, 978 bp, Burkholderia pseudomallei K96243; identical to SEQ ID NO: 40629
  CDS (1)..(978): transl_table=11

SEQ ID NO: 61241 - protein, 325 aa, Burkholderia pseudomallei K96243; identical to SEQ ID NO: 40630

SEQ ID NO: 61242 - DNA, 1176 bp, Photobacterium profundum SS9; identical to SEQ ID NO: 40631
  CDS (1)..(1176): transl_table=11

SEQ ID NO: 61243 - protein, 391 aa, Photobacterium profundum SS9; identical to SEQ ID NO: 40632

SEQ ID NO: 61244 - DNA, 1017 bp, Photobacterium profundum SS9; identical to SEQ ID NO: 40633
  CDS (1)..(1017): transl_table=11

SEQ ID NO: 61245 - protein, 338 aa, Photobacterium profundum SS9; identical to SEQ ID NO: 40634

SEQ ID NO: 61246 - DNA, 999 bp, Photobacterium profundum SS9; identical to SEQ ID NO: 40635
  CDS (1)..(999): transl_table=11

SEQ ID NO: 61247 - protein, 332 aa, Photobacterium profundum SS9; identical to SEQ ID NO: 40636

SEQ ID NO: 61248 - DNA, 990 bp, Photobacterium profundum SS9; identical to SEQ ID NO: 40637
  CDS (1)..(990): transl_table=11

SEQ ID NO: 61249 - protein, 329 aa, Photobacterium profundum SS9; identical to SEQ ID NO: 40638

SEQ ID NO: 61250 - DNA, 1011 bp, Photobacterium profundum SS9; identical to SEQ ID NO: 40639
  CDS (1)..(1011): transl_table=11

SEQ ID NO: 61251 - protein, 336 aa, Photobacterium profundum SS9; identical to SEQ ID NO: 40640

SEQ ID NO: 61252 - DNA, 1014 bp, Geobacillus kaustophilus HTA426; identical to SEQ ID NO: 40641
  CDS (1)..(1014): transl_table=11

SEQ ID NO: 61253 - protein, 337 aa, Geobacillus kaustophilus HTA426; identical to SEQ ID NO: 40642

SEQ ID NO: 61254 - DNA, 1200 bp, Geobacillus kaustophilus HTA426; identical to SEQ ID NO: 40643
  CDS (1)..(1200): transl_table=11

SEQ ID NO: 61255 - protein, 399 aa, Geobacillus kaustophilus HTA426; identical to SEQ ID NO: 40644

SEQ ID NO: 61256 - DNA, 1005 bp, Geobacillus kaustophilus HTA426; identical to SEQ ID NO: 40645
  CDS (1)..(1005): transl_table=11

SEQ ID NO: 61257 - protein, 334 aa, Geobacillus kaustophilus HTA426; identical to SEQ ID NO: 40646

SEQ ID NO: 61258 - DNA, 1224 bp, Geobacillus kaustophilus HTA426; identical to SEQ ID NO: 40647
  CDS (1)..(1224): transl_table=11

SEQ ID NO: 61259 - protein, 407 aa, Geobacillus kaustophilus HTA426; identical to SEQ ID NO: 40648

SEQ ID NO: 61260 - DNA, 945 bp, Geobacillus kaustophilus HTA426; identical to SEQ ID NO: 40649
  CDS (1)..(945): transl_table=11

SEQ ID NO: 61261 - protein, 314 aa, Geobacillus kaustophilus HTA426; identical to SEQ ID NO: 40650

SEQ ID NO: 61262 - DNA, 1011 bp, Salmonella enterica subsp. enterica serovar Paratyphi A str. ATCC; identical to SEQ ID NO: 40651
  CDS (1)..(1011): transl_table=11

SEQ ID NO: 61263 - protein, 336 aa, Salmonella enterica subsp. enterica serovar Paratyphi A str. ATCC; identical to SEQ ID NO: 40652

SEQ ID NO: 61264 - DNA, 1044 bp, Salmonella enterica subsp. enterica serovar Paratyphi A str. ATCC; identical to SEQ ID NO: 40653
  CDS (1)..(1044): transl_table=11

SEQ ID NO: 61265 - protein, 347 aa, Salmonella enterica subsp. enterica serovar Paratyphi A str. ATCC; identical to SEQ ID NO: 40654

SEQ ID NO: 61266 - DNA, 1299 bp, Silicibacter pomeroyi DSS-3; identical to SEQ ID NO: 40655
  CDS (1)..(1299): transl_table=11

SEQ ID NO: 61267 - protein, 432 aa, Silicibacter pomeroyi DSS-3; identical to SEQ ID NO: 40656

SEQ ID NO: 61268 - DNA, 1161 bp, Bacillus clausii KSM-K16; identical to SEQ ID NO: 40657
  CDS (1)..(1161): transl_table=11

SEQ ID NO: 61269 - protein, 386 aa, Bacillus clausii KSM-K16; identical to SEQ ID NO: 40658

SEQ ID NO: 61270 - DNA, 945 bp, Bacillus clausii KSM-K16; identical to SEQ ID NO: 40659
  CDS (1)..(945): transl_table=11

SEQ ID NO: 61271 - protein, 314 aa, Bacillus clausii KSM-K16; identical to SEQ ID NO: 40660

SEQ ID NO: 61272 - DNA, 1023 bp, Gluconobacter oxydans 621H; identical to SEQ ID NO: 40661
  CDS (1)..(1023): transl_table=11

SEQ ID NO: 61273 - protein, 340 aa, Gluconobacter oxydans 621H; identical to SEQ ID NO: 40662

SEQ ID NO: 61274 - DNA, 858 bp, Lactobacillus acidophilus NCFM; identical to SEQ ID NO: 40663
  CDS (1)..(858): transl_table=11

SEQ ID NO: 61275 - protein, 285 aa, Lactobacillus acidophilus NCFM; identical to SEQ ID NO: 40664

SEQ ID NO: 61276 - DNA, 987 bp, Vibrio fischeri ES114; identical to SEQ ID NO: 40665
  CDS (1)..(987): transl_table=11

SEQ ID NO: 61277 - protein, 328 aa, Vibrio fischeri ES114; identical to SEQ ID NO: 40666

SEQ ID NO: 61278 - DNA, 1011 bp, Salmonella enterica subsp. enterica serovar Choleraesuis str; identical to SEQ ID NO: 40667
  CDS (1)..(1011): transl_table=11

SEQ ID NO: 61279 - protein, 336 aa, Salmonella enterica subsp. enterica serovar Choleraesuis str; identical to SEQ ID NO: 40668

SEQ ID NO: 61280 - DNA, 993 bp, Salmonella enterica subsp. enterica serovar Choleraesuis str; identical to SEQ ID NO: 40669
  CDS (1)..(993): transl_table=11

SEQ ID NO: 61281 - protein, 330 aa, Salmonella enterica subsp. enterica serovar Choleraesuis str; identical to SEQ ID NO: 40670

SEQ ID NO: 61282 - DNA, 1044 bp, Salmonella enterica subsp. enterica serovar Choleraesuis str; identical to SEQ ID NO: 40671
  CDS (1)..(1044): transl_table=11

SEQ ID NO: 61283 - protein, 347 aa, Salmonella enterica subsp. enterica serovar Choleraesuis str; identical to SEQ ID NO: 40672

SEQ ID NO: 61284 - DNA, 1005 bp, Brucella abortus biovar 1 str. 9-941; identical to SEQ ID NO: 40673
  CDS (1)..(1005): transl_table=11

SEQ ID NO: 61285 - protein, 334 aa, Brucella abortus biovar 1 str. 9-941; identical to SEQ ID NO: 40674

SEQ ID NO: 61286 - DNA, 1191 bp, Brucella abortus biovar 1 str. 9-941; identical to SEQ ID NO: 40675
  CDS (1)..(1191): transl_table=11

SEQ ID NO: 61287 - protein, 396 aa, Brucella abortus biovar 1 str. 9-941; identical to SEQ ID NO: 40676

SEQ ID NO: 61288 - DNA, 1041 bp, Brucella abortus biovar 1 str. 9-941; identical to SEQ ID NO: 40677
  CDS (1)..(1041): transl_table=11

SEQ ID NO: 61289 - protein, 346 aa, Brucella abortus biovar 1 str. 9-941; identical to SEQ ID NO: 40678

SEQ ID NO: 61290 - DNA, 1239 bp, Brucella abortus biovar 1 str. 9-941; identical to SEQ ID NO: 40679
  CDS (1)..(1239): transl_table=11

SEQ ID NO: 61291 - protein, 412 aa, Brucella abortus biovar 1 str. 9-941; identical to SEQ ID NO: 40680

SEQ ID NO: 61292 - DNA, 1170 bp, Brucella abortus biovar 1 str. 9-941; identical to SEQ ID NO: 40681
  CDS (1)..(1170): transl_table=11

SEQ ID NO: 61293 - protein, 389 aa, Brucella abortus biovar 1 str. 9-941; identical to SEQ ID NO: 40682

SEQ ID NO: 61294 - DNA, 975 bp, Corynebacterium glutamicum ATCC 13032; identical to SEQ ID NO: 40683
  CDS (1)..(975): transl_table=11

SEQ ID NO: 61295 - protein, 324 aa, Corynebacterium glutamicum ATCC 13032; identical to SEQ ID NO: 40684

SEQ ID NO: 61296 - DNA, 1020 bp, Pseudomonas syringae pv. syringae B728a; identical to SEQ ID NO: 40685
  CDS (1)..(1020): transl_table=11

SEQ ID NO: 61297 - protein, 339 aa, Pseudomonas syringae pv. syringae B728a; identical to SEQ ID NO: 40686

SEQ ID NO: 61298 - DNA, 990 bp, Pseudomonas syringae pv. syringae B728a; identical to SEQ ID NO: 40687
  CDS (1)..(990): transl_table=11

SEQ ID NO: 61299 - protein, 329 aa, Pseudomonas syringae pv. syringae B728a; identical to SEQ ID NO: 40688

SEQ ID NO: 61300 - DNA, 978 bp, Pseudomonas syringae pv. syringae B728a; identical to SEQ ID NO: 40689
  CDS (1)..(978): transl_table=11

SEQ ID NO: 61301 - protein, 325 aa, Pseudomonas syringae pv. syringae B728a; identical to SEQ ID NO: 40690

SEQ ID NO: 61302 - DNA, 1137 bp, Pseudomonas syringae pv. syringae B728a; identical to SEQ ID NO: 40691
  CDS (1)..(1137): transl_table=11

SEQ ID NO: 61303 - protein, 378 aa, Pseudomonas syringae pv. syringae B728a; identical to SEQ ID NO: 40692

SEQ ID NO: 61304 - DNA, 1026 bp, Pseudomonas syringae pv. syringae B728a; identical to SEQ ID NO: 40693
  CDS (1)..(1026): transl_table=11

SEQ ID NO: 61305 - protein, 341 aa, Pseudomonas syringae pv. syringae B728a; identical to SEQ ID NO: 40694

SEQ ID NO: 61306 - DNA, 972 bp, Haemophilus influenzae 86-028NP; identical to SEQ ID NO: 40695
  CDS (1)..(972): transl_table=11

SEQ ID NO: 61307 - protein, 323 aa, Haemophilus influenzae 86-028NP; identical to SEQ ID NO: 40696

SEQ ID NO: 61308 - DNA, 1011 bp, Haemophilus influenzae 86-028NP; identical to SEQ ID NO: 40697
  CDS (1)..(1011): transl_table=11

SEQ ID NO: 61309 - protein, 336 aa, Haemophilus influenzae 86-028NP; identical to SEQ ID NO: 40698

SEQ ID NO: 61310 - DNA, 939 bp, Staphylococcus haemolyticus JCSC1435; identical to SEQ ID NO: 40699
  CDS (1)..(939): transl_table=11

SEQ ID NO: 61311 - protein, 312 aa, Staphylococcus haemolyticus JCSC1435; identical to SEQ ID NO: 40700

SEQ ID NO: 61312 - DNA, 1023 bp, Pseudomonas fluorescens Pf-5; identical to SEQ ID NO: 40701
  CDS (1)..(1023): transl_table=11

SEQ ID NO: 61313 - protein, 340 aa, Pseudomonas fluorescens Pf-5; identical to SEQ ID NO: 40702

SEQ ID NO: 61314 - DNA, 1137 bp, Pseudomonas syringae pv. phaseolicola 1448A; identical to SEQ ID NO: 40703
  CDS (1)..(1137): transl_table=11

SEQ ID NO: 61315 - protein, 378 aa, Pseudomonas syringae pv. phaseolicola 1448A; identical to SEQ ID NO: 40704

SEQ ID NO: 61316 - DNA, 963 bp, Pseudomonas syringae pv. phaseolicola 1448A; identical to SEQ ID NO: 40705
  CDS (1)..(963): transl_table=11

SEQ ID NO: 61317 - protein, 320 aa, Pseudomonas syringae pv. phaseolicola 1448A; identical to SEQ ID NO: 40706

SEQ ID NO: 61318 - DNA, 1884 bp, Pseudomonas syringae pv. phaseolicola 1448A; identical to SEQ ID NO: 40707
  CDS (1)..(1884): transl_table=11

SEQ ID NO: 61319 - protein, 627 aa, Pseudomonas syringae pv. phaseolicola 1448A; identical to SEQ ID NO: 40708

SEQ ID NO: 61320 - DNA, 1026 bp, Pseudomonas syringae pv. phaseolicola 1448A; identical to SEQ ID NO: 40709
  CDS (1)..(1026): transl_table=11

SEQ ID NO: 61321 - protein, 341 aa, Pseudomonas syringae pv. phaseolicola 1448A; identical to SEQ ID NO: 40710

SEQ ID NO: 61322 - DNA, 1251 bp, Mycoplasma hyopneumoniae J; identical to SEQ ID NO: 40711
  CDS (1)..(1251): transl_table=4

SEQ ID NO: 61323 - protein, 416 aa, Mycoplasma hyopneumoniae J; identical to SEQ ID NO: 40712

SEQ ID NO: 61324 - DNA, 1251 bp, Mycoplasma hyopneumoniae 7448; identical to SEQ ID NO: 40713
  CDS (1)..(1251): transl_table=4

SEQ ID NO: 61325 - protein, 416 aa, Mycoplasma hyopneumoniae 7448; identical to SEQ ID NO: 40714

SEQ ID NO: 61326 - DNA, 1254 bp, Thermobifida fusca YX; identical to SEQ ID NO: 40715
  CDS (1)..(1254): transl_table=11

SEQ ID NO: 61327 - protein, 417 aa, Thermobifida fusca YX; identical to SEQ ID NO: 40716

SEQ ID NO: 61328 - DNA, 1023 bp, Ralstonia eutropha JMP134; identical to SEQ ID NO: 40717
  CDS (1)..(1023): transl_table=11

SEQ ID NO: 61329 - protein, 340 aa, Ralstonia eutropha JMP134; identical to SEQ ID NO: 40718

SEQ ID NO: 61330 - DNA, 966 bp, Ralstonia eutropha JMP134; identical to SEQ ID NO: 40719
  CDS (1)..(966): transl_table=11

SEQ ID NO: 61331 - protein, 321 aa, Ralstonia eutropha JMP134; identical to SEQ ID NO: 40720

SEQ ID NO: 61332 - DNA, 942 bp, Staphylococcus saprophyticus subsp. saprophyticus ATCC 15305; identical to SEQ ID NO: 40721
  CDS (1)..(942): transl_table=11

SEQ ID NO: 61333 - protein, 313 aa, Staphylococcus saprophyticus subsp. saprophyticus ATCC 15305; identical to SEQ ID NO: 40722

SEQ ID NO: 61334 - DNA, 990 bp, Shigella sonnei Ss046; identical to SEQ ID NO: 40723
  CDS (1)..(990): transl_table=11

SEQ ID NO: 61335 - protein, 329 aa, Shigella sonnei Ss046; identical to SEQ ID NO: 40724

SEQ ID NO: 61336 - DNA, 999 bp, Shigella sonnei Ss046; identical to SEQ ID NO: 40725
  CDS (1)..(999): transl_table=11

SEQ ID NO: 61337 - protein, 332 aa, Shigella sonnei Ss046; identical to SEQ ID NO: 40726

SEQ ID NO: 61338 - DNA, 1128 bp, Haemophilus somnus 129PT; identical to SEQ ID NO: 40727
  CDS (1)..(1128)

SEQ ID NO: 61339 - protein, 375 aa, Haemophilus somnus 129PT; identical to SEQ ID NO: 40728

SEQ ID NO: 61340 - DNA, 1128 bp, Actinobacillus pleuropneumoniae serovar 1 str. 4074; identical to SEQ ID NO: 40729
  CDS (1)..(1128)

SEQ ID NO: 61341 - protein, 375 aa, Actinobacillus pleuropneumoniae serovar 1 str. 4074; identical to SEQ ID NO: 40730

SEQ ID NO: 61342 - DNA, 1128 bp, Haemophilus influenzae R2866; identical to SEQ ID NO: 40731
  CDS (1)..(1128)

SEQ ID NO: 61343 - protein, 375 aa, Haemophilus influenzae R2866; identical to SEQ ID NO: 40732

SEQ ID NO: 61344 - DNA, 1137 bp, Pseudomonas fluorescens PfO-1; identical to SEQ ID NO: 40733
  CDS (1)..(1137)

SEQ ID NO: 61345 - protein, 378 aa, Pseudomonas fluorescens PfO-1; identical to SEQ ID NO: 40734

SEQ ID NO: 61346 - DNA, 1200 bp, Burkholderia fungorum LB400; identical to SEQ ID NO: 40735
  CDS (1)..(1200)

SEQ ID NO: 61347 - protein, 399 aa, Burkholderia fungorum LB400; identical to SEQ ID NO: 40736

SEQ ID NO: 61348 - DNA, 1200 bp, Burkholderia vietnamiensis G4; identical to SEQ ID NO: 40737
  CDS (1)..(1200): transl_table=11

SEQ ID NO: 61349 - protein, 399 aa, Burkholderia vietnamiensis G4; identical to SEQ ID NO: 40738

SEQ ID NO: 61350 - DNA, 1200 bp, Burkholderia cenocepacia AU 1054; identical to SEQ ID NO: 40739
  CDS (1)..(1200): transl_table=11

SEQ ID NO: 61351 - protein, 399 aa, Burkholderia cenocepacia AU 1054; identical to SEQ ID NO: 40740

SEQ ID NO: 61352 - DNA, 1152 bp, Chromohalobacter salexigens DSM 3043; identical to SEQ ID NO: 40741
  CDS (1)..(1152): transl_table=11

SEQ ID NO: 61353 - protein, 383 aa, Chromohalobacter salexigens DSM 3043; identical to SEQ ID NO: 40742

SEQ ID NO: 61354 - DNA, 1194 bp, Moorella thermoacetica ATCC 39073; identical to SEQ ID NO: 40743
  CDS (1)..(1194): transl_table=11

SEQ ID NO: 61355 - protein, 397 aa, Moorella thermoacetica ATCC 39073; identical to SEQ ID NO: 40744

SEQ ID NO: 61356 - DNA, 1200 bp, Burkholderia ambifaria AMMD; identical to SEQ ID NO: 40745
  CDS (1)..(1200): transl_table=11

SEQ ID NO: 61357 - protein, 399 aa, Burkholderia ambifaria AMMD; identical to SEQ ID NO: 40746

SEQ ID NO: 61358 - DNA, 1179 bp, Bacillus sp; identical to SEQ ID NO: 40747
  CDS (1)..(1179): transl_table=11

SEQ ID NO: 61359 - protein, 392 aa, Bacillus sp; identical to SEQ ID NO: 40748

SEQ ID NO: 61360 - DNA, 1734 bp, Mycobacterium leprae; identical to SEQ ID NO: 40749
  CDS (1)..(1734): transl_table=11

SEQ ID NO: 61361 - protein, 577 aa, Mycobacterium leprae; identical to SEQ ID NO: 40750

SEQ ID NO: 61362 - DNA, 1242 bp, Streptomyces kanamyceticus; identical to SEQ ID NO: 40751
  CDS (1)..(1242): transl_table=11

SEQ ID NO: 61363 - protein, 413 aa, Streptomyces kanamyceticus; identical to SEQ ID NO: 40752

SEQ ID NO: 61364 - DNA, 1167 bp, Thermoanaerobacter ethanolicus; identical to SEQ ID NO: 40753
  CDS (1)..(1167): transl_table=11

SEQ ID NO: 61365 - protein, 388 aa, Thermoanaerobacter ethanolicus; identical to SEQ ID NO: 40754

SEQ ID NO: 61366 - DNA, 981 bp, Rhizobium sp; identical to SEQ ID NO: 40755
  CDS (1)..(981): transl_table=11

SEQ ID NO: 61367 - protein, 326 aa, Rhizobium sp; identical to SEQ ID NO: 40756

SEQ ID NO: 61368 - DNA, 1146 bp, Streptomyces olivaceoviridis; identical to SEQ ID NO: 40757
  CDS (1)..(1146): transl_table=11

SEQ ID NO: 61369 - protein, 381 aa, Streptomyces olivaceoviridis; identical to SEQ ID NO: 40758

SEQ ID NO: 61370 - DNA, 1002 bp, Rhizobium leguminosarum bv; identical to SEQ ID NO: 40759
  CDS (1)..(1002): transl_table=11

SEQ ID NO: 61371 - protein, 333 aa, Rhizobium leguminosarum bv; identical to SEQ ID NO: 40760

SEQ ID NO: 61372 - DNA, 1224 bp, Bacillus stearothermophilus; identical to SEQ ID NO: 40761
  CDS (1)..(1224): transl_table=11

SEQ ID NO: 61373 - protein, 407 aa, Bacillus stearothermophilus; identical to SEQ ID NO: 40762

SEQ ID NO: 61374 - DNA, 990 bp, Escherichia coli; identical to SEQ ID NO: 40763
  CDS (1)..(990): transl_table=11

SEQ ID NO: 61375 - protein, 329 aa, Escherichia coli; identical to SEQ ID NO: 40764

SEQ ID NO: 61376 - DNA, 1011 bp, Escherichia coli; identical to SEQ ID NO: 40765
  CDS (1)..(1011): transl_table=11

SEQ ID NO: 61377 - protein, 336 aa, Escherichia coli; identical to SEQ ID NO: 40766

SEQ ID NO: 61378 - DNA, 1011 bp, Haemophilus influenzae; identical to SEQ ID NO: 40767
  CDS (1)..(1011): transl_table=11

SEQ ID NO: 61379 - protein, 336 aa, Haemophilus influenzae; identical to SEQ ID NO: 40768

SEQ ID NO: 61380 - DNA, 1011 bp, Salmonella typhimurium; identical to SEQ ID NO: 40769
  CDS (1)..(1011): transl_table=11

SEQ ID NO: 61381 - protein, 336 aa, Salmonella typhimurium; identical to SEQ ID NO: 40770

SEQ ID NO: 61382 - DNA, 969 bp, Bacillus subtilis; identical to SEQ ID NO: 40771
  CDS (1)..(969): transl_table=11

SEQ ID NO: 61383 - protein, 322 aa, Bacillus subtilis; identical to SEQ ID NO: 40772

SEQ ID NO: 61384 - DNA, 966 bp, Escherichia coli; identical to SEQ ID NO: 40773
  CDS (1)..(966): transl_table=11

SEQ ID NO: 61385 - protein, 321 aa, Escherichia coli; identical to SEQ ID NO: 40774

SEQ ID NO: 61386 - DNA, 972 bp, Haemophilus influenzae; identical to SEQ ID NO: 40775
  CDS (1)..(972): transl_table=11

SEQ ID NO: 61387 - protein, 323 aa, Haemophilus influenzae; identical to SEQ ID NO: 40776

SEQ ID NO: 61388 - DNA, 1128 bp, Haemophilus influenzae; identical to SEQ ID NO: 40777
  CDS (1)..(1128): transl_table=11

SEQ ID NO: 61389 - protein, 375 aa, Haemophilus influenzae; identical to SEQ ID NO: 40778
  misc_feature (51)..(51): Xaa can be any naturally occuring amino acid

SEQ ID NO: 61390 - DNA, 1029 bp, Escherichia coli; identical to SEQ ID NO: 40779
  CDS (1)..(1029): transl_table=11

SEQ ID NO: 61391 - protein, 342 aa, Escherichia coli; identical to SEQ ID NO: 40780

SEQ ID NO: 61392 - DNA, 999 bp, Escherichia coli; identical to SEQ ID NO: 40781
  CDS (1)..(999): transl_table=11

SEQ ID NO: 61393 - protein, 332 aa, Escherichia coli; identical to SEQ ID NO: 40782

SEQ ID NO: 61394 - DNA, 22 bp, Artificial sequence
  Primer sequence
atgtcgaaaagcaatccgtctg

SEQ ID NO: 61395 - DNA, 24 bp, Artificial sequence
  Primer sequence
ttaagaacggcgtttggttgcgga

SEQ ID NO: 61396 - protein, 468 aa, Artificial sequence; identical to SEQ ID NO: 40785
  Consensus
  Variant (2)..(3): Xaa in position 2 to 3 is any amino acid
  Variant (5)..(14): Xaa in position 5 to 14 is any amino acid
  Variant (15)..(21): Xaa in position 15 to 21 is any or no amino acid
  Variant (23)..(25): Xaa in position 23 to 25 is any amino acid
  Variant (26)..(26): Xaa in position 26 is any or no amino acid
  Variant (28)..(30): Xaa in position 28 to 30 is any amino acid
  Variant (32)..(35): Xaa in position 32 to 35 is any amino acid
  Variant (37)..(39): Xaa in position 37 to 39 is any amino acid
  Variant (40)..(40): Xaa in position 40 is any or no amino acid
  Variant (44)..(44): Xaa in position 44 is any amino acid
  Variant (47)..(48): Xaa in position 47 to 48 is any amino acid
  Variant (52)..(54): Xaa in position 52 to 54 is any amino acid
  Variant (55)..(56): Xaa in position 55 to 56 is any or no amino acid
  Variant (64)..(64): Xaa in position 64 is any amino acid
  Variant (67)..(72): Xaa in position 67 to 72 is any amino acid
  Variant (74)..(84): Xaa in position 74 to 84 is any amino acid
  Variant (85)..(163): Xaa in position 85 to 163 is any or no amino acid
  Variant (165)..(166): Xaa in position 165 to 166 is any amino acid
  Variant (167)..(167): Xaa in position 167 is any or no amino acid
  Variant (169)..(170): Xaa in position 169 to 170 is any amino acid
  Variant (172)..(174): Xaa in position 172 to 174 is any amino acid
  Variant (176)..(177): Xaa in position 176 to 177 is any amino acid
  Variant (180)..(181): Xaa in position 180 to 181 is any amino acid
  Variant (183)..(186): Xaa in position 183 to 186 is any amino acid
  Variant (188)..(189): Xaa in position 188 to 189 is any amino acid
  Variant (192)..(192): Xaa in position 192 is any amino acid
  Variant (196)..(196): Xaa in position 196 is any amino acid
  Variant (198)..(200): Xaa in position 198 to 200 is any amino acid
  Variant (203)..(209): Xaa in position 203 to 209 is any amino acid
  Variant (211)..(226): Xaa in position 211 to 226 is any amino acid
  Variant (227)..(320): Xaa in position 227 to 320 is any or no amino acid
  Variant (322)..(337): Xaa in position 322 to 337 is any amino acid
  Variant (339)..(341): Xaa in position 339 to 341 is any amino acid
  Variant (343)..(344): Xaa in position 343 to 344 is any amino acid
  Variant (347)..(348): Xaa in position 347 to 348 is any amino acid
  Variant (355)..(356): Xaa in position 355 to 356 is any amino acid
  Variant (359)..(360): Xaa in position 359 to 360 is any amino acid
  Variant (364)..(369): Xaa in position 364 to 369 is any amino acid
  Variant (371)..(371): Xaa in position 371 is any amino acid
  Variant (374)..(374): Xaa in position 374 is any amino acid
  Variant (376)..(376): Xaa in position 376 is any amino acid
  Variant (378)..(380): Xaa in position 378 to 380 is any amino acid
  Variant (387)..(389): Xaa in position 387 to 389 is any amino acid
  Variant (392)..(392): Xaa in position 392 is any amino acid
  Variant (395)..(398): Xaa in position 395 to 398 is any amino acid
  Variant (399)..(399): Xaa in position 399 is any or no amino acid
  Variant (401)..(403): Xaa in position 401 to 403 is any amino acid
  Variant (406)..(407): Xaa in position 406 to 407 is any amino acid
  Variant (411)..(411): Xaa in position 411 is any amino acid
  Variant (416)..(416): Xaa in position 416 is any amino acid
  Variant (419)..(419): Xaa in position 419 is any amino acid
  Variant (422)..(422): Xaa in position 422 is any amino acid
  Variant (424)..(424): Xaa in position 424 is any amino acid
  Variant (426)..(426): Xaa in position 426 is any amino acid
  Variant (428)..(428): Xaa in position 428 is any amino acid
  Variant (430)..(430): Xaa in position 430 is any amino acid
  Variant (432)..(432): Xaa in position 432 is any amino acid
  Variant (436)..(437): Xaa in position 436 to 437 is any amino acid
  Variant (439)..(440): Xaa in position 439 to 440 is any amino acid
  Variant (443)..(443): Xaa in position 443 is any amino acid
  Variant (446)..(446): Xaa in position 446 is any amino acid
  Variant (447)..(447): Xaa in position 447 is any or no amino acid
  Variant (449)..(452): Xaa in position 449 to 452 is any amino acid
  Variant (454)..(454): Xaa in position 454 is any amino acid
  Variant (457)..(457): Xaa in position 457 is any amino acid
  Variant (459)..(459): Xaa in position 459 is any amino acid
  Variant (463)..(463): Xaa in position 463 is any amino acid
  Variant (466)..(467): Xaa in position 466 to 467 is any amino acid

SEQ ID NO: 61397 - protein, 44 aa, Artificial sequence; identical to SEQ ID NO: 40786
  Consensus
  Variant (2)..(9): Xaa in position 2 to 9 is any amino acid
  Variant (10)..(10): Xaa in position 10 is Ala, Gly, Ser, Thr or Val
  Variant (11)..(15): Xaa in position 11 to 15 is any amino acid
  Variant (16)..(16): Xaa in position 16 is Ala, Gly, Ser, Thr or Val
  Variant (17)..(17): Xaa in position 17 is any amino acid
  Variant (18)..(18): Xaa in position 18 is Ala, Gly or Thr
  Variant (19)..(22): Xaa in position 19 to 22 is any amino acid
  Variant (23)..(23): Xaa in position 23 is Phe, Ile, Leu, Met or Val
  Variant (24)..(28): Xaa in position 24 to 28 is any amino acid
  Variant (29)..(29): Xaa in position 29 is Asp or Glu
  Variant (32)..(32): Xaa in position 32 is any amino acid
  Variant (33)..(39): Xaa in position 33 to 39 is any or no amino acid
  Variant (41)..(43): Xaa in position 41 to 43 is any amino acid
  Variant (44)..(44): Xaa in position 44 is Ala, Cys, Gly, Ser or Val

SEQ ID NO: 61398 - protein, 32 aa, Artificial sequence; identical to SEQ ID NO: 40787
  Consensus
  Variant (2)..(3): Xaa in position 2 to 3 is any amino acid
  Variant (4)..(4): Xaa in position 4 is any or no amino acid
  Variant (6)..(8): Xaa in position 6 to 8 is any amino acid
  Variant (10)..(16): Xaa in position 10 to 16 is any amino acid
  Variant (17)..(17): Xaa in position 17 is Ile, Leu, Met or Val
  Variant (18)..(18): Xaa in position 18 is any amino acid
  Variant (19)..(19): Xaa in position 19 is Ala, Asp, Pro or Ser
  Variant (20)..(20): Xaa in position 20 is Phe, Ile, Leu or Val
  Variant (21)..(21): Xaa in position 21 is Ala, Ile, Leu or Val
  Variant (22)..(22): Xaa in position 22 is any amino acid
  Variant (25)..(25): Xaa in position 25 is Ala, Gly, Ser, Thr or Val
  Variant (26)..(31): Xaa in position 26 to 31 is any amino acid
  Variant (32)..(32): Xaa in position 32 is Ala, Gly, Asn or Ser

SEQ ID NO: 61399 - protein, 36 aa, Artificial sequence; identical to SEQ ID NO: 40788
  Consensus
  Variant (2)..(2): Xaa in position 2 is any amino acid
  Variant (4)..(4): Xaa in position 4 is Asp, Gly or Ser
  Variant (6)..(7): Xaa in position 6 to 7 is any amino acid
  Variant (8)..(8): Xaa in position 8 is any or no amino acid
  Variant (10)..(12): Xaa in position 10 to 12 is any amino acid
  Variant (13)..(13): Xaa in position 13 is any or no amino acid
  Variant (15)..(15): Xaa in position 15 is Ile, Leu or Val
  Variant (16)..(24): Xaa in position 16 to 24 is any amino acid
  Variant (25)..(25): Xaa in position 25 is Phe or Tyr
  Variant (26)..(28): Xaa in position 26 to 28 is any amino acid
  Variant (30)..(32): Xaa in position 30 to 32 is any amino acid
  Variant (33)..(33): Xaa in position 33 is Ala, Gly or Ser
  Variant (34)..(34): Xaa in position 34 is any amino acid
  Variant (35)..(35): Xaa in position 35 is Ala, Gly, Ser, Thr or Val
  Variant (36)..(36): Xaa in position 36 is Ala, Gly or Ser

SEQ ID NO: 61400 - protein, 61 aa, Artificial sequence; identical to SEQ ID NO: 40789
  Consensus
  Variant (2)..(2): Xaa in position 2 is any amino acid
  Variant (3)..(4): Xaa in position 3 to 4 is any or no amino acid
  Variant (6)..(6): Xaa in position 6 is Phe, Leu or Met
  Variant (7)..(7): Xaa in position 7 is any amino acid
  Variant (8)..(8): Xaa in position 8 is Ala, Ile or Val
  Variant (10)..(11): Xaa in position 10 to 11 is any amino acid
  Variant (12)..(12): Xaa in position 12 is Ala, Cys, Ser, Thr or Val
  Variant (13)..(13): Xaa in position 13 is any amino acid
  Variant (14)..(14): Xaa in position 14 is Ile, Leu, Met or Val
  Variant (17)..(20): Xaa in position 17 to 20 is any amino acid
  Variant (23)..(23): Xaa in position 23 is any amino acid
  Variant (25)..(31): Xaa in position 25 to 31 is any amino acid
  Variant (33)..(34): Xaa in position 33 to 34 is any amino acid
  Variant (35)..(35): Xaa in position 35 is Phe, Ile, Leu, Met or Val
  Variant (36)..(38): Xaa in position 36 to 38 is any amino acid
  Variant (39)..(39): Xaa in position 39 is Ile, Leu, Met or Val
  Variant (40)..(60): Xaa in position 40 to 60 is any amino acid
  Variant (61)..(61): Xaa in position 61 is Phe, Ile, Leu or Met

SEQ ID NO: 61401 - DNA, 1113 bp, Saccharomyces cerevisiae; identical to SEQ ID NO: 1363
  CDS (1)..(1113)

SEQ ID NO: 61402 - protein, 370 aa, Saccharomyces cerevisiae; identical to SEQ ID NO: 1364

SEQ ID NO: 61403 - DNA, 1086 bp, Deinococcus radiodurans; identical to SEQ ID NO: 1327
  CDS (1)..(1086)

SEQ ID NO: 61404 - protein, 361 aa, Deinococcus radiodurans; identical to SEQ ID NO: 1328

SEQ ID NO: 61405 - DNA, 1071 bp, Salmonella enterica subsp. enterica serovar Typhi; identical to SEQ ID NO: 2245
  CDS (1)..(1071)

SEQ ID NO: 61406 - protein, 356 aa, Salmonella enterica subsp. enterica serovar Typhi; identical to SEQ ID NO: 2246

SEQ ID NO: 61407 - DNA, 1071 bp, Yersinia pestis; identical to SEQ ID NO: 2247
  CDS (1)..(1071)

SEQ ID NO: 61408 - protein, 356 aa, Yersinia pestis; identical to SEQ ID NO: 2248

SEQ ID NO: 61409 - DNA, 1047 bp, Yersinia pestis; identical to SEQ ID NO: 1331
  CDS (1)..(1047)

SEQ ID NO: 61410 - protein, 348 aa, Yersinia pestis; identical to SEQ ID NO: 1332

SEQ ID NO: 61411 - DNA, 1053 bp, Escherichia coli; identical to SEQ ID NO: 2251
  CDS (1)..(1053)

SEQ ID NO: 61412 - protein, 350 aa, Escherichia coli; identical to SEQ ID NO: 1580

SEQ ID NO: 61413 - DNA, 1071 bp, Escherichia coli; identical to SEQ ID NO: 1333
  CDS (1)..(1071)

SEQ ID NO: 61414 - protein, 356 aa, Escherichia coli; identical to SEQ ID NO: 1334

SEQ ID NO: 61415 - DNA, 1131 bp, Nostoc sp. PCC 7120; identical to SEQ ID NO: 1335
  CDS (1)..(1131)

SEQ ID NO: 61416 - protein, 376 aa, Nostoc sp. PCC 7120; identical to SEQ ID NO: 1336

SEQ ID NO: 61417 - DNA, 1053 bp, Salmonella enterica subsp. enterica serovar Typhi; identical to SEQ ID NO: 1337
  CDS (1)..(1053)

SEQ ID NO: 61418 - protein, 350 aa, Salmonella enterica subsp. enterica serovar Typhi; identical to SEQ ID NO: 1338

SEQ ID NO: 61419 - DNA, 1077 bp, Pseudomonas aeruginosa; identical to SEQ ID NO: 1339
  CDS (1)..(1077)

SEQ ID NO: 61420 - protein, 358 aa, Pseudomonas aeruginosa; identical to SEQ ID NO: 1340

SEQ ID NO: 61421 - DNA, 1074 bp, Vibrio cholerae; identical to SEQ ID NO: 1343
  CDS (1)..(1074)

SEQ ID NO: 61422 - protein, 357 aa, Vibrio cholerae; identical to SEQ ID NO: 1344

SEQ ID NO: 61423 - DNA, 1038 bp, Lactococcus lactis subsp. lactis; identical to SEQ ID NO: 1345
  CDS (1)..(1038)

SEQ ID NO: 61424 - protein, 345 aa, Lactococcus lactis subsp. lactis; identical to SEQ ID NO: 1346

SEQ ID NO: 61425 - DNA, 1023 bp, Lactococcus lactis subsp. lactis; identical to SEQ ID NO: 1347
  CDS (1)..(1023)

SEQ ID NO: 61426 - protein, 340 aa, Lactococcus lactis subsp. lactis; identical to SEQ ID NO: 1348

SEQ ID NO: 61427 - DNA, 1032 bp, Streptococcus pneumoniae; identical to SEQ ID NO: 1349
  CDS (1)..(1032)

SEQ ID NO: 61428 - protein, 343 aa, Streptococcus pneumoniae; identical to SEQ ID NO: 1350

SEQ ID NO: 61429 - DNA, 1056 bp, Neisseria meningitidis; identical to SEQ ID NO: 2269
  CDS (1)..(1056)

SEQ ID NO: 61430 - protein, 351 aa, Neisseria meningitidis; identical to SEQ ID NO: 2270

SEQ ID NO: 61431 - DNA, 1095 bp, Pseudomonas aeruginosa; identical to SEQ ID NO: 1351
  CDS (1)..(1095)

SEQ ID NO: 61432 - protein, 364 aa, Pseudomonas aeruginosa; identical to SEQ ID NO: 1352

SEQ ID NO: 61433 - DNA, 1032 bp, Streptococcus pneumoniae; identical to SEQ ID NO: 1355
  CDS (1)..(1032)

SEQ ID NO: 61434 - protein, 343 aa, Streptococcus pneumoniae; identical to SEQ ID NO: 1356

SEQ ID NO: 61435 - DNA, 1143 bp, Xylella fastidiosa; identical to SEQ ID NO: 1603
  CDS (1)..(1143)

SEQ ID NO: 61436 - protein, 380 aa, Xylella fastidiosa; identical to SEQ ID NO: 1604

SEQ ID NO: 61437 - DNA, 1047 bp, Buchnera aphidicola; identical to SEQ ID NO: 1357
  CDS (1)..(1047)

SEQ ID NO: 61438 - protein, 348 aa, Buchnera aphidicola; identical to SEQ ID NO: 1358

SEQ ID NO: 61439 - DNA, 1104 bp, Corynebacterium glutamicum; identical to SEQ ID NO: 2279
  CDS (1)..(1104)

SEQ ID NO: 61440 - protein, 367 aa, Corynebacterium glutamicum; identical to SEQ ID NO: 2280

SEQ ID NO: 61441 - DNA, 1089 bp, Haemophilus influenzae; identical to SEQ ID NO: 1359
  CDS (1)..(1089)

SEQ ID NO: 61442 - protein, 362 aa, Haemophilus influenzae; identical to SEQ ID NO: 1360

SEQ ID NO: 61443 - DNA, 1502 bp, Candida albicans; identical to SEQ ID NO: 1361
  CDS (336)..(1442)

SEQ ID NO: 61444 - protein, 368 aa, Candida albicans; identical to SEQ ID NO: 1362

SEQ ID NO: 61445 - DNA, 2048 bp, Saccharomyces cerevisiae; identical to SEQ ID NO: 1365
  CDS (619)..(1731)

SEQ ID NO: 61446 - protein, 370 aa, Saccharomyces cerevisiae; identical to SEQ ID NO: 1366

SEQ ID NO: 61447 - DNA, 1107 bp, Schizosaccharomyces pombe; identical to SEQ ID NO: 1367
  CDS (1)..(1107)

SEQ ID NO: 61448 - protein, 368 aa, Schizosaccharomyces pombe; identical to SEQ ID NO: 1368

SEQ ID NO: 61449 - DNA, 1089 bp, Amycolatopsis orientalis; identical to SEQ ID NO: 1369
  CDS (1)..(1089)

SEQ ID NO: 61450 - protein, 362 aa, Amycolatopsis orientalis; identical to SEQ ID NO: 1370

SEQ ID NO: 61451 - DNA, 1119 bp, Schizosaccharomyces pombe; identical to SEQ ID NO: 1371
  CDS (1)..(1119)

SEQ ID NO: 61452 - protein, 372 aa, Schizosaccharomyces pombe; identical to SEQ ID NO: 1372

SEQ ID NO: 61453 - DNA, 1083 bp, Methylophilus methylotrophus; identical to SEQ ID NO: 1375
  CDS (1)..(1083)

SEQ ID NO: 61454 - protein, 360 aa, Methylophilus methylotrophus; identical to SEQ ID NO: 1376

SEQ ID NO: 61455 - DNA, 1770 bp, Debaryomyces hansenii; identical to SEQ ID NO: 2295
  CDS (1)..(1770)

SEQ ID NO: 61456 - protein, 589 aa, Debaryomyces hansenii; identical to SEQ ID NO: 2296

SEQ ID NO: 61457 - DNA, 1107 bp, Debaryomyces hansenii; identical to SEQ ID NO: 1377
  CDS (1)..(1107)

SEQ ID NO: 61458 - protein, 368 aa, Debaryomyces hansenii; identical to SEQ ID NO: 1378

SEQ ID NO: 61459 - DNA, 1074 bp, Yarrowia lipolytica; identical to SEQ ID NO: 1379
  CDS (1)..(1074)

SEQ ID NO: 61460 - protein, 357 aa, Yarrowia lipolytica; identical to SEQ ID NO: 1380

SEQ ID NO: 61461 - DNA, 1089 bp, Yarrowia lipolytica; identical to SEQ ID NO: 1381
  CDS (1)..(1089)

SEQ ID NO: 61462 - protein, 362 aa, Yarrowia lipolytica; identical to SEQ ID NO: 1382

SEQ ID NO: 61463 - DNA, 1119 bp, Kluyveromyces lactis; identical to SEQ ID NO: 1383
  CDS (1)..(1119)

SEQ ID NO: 61464 - protein, 372 aa, Kluyveromyces lactis; identical to SEQ ID NO: 1384

SEQ ID NO: 61465 - DNA, 1095 bp, Kluyveromyces lactis; identical to SEQ ID NO: 1385
  CDS (1)..(1095)

SEQ ID NO: 61466 - protein, 364 aa, Kluyveromyces lactis; identical to SEQ ID NO: 1386

SEQ ID NO: 61467 - DNA, 1074 bp, Erwinia carotovora subsp; identical to SEQ ID NO: 1387
  CDS (1)..(1074)

SEQ ID NO: 61468 - protein, 357 aa, Erwinia carotovora subsp; identical to SEQ ID NO: 1388

SEQ ID NO: 61469 - DNA, 1047 bp, Erwinia carotovora subsp; identical to SEQ ID NO: 1389
  CDS (1)..(1047)

SEQ ID NO: 61470 - protein, 348 aa, Erwinia carotovora subsp; identical to SEQ ID NO: 1390

SEQ ID NO: 61471 - DNA, 1056 bp, Erwinia carotovora subsp; identical to SEQ ID NO: 1391
  CDS (1)..(1056)

SEQ ID NO: 61472 - protein, 351 aa, Erwinia carotovora subsp; identical to SEQ ID NO: 1392

SEQ ID NO: 61473 - DNA, 1113 bp, Acinetobacter sp; identical to SEQ ID NO: 1393
  CDS (1)..(1113)

SEQ ID NO: 61474 - protein, 370 aa, Acinetobacter sp; identical to SEQ ID NO: 1394

SEQ ID NO: 61475 - DNA, 1056 bp, Acinetobacter sp; identical to SEQ ID NO: 1395
  CDS (1)..(1056)

SEQ ID NO: 61476 - protein, 351 aa, Acinetobacter sp; identical to SEQ ID NO: 1396

SEQ ID NO: 61477 - DNA, 1119 bp, Candida glabrata; identical to SEQ ID NO: 1397
  CDS (1)..(1119)

SEQ ID NO: 61478 - protein, 372 aa, Candida glabrata; identical to SEQ ID NO: 1398

SEQ ID NO: 61479 - DNA, 1071 bp, Candida glabrata; identical to SEQ ID NO: 1399
  CDS (1)..(1071)

SEQ ID NO: 61480 - protein, 356 aa, Candida glabrata; identical to SEQ ID NO: 1400

SEQ ID NO: 61481 - DNA, 1083 bp, Photobacterium profundum; identical to SEQ ID NO: 1401
  CDS (1)..(1083)

SEQ ID NO: 61482 - protein, 360 aa, Photobacterium profundum; identical to SEQ ID NO: 1402

SEQ ID NO: 61483 - DNA, 1053 bp, Photobacterium profundum; identical to SEQ ID NO: 1403
  CDS (1)..(1053)

SEQ ID NO: 61484 - protein, 350 aa, Photobacterium profundum; identical to SEQ ID NO: 1404

SEQ ID NO: 61485 - DNA, 1113 bp, Photobacterium profundum; identical to SEQ ID NO: 1405
  CDS (1)..(1113)

SEQ ID NO: 61486 - protein, 370 aa, Photobacterium profundum; identical to SEQ ID NO: 1406

SEQ ID NO: 61487 - DNA, 1056 bp, Photobacterium profundum; identical to SEQ ID NO: 1407
  CDS (1)..(1056)

SEQ ID NO: 61488 - protein, 351 aa, Photobacterium profundum; identical to SEQ ID NO: 1408

SEQ ID NO: 61489 - DNA, 1092 bp, Parachlamydia sp; identical to SEQ ID NO: 1409
  CDS (1)..(1092)

SEQ ID NO: 61490 - protein, 363 aa, Parachlamydia sp; identical to SEQ ID NO: 1410

SEQ ID NO: 61491 - DNA, 1095 bp, Rhodopseudomonas palustris; identical to SEQ ID NO: 1411
  CDS (1)..(1095)

SEQ ID NO: 61492 - protein, 364 aa, Rhodopseudomonas palustris; identical to SEQ ID NO: 1412

SEQ ID NO: 61493 - DNA, 1100 bp, Amycolatopsis methanolica; identical to SEQ ID NO: 1413
  CDS (1)..(1086)

SEQ ID NO: 61494 - protein, 361 aa, Amycolatopsis methanolica; identical to SEQ ID NO: 1414

SEQ ID NO: 61495 - DNA, 1071 bp, Treponema denticola; identical to SEQ ID NO: 1415
  CDS (1)..(1071)

SEQ ID NO: 61496 - protein, 356 aa, Treponema denticola; identical to SEQ ID NO: 1416

SEQ ID NO: 61497 - DNA, 1068 bp, Geobacter sulfurreducens; identical to SEQ ID NO: 1417
  CDS (1)..(1068)

SEQ ID NO: 61498 - protein, 355 aa, Geobacter sulfurreducens; identical to SEQ ID NO: 1418

SEQ ID NO: 61499 - DNA, 1095 bp, Ashbya gossypii; identical to SEQ ID NO: 1419
  CDS (1)..(1095)

SEQ ID NO: 61500 - protein, 364 aa, Ashbya gossypii; identical to SEQ ID NO: 1420

SEQ ID NO: 61501 - DNA, 1122 bp, Ashbya gossypii; identical to SEQ ID NO: 1421
  CDS (1)..(1122)

SEQ ID NO: 61502 - protein, 373 aa, Ashbya gossypii; identical to SEQ ID NO: 1422

SEQ ID NO: 61503 - DNA, 1098 bp, Amycolatopsis balhimycina; identical to SEQ ID NO: 1423
  CDS (1)..(1098)

SEQ ID NO: 61504 - protein, 365 aa, Amycolatopsis balhimycina; identical to SEQ ID NO: 1424

SEQ ID NO: 61505 - DNA, 1053 bp, Vibrio vulnificus; identical to SEQ ID NO: 2345
  CDS (1)..(1053)

SEQ ID NO: 61506 - protein, 350 aa, Vibrio vulnificus; identical to SEQ ID NO: 2346

SEQ ID NO: 61507 - DNA, 1047 bp, Photorhabdus luminescens; identical to SEQ ID NO: 1427
  CDS (1)..(1047)

SEQ ID NO: 61508 - protein, 348 aa, Photorhabdus luminescens; identical to SEQ ID NO: 1428

SEQ ID NO: 61509 - DNA, 1053 bp, Photorhabdus luminescens; identical to SEQ ID NO: 1429
  CDS (1)..(1053)

SEQ ID NO: 61510 - protein, 350 aa, Photorhabdus luminescens; identical to SEQ ID NO: 1430

SEQ ID NO: 61511 - DNA, 1095 bp, Photorhabdus luminescens; identical to SEQ ID NO: 1431
  CDS (1)..(1095)

SEQ ID NO: 61512 - protein, 364 aa, Photorhabdus luminescens; identical to SEQ ID NO: 1432

SEQ ID NO: 61513 - DNA, 1119 bp, Gloeobacter violaceus; identical to SEQ ID NO: 1433
  CDS (1)..(1119)

SEQ ID NO: 61514 - protein, 372 aa, Gloeobacter violaceus; identical to SEQ ID NO: 1434

SEQ ID NO: 61515 - DNA, 1107 bp, Chromobacterium violaceum; identical to SEQ ID NO: 1435
  CDS (1)..(1107)

SEQ ID NO: 61516 - protein, 368 aa, Chromobacterium violaceum; identical to SEQ ID NO: 1436

SEQ ID NO: 61517 - DNA, 1059 bp, Chromobacterium violaceum; identical to SEQ ID NO: 1437
  CDS (1)..(1059)

SEQ ID NO: 61518 - protein, 352 aa, Chromobacterium violaceum; identical to SEQ ID NO: 1438

SEQ ID NO: 61519 - DNA, 1140 bp, Neurospora crassa; identical to SEQ ID NO: 1439
  CDS (1)..(1140)

SEQ ID NO: 61520 - protein, 379 aa, Neurospora crassa; identical to SEQ ID NO: 1440

SEQ ID NO: 61521 - DNA, 1092 bp, Neurospora crassa; identical to SEQ ID NO: 1441
  CDS (1)..(1092)

SEQ ID NO: 61522 - protein, 363 aa, Neurospora crassa; identical to SEQ ID NO: 1442

SEQ ID NO: 61523 - DNA, 1068 bp, Synechococcus sp; identical to SEQ ID NO: 1443
  CDS (1)..(1068)

SEQ ID NO: 61524 - protein, 355 aa, Synechococcus sp; identical to SEQ ID NO: 1444

SEQ ID NO: 61525 - DNA, 1053 bp, Rhodopirellula baltica; identical to SEQ ID NO: 1445
  CDS (1)..(1053)

SEQ ID NO: 61526 - protein, 350 aa, Rhodopirellula baltica; identical to SEQ ID NO: 1446

SEQ ID NO: 61527 - DNA, 1068 bp, Prochlorococcus marinus subsp; identical to SEQ ID NO: 1447
  CDS (1)..(1068)

SEQ ID NO: 61528 - protein, 355 aa, Prochlorococcus marinus subsp; identical to SEQ ID NO: 1448

SEQ ID NO: 61529 - DNA, 1083 bp, Prochlorococcus marinus; identical to SEQ ID NO: 1449
  CDS (1)..(1083)

SEQ ID NO: 61530 - protein, 360 aa, Prochlorococcus marinus; identical to SEQ ID NO: 1450

SEQ ID NO: 61531 - DNA, 1074 bp, Prochlorococcus marinus; identical to SEQ ID NO: 1451
  CDS (1)..(1074)

SEQ ID NO: 61532 - protein, 357 aa, Prochlorococcus marinus; identical to SEQ ID NO: 1452

SEQ ID NO: 61533 - DNA, 1113 bp, Haemophilus ducreyi; identical to SEQ ID NO: 1453
  CDS (1)..(1113)

SEQ ID NO: 61534 - protein, 370 aa, Haemophilus ducreyi; identical to SEQ ID NO: 1454

SEQ ID NO: 61535 - DNA, 1080 bp, Haemophilus ducreyi; identical to SEQ ID NO: 1455
  CDS (1)..(1080)

SEQ ID NO: 61536 - protein, 359 aa, Haemophilus ducreyi; identical to SEQ ID NO: 1456

SEQ ID NO: 61537 - DNA, 1086 bp, Candidatus Blochmannia floridanus; identical to SEQ ID NO: 1457
  CDS (1)..(1086)

SEQ ID NO: 61538 - protein, 361 aa, Candidatus Blochmannia floridanus; identical to SEQ ID NO: 1458

SEQ ID NO: 61539 - DNA, 1074 bp, Bordetella pertussis; identical to SEQ ID NO: 2379
  CDS (1)..(1074)

SEQ ID NO: 61540 - protein, 357 aa, Bordetella pertussis; identical to SEQ ID NO: 1460

SEQ ID NO: 61541 - DNA, 1119 bp, Bordetella bronchiseptica; identical to SEQ ID NO: 1461
  CDS (1)..(1119)

SEQ ID NO: 61542 - protein, 372 aa, Bordetella bronchiseptica; identical to SEQ ID NO: 1462

SEQ ID NO: 61543 - DNA, 1179 bp, Nitrosomonas europaea; identical to SEQ ID NO: 1463
  CDS (1)..(1179)

SEQ ID NO: 61544 - protein, 392 aa, Nitrosomonas europaea; identical to SEQ ID NO: 1464

SEQ ID NO: 61545 - DNA, 1083 bp, Coxiella burnetii; identical to SEQ ID NO: 1465
  CDS (1)..(1083)

SEQ ID NO: 61546 - protein, 360 aa, Coxiella burnetii; identical to SEQ ID NO: 1466

SEQ ID NO: 61547 - DNA, 1053 bp, Vibrio parahaemolyticus; identical to SEQ ID NO: 1471
  CDS (1)..(1053)

SEQ ID NO: 61548 - protein, 350 aa, Vibrio parahaemolyticus; identical to SEQ ID NO: 1472

SEQ ID NO: 61549 - DNA, 1053 bp, Vibrio parahaemolyticus; identical to SEQ ID NO: 1473
  CDS (1)..(1053)

SEQ ID NO: 61550 - protein, 350 aa, Vibrio parahaemolyticus; identical to SEQ ID NO: 1474

SEQ ID NO: 61551 - DNA, 1074 bp, Vibrio parahaemolyticus; identical to SEQ ID NO: 1475
  CDS (1)..(1074)

SEQ ID NO: 61552 - protein, 357 aa, Vibrio parahaemolyticus; identical to SEQ ID NO: 1476

SEQ ID NO: 61553 - DNA, 1083 bp, Pseudomonas syringae; identical to SEQ ID NO: 1477
  CDS (1)..(1083)

SEQ ID NO: 61554 - protein, 360 aa, Pseudomonas syringae; identical to SEQ ID NO: 1478

SEQ ID NO: 61555 - DNA, 1077 bp, Pseudomonas syringae; identical to SEQ ID NO: 1479
  CDS (1)..(1077)

SEQ ID NO: 61556 - protein, 358 aa, Pseudomonas syringae; identical to SEQ ID NO: 1480

SEQ ID NO: 61557 - DNA, 1062 bp, Pseudomonas putida; identical to SEQ ID NO: 1481
  CDS (1)..(1062)

SEQ ID NO: 61558 - protein, 353 aa, Pseudomonas putida; identical to SEQ ID NO: 1482

SEQ ID NO: 61559 - DNA, 1113 bp, Pseudomonas putida; identical to SEQ ID NO: 1483
  CDS (1)..(1113)

SEQ ID NO: 61560 - protein, 370 aa, Pseudomonas putida; identical to SEQ ID NO: 1484

SEQ ID NO: 61561 - DNA, 1086 bp, Bradyrhizobium japonicum; identical to SEQ ID NO: 1485
  CDS (1)..(1086)

SEQ ID NO: 61562 - protein, 361 aa, Bradyrhizobium japonicum; identical to SEQ ID NO: 1486

SEQ ID NO: 61563 - DNA, 1053 bp, Yersinia pestis; identical to SEQ ID NO: 1487
  CDS (1)..(1053)

SEQ ID NO: 61564 - protein, 350 aa, Yersinia pestis; identical to SEQ ID NO: 1488

SEQ ID NO: 61565 - DNA, 1038 bp, Wigglesworthia glossinidia brevipalpis; identical to SEQ ID NO: 1491
  CDS (1)..(1038)

SEQ ID NO: 61566 - protein, 345 aa, Wigglesworthia glossinidia brevipalpis; identical to SEQ ID NO: 1492

SEQ ID NO: 61567 - DNA, 1071 bp, Vibrio vulnificus; identical to SEQ ID NO: 1739
  CDS (1)..(1071)

SEQ ID NO: 61568 - protein, 356 aa, Vibrio vulnificus; identical to SEQ ID NO: 1740

SEQ ID NO: 61569 - DNA, 1053 bp, Vibrio vulnificus; identical to SEQ ID NO: 1493
  CDS (1)..(1053)

SEQ ID NO: 61570 - protein, 350 aa, Vibrio vulnificus; identical to SEQ ID NO: 1494

SEQ ID NO: 61571 - DNA, 1071 bp, Vibrio vulnificus; identical to SEQ ID NO: 1497
  CDS (1)..(1071)

SEQ ID NO: 61572 - protein, 356 aa, Vibrio vulnificus; identical to SEQ ID NO: 1498

SEQ ID NO: 61573 - DNA, 1062 bp, Synechococcus elongatus; identical to SEQ ID NO: 1499
  CDS (1)..(1062)

SEQ ID NO: 61574 - protein, 353 aa, Synechococcus elongatus; identical to SEQ ID NO: 1500

SEQ ID NO: 61575 - DNA, 1032 bp, Streptococcus mutans; identical to SEQ ID NO: 1501
  CDS (1)..(1032)

SEQ ID NO: 61576 - protein, 343 aa, Streptococcus mutans; identical to SEQ ID NO: 1502

SEQ ID NO: 61577 - DNA, 1035 bp, Streptococcus mutans; identical to SEQ ID NO: 1503
  CDS (1)..(1035)

SEQ ID NO: 61578 - protein, 344 aa, Streptococcus mutans; identical to SEQ ID NO: 1504

SEQ ID NO: 61579 - DNA, 1008 bp, Streptococcus agalactiae; identical to SEQ ID NO: 1505
  CDS (1)..(1008)

SEQ ID NO: 61580 - protein, 335 aa, Streptococcus agalactiae; identical to SEQ ID NO: 1506

SEQ ID NO: 61581 - DNA, 1065 bp, Shewanella oneidensis; identical to SEQ ID NO: 1507
  CDS (1)..(1065)

SEQ ID NO: 61582 - protein, 354 aa, Shewanella oneidensis; identical to SEQ ID NO: 1508

SEQ ID NO: 61583 - DNA, 1092 bp, Shewanella oneidensis; identical to SEQ ID NO: 1509
  CDS (1)..(1092)

SEQ ID NO: 61584 - protein, 363 aa, Shewanella oneidensis; identical to SEQ ID NO: 1510

SEQ ID NO: 61585 - DNA, 1059 bp, Shewanella oneidensis; identical to SEQ ID NO: 1511
  CDS (1)..(1059)

SEQ ID NO: 61586 - protein, 352 aa, Shewanella oneidensis; identical to SEQ ID NO: 1512

SEQ ID NO: 61587 - DNA, 1170 bp, Corynebacterium efficiens; identical to SEQ ID NO: 1515
  CDS (1)..(1170)

SEQ ID NO: 61588 - protein, 389 aa, Corynebacterium efficiens; identical to SEQ ID NO: 1516

SEQ ID NO: 61589 - DNA, 1134 bp, Bifidobacterium longum; identical to SEQ ID NO: 1517
  CDS (1)..(1134)

SEQ ID NO: 61590 - protein, 377 aa, Bifidobacterium longum; identical to SEQ ID NO: 1518

SEQ ID NO: 61591 - DNA, 1233 bp, Bifidobacterium longum; identical to SEQ ID NO: 1519
  CDS (1)..(1233)

SEQ ID NO: 61592 - protein, 410 aa, Bifidobacterium longum; identical to SEQ ID NO: 1520

SEQ ID NO: 61593 - DNA, 1221 bp, Phytophthora infestans; identical to SEQ ID NO: 1521
  CDS (20)..(1153)

SEQ ID NO: 61594 - protein, 377 aa, Phytophthora infestans; identical to SEQ ID NO: 1522

SEQ ID NO: 61595 - DNA, 1062 bp, Chlorobium tepidum; identical to SEQ ID NO: 1523
  CDS (1)..(1062)

SEQ ID NO: 61596 - protein, 353 aa, Chlorobium tepidum; identical to SEQ ID NO: 1524

SEQ ID NO: 61597 - DNA, 1074 bp, Xanthomonas campestris; identical to SEQ ID NO: 1525
  CDS (1)..(1074)

SEQ ID NO: 61598 - protein, 357 aa, Xanthomonas campestris; identical to SEQ ID NO: 1526

SEQ ID NO: 61599 - DNA, 1074 bp, Xanthomonas axonopodis; identical to SEQ ID NO: 1527
  CDS (1)..(1074)

SEQ ID NO: 61600 - protein, 357 aa, Xanthomonas axonopodis; identical to SEQ ID NO: 1528

SEQ ID NO: 61601 - DNA, 1080 bp, Ralstonia solanacearum; identical to SEQ ID NO: 1529
  CDS (1)..(1080)

SEQ ID NO: 61602 - protein, 359 aa, Ralstonia solanacearum; identical to SEQ ID NO: 1530

SEQ ID NO: 61603 - DNA, 1179 bp, Ralstonia solanacearum; identical to SEQ ID NO: 1531
  CDS (1)..(1179)

SEQ ID NO: 61604 - protein, 392 aa, Ralstonia solanacearum; identical to SEQ ID NO: 1532

SEQ ID NO: 61605 - DNA, 1065 bp, Synechococcus sp; identical to SEQ ID NO: 1533
  CDS (1)..(1065)

SEQ ID NO: 61606 - protein, 354 aa, Synechococcus sp; identical to SEQ ID NO: 1534

SEQ ID NO: 61607 - DNA, 1035 bp, Escherichia coli; identical to SEQ ID NO: 1535
  CDS (1)..(1035)

SEQ ID NO: 61608 - protein, 344 aa, Escherichia coli; identical to SEQ ID NO: 1536

SEQ ID NO: 61609 - DNA, 1200 bp, Stigmatella aurantiaca; identical to SEQ ID NO: 1537
  CDS (62)..(1147)

SEQ ID NO: 61610 - protein, 361 aa, Stigmatella aurantiaca; identical to SEQ ID NO: 1538

SEQ ID NO: 61611 - DNA, 1083 bp, Amycolatopsis mediterranei; identical to SEQ ID NO: 1541
  CDS (1)..(1083)

SEQ ID NO: 61612 - protein, 360 aa, Amycolatopsis mediterranei; identical to SEQ ID NO: 1542

SEQ ID NO: 61613 - DNA, 1053 bp, Pasteurella multocida; identical to SEQ ID NO: 1543
  CDS (1)..(1053)

SEQ ID NO: 61614 - protein, 350 aa, Pasteurella multocida; identical to SEQ ID NO: 1544

SEQ ID NO: 61615 - DNA, 1086 bp, Pasteurella multocida; identical to SEQ ID NO: 1545
  CDS (1)..(1086)

SEQ ID NO: 61616 - protein, 361 aa, Pasteurella multocida; identical to SEQ ID NO: 1546

SEQ ID NO: 61617 - DNA, 1125 bp, Emericella nidulans; identical to SEQ ID NO: 1547
  CDS (1)..(1125)

SEQ ID NO: 61618 - protein, 374 aa, Emericella nidulans; identical to SEQ ID NO: 1548

SEQ ID NO: 61619 - DNA, 1089 bp, Emericella nidulans; identical to SEQ ID NO: 1549
  CDS (1)..(1089)

SEQ ID NO: 61620 - protein, 362 aa, Emericella nidulans; identical to SEQ ID NO: 1550

SEQ ID NO: 61621 - DNA, 1239 bp, Vibrio cholerae; identical to SEQ ID NO: 1551
  CDS (114)..(1175)

SEQ ID NO: 61622 - protein, 353 aa, Vibrio cholerae; identical to SEQ ID NO: 1552

SEQ ID NO: 61623 - DNA, 2184 bp, Candida albicans; identical to SEQ ID NO: 1553
  CDS (461)..(1573)

SEQ ID NO: 61624 - protein, 370 aa, Candida albicans; identical to SEQ ID NO: 1554

SEQ ID NO: 61625 - DNA, 1047 bp, Buchnera aphidicola; identical to SEQ ID NO: 1555
  CDS (1)..(1047)

SEQ ID NO: 61626 - protein, 348 aa, Buchnera aphidicola; identical to SEQ ID NO: 1556

SEQ ID NO: 61627 - DNA, 1047 bp, Buchnera aphidicola; identical to SEQ ID NO: 1557
  CDS (1)..(1047)

SEQ ID NO: 61628 - protein, 348 aa, Buchnera aphidicola; identical to SEQ ID NO: 1558

SEQ ID NO: 61629 - DNA, 1047 bp, Erwinia herbicola; identical to SEQ ID NO: 1559
  CDS (1)..(1047)

SEQ ID NO: 61630 - protein, 348 aa, Erwinia herbicola; identical to SEQ ID NO: 1560

SEQ ID NO: 61631 - DNA, 1047 bp, Salmonella typhimurium; identical to SEQ ID NO: 1561
  CDS (1)..(1047)

SEQ ID NO: 61632 - protein, 348 aa, Salmonella typhimurium; identical to SEQ ID NO: 1562

SEQ ID NO: 61633 - DNA, 1047 bp, Shigella flexneri; identical to SEQ ID NO: 2473
  CDS (1)..(1047)

SEQ ID NO: 61634 - protein, 348 aa, Shigella flexneri; identical to SEQ ID NO: 2474

SEQ ID NO: 61635 - DNA, 25 bp, Artificial sequence
  Primer sequence
atgttcattaaaaacgatcacgccg

SEQ ID NO: 61636 - DNA, 25 bp, Artificial sequence
  Primer sequence
ctattttttcaaggcctttcttctg

SEQ ID NO: 61637 - protein, 353 aa, Artificial sequence; identical to SEQ ID NO: 24922
  Consensus
  Variant (2)..(3): Xaa in position 2 to 3 is any amino acid
  Variant (5)..(11): Xaa in position 5 to 11 is any amino acid
  Variant (13)..(24): Xaa in position 13 to 24 is any amino acid
  Variant (26)..(30): Xaa in position 26 to 30 is any amino acid
  Variant (32)..(33): Xaa in position 32 to 33 is any amino acid
  Variant (35)..(35): Xaa in position 35 is any amino acid
  Variant (37)..(37): Xaa in position 37 is any amino acid
  Variant (39)..(46): Xaa in position 39 to 46 is any amino acid
  Variant (51)..(51): Xaa in position 51 is any amino acid
  Variant (54)..(56): Xaa in position 54 to 56 is any amino acid
  Variant (58)..(59): Xaa in position 58 to 59 is any amino acid
  Variant (62)..(63): Xaa in position 62 to 63 is any amino acid
  Variant (65)..(76): Xaa in position 65 to 76 is any amino acid
  Variant (78)..(80): Xaa in position 78 to 80 is any amino acid
  Variant (83)..(83): Xaa in position 83 is any amino acid
  Variant (85)..(85): Xaa in position 85 is any amino acid
  Variant (91)..(93): Xaa in position 91 to 93 is any amino acid
  Variant (100)..(100): Xaa in position 100 is any amino acid
  Variant (103)..(112): Xaa in position 103 to 112 is any amino acid
  Variant (115)..(117): Xaa in position 115 to 117 is any amino acid
  Variant (119)..(119): Xaa in position 119 is any amino acid
  Variant (121)..(130): Xaa in position 121 to 130 is any amino acid
  Variant (132)..(132): Xaa in position 132 is any amino acid
  Variant (134)..(134): Xaa in position 134 is any amino acid
  Variant (136)..(136): Xaa in position 136 is any amino acid
  Variant (139)..(142): Xaa in position 139 to 142 is any amino acid
  Variant (144)..(146): Xaa in position 144 to 146 is any amino acid
  Variant (148)..(152): Xaa in position 148 to 152 is any amino acid
  Variant (163)..(163): Xaa in position 163 is any amino acid
  Variant (166)..(168): Xaa in position 166 to 168 is any amino acid
  Variant (171)..(171): Xaa in position 171 is any amino acid
  Variant (174)..(174): Xaa in position 174 is any amino acid
  Variant (176)..(176): Xaa in position 176 is any amino acid
  Variant (181)..(181): Xaa in position 181 is any amino acid
  Variant (183)..(183): Xaa in position 183 is any amino acid
  Variant (185)..(188): Xaa in position 185 to 188 is any amino acid
  Variant (190)..(191): Xaa in position 190 to 191 is any amino acid
  Variant (193)..(195): Xaa in position 193 to 195 is any amino acid
  Variant (197)..(199): Xaa in position 197 to 199 is any amino acid
  Variant (201)..(201): Xaa in position 201 is any amino acid
  Variant (203)..(208): Xaa in position 203 to 208 is any amino acid
  Variant (210)..(215): Xaa in position 210 to 215 is any amino acid
  Variant (217)..(217): Xaa in position 217 is any amino acid
  Variant (220)..(222): Xaa in position 220 to 222 is any amino acid
  Variant (224)..(225): Xaa in position 224 to 225 is any amino acid
  Variant (230)..(238): Xaa in position 230 to 238 is any amino acid
  Variant (241)..(269): Xaa in position 241 to 269 is any amino acid
  Variant (271)..(271): Xaa in position 271 is any amino acid
  Variant (274)..(274): Xaa in position 274 is any amino acid
  Variant (277)..(277): Xaa in position 277 is any amino acid
  Variant (279)..(282): Xaa in position 279 to 282 is any amino acid
  Variant (284)..(285): Xaa in position 284 to 285 is any amino acid
  Variant (287)..(292): Xaa in position 287 to 292 is any amino acid
  Variant (294)..(296): Xaa in position 294 to 296 is any amino acid
  Variant (298)..(305): Xaa in position 298 to 305 is any amino acid
  Variant (307)..(307): Xaa in position 307 is any amino acid
  Variant (309)..(309): Xaa in position 309 is any amino acid
  Variant (312)..(315): Xaa in position 312 to 315 is any amino acid
  Variant (317)..(317): Xaa in position 317 is any amino acid
  Variant (319)..(334): Xaa in position 319 to 334 is any amino acid
  Variant (337)..(337): Xaa in position 337 is any amino acid
  Variant (339)..(339): Xaa in position 339 is any amino acid
  Variant (342)..(342): Xaa in position 342 is any amino acid
  Variant (344)..(345): Xaa in position 344 to 345 is any amino acid
  Variant (347)..(348): Xaa in position 347 to 348 is any amino acid
  Variant (350)..(352): Xaa in position 350 to 352 is any amino acid

SEQ ID NO: 61638 - protein, 72 aa, Artificial sequence; identical to SEQ ID NO: 2906
  Consensus
  Variant (5)..(5): Xaa in position 5 is Ile, Val, Ser or Leu
  Variant (6)..(6): Xaa in position 6 is His or Asp
  Variant (7)..(7): Xaa in position 7 is Asp or Asn
  Variant (8)..(10): Xaa in position 8 to 10 is any amino acid
  Variant (11)..(11): Xaa in position 11 is Ala, Val or Gly
  Variant (12)..(12): Xaa in position 12 is any amino acid
  Variant (13)..(13): Xaa in position 13 is Glu, Asp, Ala or Gln
  Variant (15)..(15): Xaa in position 15 is Ala, Gly or Cys
  Variant (16)..(17): Xaa in position 16 to 17 is any amino acid
  Variant (18)..(18): Xaa in position 18 is Leu, Ile or Phe
  Variant (19)..(28): Xaa in position 19 to 28 is any amino acid
  Variant (29)..(30): Xaa in position 29 to 30 is any or no amino acid
  Variant (31)..(31): Xaa in position 31 is Leu, Ile, Phe or Met
  Variant (32)..(32): Xaa in position 32 is any amino acid
  Variant (33)..(33): Xaa in position 33 is Ile, Val, Leu or Met
  Variant (34)..(34): Xaa in position 34 is Val, Ile or Leu
  Variant (37)..(37): Xaa in position 37 is Val, Ala or Thr
  Variant (39)..(39): Xaa in position 39 is Phe, Leu, Thr or Val
  Variant (40)..(40): Xaa in position 40 is Glu or Ala
  Variant (45)..(46): Xaa in position 45 to 46 is any amino acid
  Variant (47)..(47): Xaa in position 47 is any or no amino acid
  Variant (49)..(49): Xaa in position 49 is Trp or Tyr
  Variant (50)..(50): Xaa in position 50 is Lys or Arg
  Variant (52)..(52): Xaa in position 52 is Leu, Phe, Met or Tyr
  Variant (53)..(53): Xaa in position 53 is Ile, Val, Ala or Leu
  Variant (54)..(54): Xaa in position 54 is any amino acid
  Variant (55)..(55): Xaa in position 55 is Asp, Glu or Gln
  Variant (57)..(57): Xaa in position 57 is any amino acid
  Variant (58)..(58): Xaa in position 58 is Leu, Met, Ile, Val, Ala or Thr
  Variant (59)..(59): Xaa in position 59 is Asp, Asn or Ser
  Variant (60)..(63): Xaa in position 60 to 63 is any amino acid
  Variant (64)..(64): Xaa in position 64 is Ile, Val, Leu or Met
  Variant (65)..(66): Xaa in position 65 to 66 is any amino acid
  Variant (68)..(68): Xaa in position 68 is Leu, Ile, Met or Val
  Variant (69)..(70): Xaa in position 69 to 70 is any amino acid
  Variant (71)..(71): Xaa in position 71 is Ala, Ser, Gly, Val or Thr

SEQ ID NO: 61639 - protein, 76 aa, Artificial sequence; identical to SEQ ID NO: 2907
  Consensus
  Variant (1)..(1): Xaa in position 1 is Ala or Ser
  Variant (2)..(2): Xaa in position 2 is Ile or Val
  Variant (6)..(6): Xaa in position 6 is Thr, Ser or Asn
  Variant (7)..(7): Xaa in position 7 is Thr, Val, Ala, Ser or Ile
  Variant (8)..(8): Xaa in position 8 is Glu or Ala
  Variant (9)..(9): Xaa in position 9 is Ser, Asp or Asn
  Variant (11)..(11): Xaa in position 11 is any amino acid
  Variant (14)..(14): Xaa in position 14 is Glu, Gln, Phe or Met
  Variant (15)..(15): Xaa in position 15 is Leu, Met, Val, Phe or Ile
  Variant (16)..(16): Xaa in position 16 is Ala, Ser, Thr, Cys or Val
  Variant (18)..(18): Xaa in position 18 is Gly, Ala or Asn
  Variant (19)..(21): Xaa in position 19 to 21 is any amino acid
  Variant (22)..(22): Xaa in position 22 is Pro or Ala
  Variant (23)..(23): Xaa in position 23 is Val, Ile, Thr or Leu
  Variant (25)..(25): Xaa in position 25 is Phe, Met, Tyr or Ile
  Variant (28)..(28): Xaa in position 28 is any amino acid
  Variant (29)..(29): Xaa in position 29 is Thr, Ser or Arg
  Variant (30)..(30): Xaa in position 30 is any amino acid
  Variant (32)..(35): Xaa in position 32 to 35 is any amino acid
  Variant (36)..(36): Xaa in position 36 is Ala or Met
  Variant (37)..(37): Xaa in position 37 is any amino acid
  Variant (38)..(38): Xaa in position 38 is Asp, Asn or Glu
  Variant (39)..(39): Xaa in position 39 is Ala or Gly
  Variant (40)..(41): Xaa in position 40 to 41 is any amino acid
  Variant (42)..(42): Xaa in position 42 is Ala or Ser
  Variant (43)..(43): Xaa in position 43 is Ala, Ser, Val or Thr
  Variant (44)..(46): Xaa in position 44 to 46 is any amino acid
  Variant (47)..(47): Xaa in position 47 is His or Gln
  Variant (48)..(48): Xaa in position 48 is any amino acid
  Variant (49)..(49): Xaa in position 49 is Phe, Tyr, His or Val
  Variant (50)..(51): Xaa in position 50 to 51 is any amino acid
  Variant (52)..(55): Xaa in position 52 to 55 is any or no amino acid
  Variant (57)..(60): Xaa in position 57 to 60 is any amino acid
  Variant (61)..(62): Xaa in position 61 to 62 is any or no amino acid
  Variant (63)..(63): Xaa in position 63 is Thr or Ser
  Variant (64)..(64): Xaa in position 64 is any amino acid
  Variant (67)..(69): Xaa in position 67 to 69 is any amino acid
  Variant (70)..(70): Xaa in position 70 is His or Phe
  Variant (71)..(71): Xaa in position 71 is Val, Ile, Leu or Ala
  Variant (72)..(72): Xaa in position 72 is Ile or Val
  Variant (73)..(73): Xaa in position 73 is Leu or Met
  Variant (76)..(76): Xaa in position 76 is Gly, Ala or Ser

SEQ ID NO: 61640 - protein, 83 aa, Artificial sequence; identical to SEQ ID NO: 2908
  Consensus
  Variant (1)..(1): Xaa in position 1 is Leu, Ile or Val
  Variant (2)..(2): Xaa in position 2 is Met, Val, Ile or Leu
  Variant (3)..(3): Xaa in position 3 is Ile or Val
  Variant (5)..(5): Xaa in position 5 is Cys, Phe, Ala, Thr or Tyr
  Variant (6)..(6): Xaa in position 6 is Ser, Asn or Ala
  Variant (8)..(8): Xaa in position 8 is Gly, Ala or Asp
  Variant (10)..(10): Xaa in position 10 is Ser or Cys
  Variant (11)..(11): Xaa in position 11 is any amino acid
  Variant (13)..(15): Xaa in position 13 to 15 is any amino acid
  Variant (16)..(16): Xaa in position 16 is Arg, Asn, Lys, Leu or Glu
  Variant (18)..(19): Xaa in position 18 to 19 is any amino acid
  Variant (20)..(20): Xaa in position 20 is Val or Ile
  Variant (21)..(26): Xaa in position 21 to 26 is any amino acid
  Variant (27)..(27): Xaa in position 27 is Gln, Asn or Arg
  Variant (28)..(28): Xaa in position 28 is Ile, Leu, Val, Arg or Met
  Variant (29)..(30): Xaa in position 29 to 30 is any amino acid
  Variant (31)..(31): Xaa in position 31 is Gly, Asn or Asp
  Variant (32)..(32): Xaa in position 32 is any amino acid
  Variant (33)..(37): Xaa in position 33 to 37 is any or no amino acid
  Variant (38)..(38): Xaa in position 38 is Ile, Val or Leu
  Variant (39)..(39): Xaa in position 39 is any amino acid
  Variant (41)..(41): Xaa in position 41 is any amino acid
  Variant (43)..(43): Xaa in position 43 is Ile, Leu, Val, Ala or Met
  Variant (46)..(46): Xaa in position 46 is His, Phe, Asn or Tyr
  Variant (47)..(47): Xaa in position 47 is Leu or Ile
  Variant (48)..(49): Xaa in position 48 to 49 is any amino acid
  Variant (51)..(51): Xaa in position 51 is any amino acid
  Variant (53)..(57): Xaa in position 53 to 57 is any amino acid
  Variant (58)..(69): Xaa in position 58 to 69 is any or no amino acid
  Variant (71)..(71): Xaa in position 71 is any amino acid
  Variant (73)..(73): Xaa in position 73 is Ile or Val
  Variant (76)..(76): Xaa in position 76 is any amino acid
  Variant (78)..(78): Xaa in position 78 is Ile, Leu or Val
  Variant (79)..(79): Xaa in position 79 is any amino acid
  Variant (80)..(80): Xaa in position 80 is Trp, Ile, Leu or Phe
  Variant (81)..(82): Xaa in position 81 to 82 is any amino acid
  Variant (83)..(83): Xaa in position 83 is Thr or Ser

SEQ ID NO: 61641 - DNA, 3844 bp, Saccharomyces cerevisiae; identical to SEQ ID NO: 667
  CDS (1218)..(3269)

SEQ ID NO: 61642 - protein, 683 aa, Saccharomyces cerevisiae; identical to SEQ ID NO: 668

SEQ ID NO: 61643 - DNA, 1713 bp, Glycine max; identical to SEQ ID NO: 669
  CDS (1)..(1713)

SEQ ID NO: 61644 - protein, 570 aa, Glycine max; identical to SEQ ID NO: 670

SEQ ID NO: 61645 - DNA, 1644 bp, Glycine max; identical to SEQ ID NO: 671
  CDS (1)..(1644)

SEQ ID NO: 61646 - protein, 547 aa, Glycine max; identical to SEQ ID NO: 672

SEQ ID NO: 61647 - DNA, 1641 bp, Glycine max; identical to SEQ ID NO: 673
  CDS (1)..(1641)

SEQ ID NO: 61648 - protein, 546 aa, Glycine max; identical to SEQ ID NO: 674

SEQ ID NO: 61649 - DNA, 1668 bp, Zea mays; identical to SEQ ID NO: 675
  misc_feature (603)..(603): n is a, c, g, or t
  CDS (1)..(1668)

SEQ ID NO: 61650 - protein, 555 aa, Zea mays; identical to SEQ ID NO: 676

SEQ ID NO: 61651 - DNA, 1659 bp, Brassica napus; identical to SEQ ID NO: 677
  CDS (1)..(1659)

SEQ ID NO: 61652 - protein, 552 aa, Brassica napus; identical to SEQ ID NO: 678

SEQ ID NO: 61653 - DNA, 1689 bp, Glycine max; identical to SEQ ID NO: 679
  CDS (1)..(1689)

SEQ ID NO: 61654 - protein, 562 aa, Glycine max; identical to SEQ ID NO: 680

SEQ ID NO: 61655 - DNA, 3359 bp, Methanothrix soehngenii; identical to SEQ ID NO: 681
  CDS (310)..(2328)

SEQ ID NO: 61656 - protein, 672 aa, Methanothrix soehngenii [sequence omitted]

SEQ ID NO: 61657 - DNA, 3802 bp, Alcaligenes eutrophus; identical to SEQ ID NO: 683
  CDS (722)..(2704)

SEQ ID NO: 61658 - protein, 660 aa, Alcaligenes eutrophus [sequence omitted]

SEQ ID NO: 61659 - DNA, 1845 bp, Phanerochaete chrysosporium; identical to SEQ ID NO: 685
  CDS (1)..(1845)

SEQ ID NO: 61660 - protein, 614 aa, Phanerochaete chrysosporium; identical to SEQ ID NO: 686

SEQ ID NO: 61661 - DNA, 1938 bp, Pseudomonas aeruginosa; identical to SEQ ID NO: 687
  CDS (1)..(1938)

SEQ ID NO: 61662 - protein, 645 aa, Pseudomonas aeruginosa [sequence omitted]

SEQ ID NO: 61663 - DNA, 1668 bp, Pseudomonas aeruginosa; identical to SEQ ID NO: 689
  CDS (1)..(1668)

SEQ ID NO: 61664 - protein, 555 aa, Pseudomonas aeruginosa; identical to SEQ ID NO: 690

SEQ ID NO: 61665 - DNA, 1947 bp, Bacillus halodurans; identical to SEQ ID NO: 691
  CDS (1)..(1947)

SEQ ID NO: 61666 - protein, 648 aa, Bacillus halodurans; identical to SEQ ID NO: 692

SEQ ID NO: 61667 - DNA, 1707 bp, Staphylococcus aureus; identical to SEQ ID NO: 693
  CDS (1)..(1707)

SEQ ID NO: 61668 - protein, 568 aa, Staphylococcus aureus; identical to SEQ ID NO: 694

SEQ ID NO: 61669 - DNA, 1887 bp, Salmonella enterica subsp. enterica serovar Typhi; identical to SEQ ID NO: 695
  CDS (1)..(1887)

SEQ ID NO: 61670 - protein, 628 aa, Salmonella enterica subsp. enterica serovar Typhi; identical to SEQ ID NO: 696

SEQ ID NO: 61671 - DNA, 1575 bp, Nostoc sp. PCC 7120; identical to SEQ ID NO: 697
  CDS (1)..(1575)

SEQ ID NO: 61672 - protein, 524 aa, Nostoc sp. PCC 7120; identical to SEQ ID NO: 698

SEQ ID NO: 61673 - DNA, 1992 bp, Brucella melitensis; identical to SEQ ID NO: 699
  CDS (1)..(1992)

SEQ ID NO: 61674 - protein, 663 aa, Brucella melitensis; identical to SEQ ID NO: 700

SEQ ID NO: 61675 - DNA, 1707 bp, Brucella melitensis; identical to SEQ ID NO: 701
  CDS (1)..(1707)

SEQ ID NO: 61676 - protein, 568 aa, Brucella melitensis; identical to SEQ ID NO: 702

SEQ ID NO: 61677 - DNA, 1959 bp, Yersinia pestis; identical to SEQ ID NO: 703
  CDS (1)..(1959)

SEQ ID NO: 61678 - protein, 652 aa, Yersinia pestis; identical to SEQ ID NO: 704

SEQ ID NO: 61679 - DNA, 1716 bp, Bacillus halodurans; identical to SEQ ID NO: 705
  CDS (1)..(1716)

SEQ ID NO: 61680 - protein, 571 aa, Bacillus halodurans; identical to SEQ ID NO: 706

SEQ ID NO: 61681 - DNA, 2004 bp, Halobacterium sp. NRC-1; identical to SEQ ID NO: 707
  CDS (1)..(2004)

SEQ ID NO: 61682 - protein, 667 aa, Halobacterium sp. NRC-1; identical to SEQ ID NO: 708

SEQ ID NO: 61683 - DNA, 1944 bp, Caulobacter crescentus; identical to SEQ ID NO: 709
  CDS (1)..(1944)

SEQ ID NO: 61684 - protein, 647 aa, Caulobacter crescentus [sequence omitted]

SEQ ID NO: 61685 - DNA, 1716 bp, Sulfolobus solfataricus; identical to SEQ ID NO: 711
  CDS (1)..(1716)

SEQ ID NO: 61686 - protein, 571 aa, Sulfolobus solfataricus; identical to SEQ ID NO: 712

SEQ ID NO: 61687 - DNA, 2001 bp, Sulfolobus solfataricus; identical to SEQ ID NO: 713
  CDS (1)..(2001)

SEQ ID NO: 61688 - protein, 666 aa, Sulfolobus solfataricus; identical to SEQ ID NO: 714

SEQ ID NO: 61689 - DNA, 1959 bp, Escherichia coli; identical to SEQ ID NO: 715
  CDS (1)..(1959)

SEQ ID NO: 61690 - protein, 652 aa, Escherichia coli; identical to SEQ ID NO: 716

SEQ ID NO: 61691 - DNA, 1533 bp, Aquifex aeolicus; identical to SEQ ID NO: 717
  CDS (1)..(1533)

SEQ ID NO: 61692 - protein, 510 aa, Aquifex aeolicus; identical to SEQ ID NO: 718

SEQ ID NO: 61693 - DNA, 1950 bp, Deinococcus radiodurans; identical to SEQ ID NO: 719
  CDS (1)..(1950)

SEQ ID NO: 61694 - protein, 649 aa, Deinococcus radiodurans [sequence omitted]

SEQ ID NO: 61695 - DNA, 1929 bp, Deinococcus radiodurans; identical to SEQ ID NO: 721
  CDS (1)..(1929)

SEQ ID NO: 61696 - protein, 642 aa, Deinococcus radiodurans; identical to SEQ ID NO: 722

SEQ ID NO: 61697 - DNA, 1899 bp, Vibrio cholerae; identical to SEQ ID NO: 723
  CDS (1)..(1899)

SEQ ID NO: 61698 - protein, 632 aa, Vibrio cholerae; identical to SEQ ID NO: 724

SEQ ID NO: 61699 - DNA, 1956 bp, Pseudomonas aeruginosa; identical to SEQ ID NO: 725
  CDS (1)..(1956)

SEQ ID NO: 61700 - protein, 651 aa, Pseudomonas aeruginosa [sequence omitted]

SEQ ID NO: 61701 - DNA, 1497 bp, Sulfolobus solfataricus; identical to SEQ ID NO: 727
  CDS (1)..(1497)

SEQ ID NO: 61702 - protein, 498 aa, Sulfolobus solfataricus; identical to SEQ ID NO: 728

SEQ ID NO: 61703 - DNA, 1869 bp, Sulfolobus solfataricus; identical to SEQ ID NO: 729
  CDS (1)..(1869)

SEQ ID NO: 61704 - protein, 622 aa, Sulfolobus solfataricus; identical to SEQ ID NO: 730

SEQ ID NO: 61705 - DNA, 1989 bp, Helicobacter pylori; identical to SEQ ID NO: 731
  CDS (1)..(1989)

SEQ ID NO: 61706 - protein, 662 aa, Helicobacter pylori [sequence omitted]

SEQ ID NO: 61707 - DNA, 1989 bp, Archaeoglobus fulgidus; identical to SEQ ID NO: 733
  CDS (1)..(1989)

SEQ ID NO: 61708 - protein, 662 aa, Archaeoglobus fulgidus; identical to SEQ ID NO: 734

SEQ ID NO: 61709 - DNA, 1932 bp, Archaeoglobus fulgidus; identical to SEQ ID NO: 735
  CDS (1)..(1932)

SEQ ID NO: 61710 - protein, 643 aa, Archaeoglobus fulgidus; identical to SEQ ID NO: 736

SEQ ID NO: 61711 - DNA, 1542 bp, Aeropyrum pernix; identical to SEQ ID NO: 737
  CDS (1)..(1542)

SEQ ID NO: 61712 - protein, 513 aa, Aeropyrum pernix; identical to SEQ ID NO: 738

SEQ ID NO: 61713 - DNA, 1944 bp, Xylella fastidiosa; identical to SEQ ID NO: 739
  CDS (1)..(1944)

SEQ ID NO: 61714 - protein, 647 aa, Xylella fastidiosa [sequence omitted]

SEQ ID NO: 61715 - DNA, 1827 bp, Sulfolobus solfataricus; identical to SEQ ID NO: 741
  CDS (1)..(1827)

SEQ ID NO: 61716 - protein, 608 aa, Sulfolobus solfataricus; identical to SEQ ID NO: 742

SEQ ID NO: 61717 - DNA, 1959 bp, Sulfolobus solfataricus; identical to SEQ ID NO: 743
  CDS (1)..(1959)

SEQ ID NO: 61718 - protein, 652 aa, Sulfolobus solfataricus; identical to SEQ ID NO: 744

SEQ ID NO: 61719 - DNA, 2046 bp, Archaeoglobus fulgidus; identical to SEQ ID NO: 745
  CDS (1)..(2046)

SEQ ID NO: 61720 - protein, 681 aa, Archaeoglobus fulgidus; identical to SEQ ID NO: 746

SEQ ID NO: 61721 - DNA, 1761 bp, Archaeoglobus fulgidus; identical to SEQ ID NO: 747
  CDS (1)..(1761)

SEQ ID NO: 61722 - protein, 586 aa, Archaeoglobus fulgidus; identical to SEQ ID NO: 748

SEQ ID NO: 61723 - DNA, 1983 bp, Aeropyrum pernix; identical to SEQ ID NO: 749
  CDS (1)..(1983)

SEQ ID NO: 61724 - protein, 660 aa, Aeropyrum pernix; identical to SEQ ID NO: 750

SEQ ID NO: 61725 - DNA, 1677 bp, Methanobacterium thermoautotrophicum; identical to SEQ ID NO: 751
  CDS (1)..(1677)

SEQ ID NO: 61726 - protein, 558 aa, Methanobacterium thermoautotrophicum; identical to SEQ ID NO: 752

SEQ ID NO: 61727 - DNA, 1929 bp, Archaeoglobus fulgidus; identical to SEQ ID NO: 753
  CDS (1)..(1929)

SEQ ID NO: 61728 - protein, 642 aa, Archaeoglobus fulgidus; identical to SEQ ID NO: 754

SEQ ID NO: 61729 - DNA, 1974 bp, Campylobacter jejuni; identical to SEQ ID NO: 755
  CDS (1)..(1974)

SEQ ID NO: 61730 - protein, 657 aa, Campylobacter jejuni [sequence omitted]

SEQ ID NO: 61731 - DNA, 1956 bp, Pseudomonas aeruginosa; identical to SEQ ID NO: 757
  CDS (1)..(1956)

SEQ ID NO: 61732 - protein, 651 aa, Pseudomonas aeruginosa; identical to SEQ ID NO: 758

SEQ ID NO: 61733 - DNA, 1887 bp, Pseudomonas aeruginosa; identical to SEQ ID NO: 759
  CDS (1)..(1887)

SEQ ID NO: 61734 - protein, 628 aa, Pseudomonas aeruginosa [sequence omitted]

SEQ ID NO: 61735 - DNA, 1971 bp, Halobacterium sp. NRC-1; identical to SEQ ID NO: 761
  CDS (1)..(1971)

SEQ ID NO: 61736 - protein, 656 aa, Halobacterium sp. NRC-1; identical to SEQ ID NO: 762

SEQ ID NO: 61737 - DNA, 1719 bp, Bacillus subtilis; identical to SEQ ID NO: 763
  CDS (1)..(1719)

SEQ ID NO: 61738 - protein, 572 aa, Bacillus subtilis; identical to SEQ ID NO: 764

SEQ ID NO: 61739 - DNA, 2019 bp, Phycomyces blakesleeanus; identical to SEQ ID NO: 765
  CDS (1)..(2019)

SEQ ID NO: 61740 - protein, 672 aa, Phycomyces blakesleeanus [sequence omitted]

SEQ ID NO: 61741 - DNA, 2674 bp, Drosophila melanogaster; identical to SEQ ID NO: 767
  CDS (419)..(2164)

SEQ ID NO: 61742 - protein, 581 aa, Drosophila melanogaster; identical to SEQ ID NO: 768

SEQ ID NO: 61743 - DNA, 1962 bp, Synechocystis sp; identical to SEQ ID NO: 769
  CDS (1)..(1962)

SEQ ID NO: 61744 - protein, 653 aa, Synechocystis sp [sequence omitted]

SEQ ID NO: 61745 - DNA, 2013 bp, Emericella nidulans, Aspergillus nidulans; identical to SEQ ID NO: 771
  CDS (1)..(2013)

SEQ ID NO: 61746 - protein, 670 aa, Emericella nidulans, Aspergillus nidulans [sequence omitted]

SEQ ID NO: 61747 - DNA, 1881 bp, Neurospora crassa; identical to SEQ ID NO: 773
  CDS (1)..(1881)

SEQ ID NO: 61748 - protein, 626 aa, Neurospora crassa [sequence omitted]

SEQ ID NO: 61749 - DNA, 1971 bp, Rhodobacter capsulatus; identical to SEQ ID NO: 775
  CDS (1)..(1971)

SEQ ID NO: 61750 - protein, 656 aa, Rhodobacter capsulatus [sequence omitted]

SEQ ID NO: 61751 - DNA, 2043 bp, Caenorhabditis elegans; identical to SEQ ID NO: 777
  CDS (1)..(2043)

SEQ ID NO: 61752 - protein, 680 aa, Caenorhabditis elegans; identical to SEQ ID NO: 778

SEQ ID NO: 61753 - DNA, 1956 bp, Streptomyces coelicolor; identical to SEQ ID NO: 779
  CDS (1)..(1956)

SEQ ID NO: 61754 - protein, 651 aa, Streptomyces coelicolor; identical to SEQ ID NO: 780

SEQ ID NO: 61755 - DNA, 1989 bp, Schizosaccharomyces pombe; identical to SEQ ID NO: 781
  CDS (1)..(1989)

SEQ ID NO: 61756 - protein, 662 aa, Schizosaccharomyces pombe [sequence omitted]

SEQ ID NO: 61757 - DNA, 2013 bp, Pyrobaculum aerophilum; identical to SEQ ID NO: 783
  CDS (1)..(2013)

SEQ ID NO: 61758 - protein, 670 aa, Pyrobaculum aerophilum [sequence omitted]

SEQ ID NO: 61759 - DNA, 2010 bp, Penicillium chrysogenum; identical to SEQ ID NO: 785
  CDS (1)..(2010)

SEQ ID NO: 61760 - protein, 669 aa, Penicillium chrysogenum; identical to SEQ ID NO: 786

SEQ ID NO: 61761 - DNA, 2323 bp, Homo sapiens; identical to SEQ ID NO: 787
  CDS (92)..(2152)

SEQ ID NO: 61762 - protein, 686 aa, Homo sapiens; identical to SEQ ID NO: 788

SEQ ID NO: 61763 - DNA, 1950 bp, Pseudomonas putida; identical to SEQ ID NO: 789
  CDS (1)..(1950)

SEQ ID NO: 61764 - protein, 649 aa, Pseudomonas putida; identical to SEQ ID NO: 790

SEQ ID NO: 61765 - DNA, 2444 bp, Lysobacter; identical to SEQ ID NO: 791
  CDS (337)..(2232)

SEQ ID NO: 61766 - protein, 631 aa, Lysobacter; identical to SEQ ID NO: 792

SEQ ID NO: 61767 - DNA, 2016 bp, Debaryomyces hansenii; identical to SEQ ID NO: 793
  CDS (1)..(2016)

SEQ ID NO: 61768 - protein, 671 aa, Debaryomyces hansenii; identical to SEQ ID NO: 794

SEQ ID NO: 61769 - DNA, 2040 bp, Debaryomyces hansenii; identical to SEQ ID NO: 795
  CDS (1)..(2040)

SEQ ID NO: 61770 - protein, 679 aa, Debaryomyces hansenii; identical to SEQ ID NO: 796

SEQ ID NO: 61771 - DNA, 1974 bp, Yarrowia lipolytica; identical to SEQ ID NO: 797
  CDS (1)..(1974)

SEQ ID NO: 61772 - protein, 657 aa, Yarrowia lipolytica; identical to SEQ ID NO: 798

SEQ ID NO: 61773 - DNA, 2124 bp, Kluyveromyces lactis; identical to SEQ ID NO: 799
  CDS (1)..(2124)

SEQ ID NO: 61774 - protein, 707 aa, Kluyveromyces lactis; identical to SEQ ID NO: 800

SEQ ID NO: 61775 - DNA, 1962 bp, Pseudomonas putida; identical to SEQ ID NO: 801
  CDS (1)..(1962)

SEQ ID NO: 61776 - protein, 653 aa, Pseudomonas putida; identical to SEQ ID NO: 802

SEQ ID NO: 61777 - DNA, 1644 bp, Acinetobacter sp; identical to SEQ ID NO: 803
  CDS (1)..(1644)

SEQ ID NO: 61778 - protein, 547 aa, Acinetobacter sp; identical to SEQ ID NO: 804

SEQ ID NO: 61779 - DNA, 1644 bp, Acinetobacter sp; identical to SEQ ID NO: 805
  CDS (1)..(1644)

SEQ ID NO: 61780 - protein, 547 aa, Acinetobacter sp; identical to SEQ ID NO: 806

SEQ ID NO: 61781 - DNA, 2115 bp, Candida glabrata; identical to SEQ ID NO: 807
  CDS (1)..(2115)

SEQ ID NO: 61782 - protein, 704 aa, Candida glabrata; identical to SEQ ID NO: 808

SEQ ID NO: 61783 - DNA, 2052 bp, Candida glabrata; identical to SEQ ID NO: 809
  CDS (1)..(2052)

SEQ ID NO: 61784 - protein, 683 aa, Candida glabrata; identical to SEQ ID NO: 810

SEQ ID NO: 61785 - DNA, 1959 bp, Bartonella quintana; identical to SEQ ID NO: 811
  CDS (1)..(1959)

SEQ ID NO: 61786 - protein, 652 aa, Bartonella quintana; identical to SEQ ID NO: 812

SEQ ID NO: 61787 - DNA, 1959 bp, Bartonella henselae; identical to SEQ ID NO: 813
  CDS (1)..(1959)

SEQ ID NO: 61788 - protein, 652 aa, Bartonella henselae; identical to SEQ ID NO: 814

SEQ ID NO: 61789 - DNA, 2763 bp, Oryza sativa; identical to SEQ ID NO: 815
  CDS (355)..(2472)

SEQ ID NO: 61790 - protein, 705 aa, Oryza sativa; identical to SEQ ID NO: 816

SEQ ID NO: 61791 - DNA, 1941 bp, Bacillus thuringiensis serovar konkukian str; identical to SEQ ID NO: 817
  CDS (1)..(1941)

SEQ ID NO: 61792 - protein, 646 aa, Bacillus thuringiensis serovar konkukian str; identical to SEQ ID NO: 818

SEQ ID NO: 61793 - DNA, 1953 bp, Picrophilus torridus; identical to SEQ ID NO: 819
  CDS (1)..(1953)

SEQ ID NO: 61794 - protein, 650 aa, Picrophilus torridus; identical to SEQ ID NO: 820

SEQ ID NO: 61795 - DNA, 2994 bp, Plasmodium falciparum; identical to SEQ ID NO: 821
  CDS (1)..(2994)

SEQ ID NO: 61796 - protein, 997 aa, Plasmodium falciparum; identical to SEQ ID NO: 822

SEQ ID NO: 61797 - DNA, 2007 bp, Photobacterium profundum; identical to SEQ ID NO: 823
  CDS (1)..(2007)

SEQ ID NO: 61798 - protein, 668 aa, Photobacterium profundum; identical to SEQ ID NO: 824

SEQ ID NO: 61799 - DNA, 1899 bp, Photobacterium profundum; identical to SEQ ID NO: 825
  CDS (1)..(1899)

SEQ ID NO: 61800 - protein, 632 aa, Photobacterium profundum; identical to SEQ ID NO: 826

SEQ ID NO: 61801 - DNA, 1950 bp, Photobacterium profundum; identical to SEQ ID NO: 827
  CDS (1)..(1950)

SEQ ID NO: 61802 - protein, 649 aa, Photobacterium profundum; identical to SEQ ID NO: 828

SEQ ID NO: 61803 - DNA, 1674 bp, Methanococcus maripaludis; identical to SEQ ID NO: 829
  CDS (1)..(1674)

SEQ ID NO: 61804 - protein, 557 aa, Methanococcus maripaludis; identical to SEQ ID NO: 830

SEQ ID NO: 61805 - DNA, 1911 bp, Methanococcus maripaludis; identical to SEQ ID NO: 831
  CDS (1)..(1911)

SEQ ID NO: 61806 - protein, 636 aa, Methanococcus maripaludis; identical to SEQ ID NO: 832

SEQ ID NO: 61807 - DNA, 1938 bp, Bdellovibrio bacteriovorus; identical to SEQ ID NO: 833
  CDS (1)..(1938)

SEQ ID NO: 61808 - protein, 645 aa, Bdellovibrio bacteriovorus; identical to SEQ ID NO: 834

SEQ ID NO: 61809 - DNA, 1911 bp, Rhodopseudomonas palustris; identical to SEQ ID NO: 835
  CDS (1)..(1911)

SEQ ID NO: 61810 - protein, 636 aa, Rhodopseudomonas palustris; identical to SEQ ID NO: 836

SEQ ID NO: 61811 - DNA, 1692 bp, Rhodopseudomonas palustris; identical to SEQ ID NO: 837
  CDS (1)..(1692)

SEQ ID NO: 61812 - protein, 563 aa, Rhodopseudomonas palustris; identical to SEQ ID NO: 838

SEQ ID NO: 61813 - DNA, 1953 bp, Rhodopseudomonas palustris; identical to SEQ ID NO: 839
  CDS (1)..(1953)

SEQ ID NO: 61814 - protein, 650 aa, Rhodopseudomonas palustris; identical to SEQ ID NO: 840

SEQ ID NO: 61815 - DNA, 1959 bp, uncultured bacterium 314; identical to SEQ ID NO: 841
  CDS (1)..(1959)

SEQ ID NO: 61816 - protein, 652 aa, uncultured bacterium 314; identical to SEQ ID NO: 842

SEQ ID NO: 61817 - DNA, 1938 bp, uncultured bacterium 311; identical to SEQ ID NO: 843
  CDS (1)..(1938)

SEQ ID NO: 61818 - protein, 645 aa, uncultured bacterium 311; identical to SEQ ID NO: 844

SEQ ID NO: 61819 - DNA, 1743 bp, Rattus norvegicus; identical to SEQ ID NO: 845
  CDS (1)..(1743)

SEQ ID NO: 61820 - protein, 580 aa, Rattus norvegicus; identical to SEQ ID NO: 846

SEQ ID NO: 61821 - DNA, 1740 bp, Klebsiella pneumoniae; identical to SEQ ID NO: 847
  CDS (1)..(1740)

SEQ ID NO: 61822 - protein, 579 aa, Klebsiella pneumoniae; identical to SEQ ID NO: 848

SEQ ID NO: 61823 - DNA, 1821 bp, Homo sapiens; identical to SEQ ID NO: 849
  CDS (1)..(1821)

SEQ ID NO: 61824 - protein, 606 aa, Homo sapiens; identical to SEQ ID NO: 850

SEQ ID NO: 61825 - DNA, 1716 bp, Thermoproteus tenax; identical to SEQ ID NO: 851
  CDS (1)..(1716)

SEQ ID NO: 61826 - protein, 571 aa, Thermoproteus tenax; identical to SEQ ID NO: 852

SEQ ID NO: 61827 - DNA, 2118 bp, Agrobacterium vitis; identical to SEQ ID NO: 853
  CDS (1)..(2118)

SEQ ID NO: 61828 - protein, 705 aa, Agrobacterium vitis; identical to SEQ ID NO: 854

SEQ ID NO: 61829 - DNA, 1578 bp, Listeria monocytogenes; identical to SEQ ID NO: 855
  CDS (1)..(1578)

SEQ ID NO: 61830 - protein, 525 aa, Listeria monocytogenes; identical to SEQ ID NO: 856

SEQ ID NO: 61831 - DNA, 1986 bp, Desulfovibrio vulgaris; identical to SEQ ID NO: 857
  CDS (1)..(1986)

SEQ ID NO: 61832 - protein, 661 aa, Desulfovibrio vulgaris; identical to SEQ ID NO: 858

SEQ ID NO: 61833 - DNA, 1656 bp, Desulfovibrio vulgaris; identical to SEQ ID NO: 859
  CDS (1)..(1656)

SEQ ID NO: 61834 - protein, 551 aa, Desulfovibrio vulgaris; identical to SEQ ID NO: 860

SEQ ID NO: 61835 - DNA, 1947 bp, Desulfovibrio vulgaris; identical to SEQ ID NO: 861
  CDS (1)..(1947)

SEQ ID NO: 61836 - protein, 648 aa, Desulfovibrio vulgaris; identical to SEQ ID NO: 862

SEQ ID NO: 61837 - DNA, 1890 bp, Thermus thermophilus; identical to SEQ ID NO: 863
  CDS (1)..(1890)

SEQ ID NO: 61838 - protein, 629 aa, Thermus thermophilus; identical to SEQ ID NO: 864

SEQ ID NO: 61839 - DNA, 1884 bp, Thermus thermophilus; identical to SEQ ID NO: 865
  CDS (1)..(1884)

SEQ ID NO: 61840 - protein, 627 aa, Thermus thermophilus; identical to SEQ ID NO: 866

SEQ ID NO: 61841 - DNA, 2538 bp, Thermus thermophilus; identical to SEQ ID NO: 867
  CDS (1)..(2538)

SEQ ID NO: 61842 - protein, 845 aa, Thermus thermophilus; identical to SEQ ID NO: 868

SEQ ID NO: 61843 - DNA, 1947 bp, Thermus thermophilus; identical to SEQ ID NO: 869
  CDS (1)..(1947)

SEQ ID NO: 61844 - protein, 648 aa, Thermus thermophilus; identical to SEQ ID NO: 870

SEQ ID NO: 61845 - DNA, 1719 bp, Bacillus cereus; identical to SEQ ID NO: 871
  CDS (1)..(1719)

SEQ ID NO: 61846 - protein, 572 aa, Bacillus cereus; identical to SEQ ID NO: 872

SEQ ID NO: 61847 - DNA, 1653 bp, Treponema denticola; identical to SEQ ID NO: 873
  CDS (1)..(1653)

SEQ ID NO: 61848 - protein, 550 aa, Treponema denticola; identical to SEQ ID NO: 874

SEQ ID NO: 61849 - DNA, 1953 bp, Mycobacterium paratuberculosis; identical to SEQ ID NO: 875
  CDS (1)..(1953)

SEQ ID NO: 61850 - protein, 650 aa, Mycobacterium paratuberculosis; identical to SEQ ID NO: 876

SEQ ID NO: 61851 - DNA, 2064 bp, Ashbya gossypii; identical to SEQ ID NO: 877
  CDS (1)..(2064)

SEQ ID NO: 61852 - protein, 687 aa, Ashbya gossypii; identical to SEQ ID NO: 878

SEQ ID NO: 61853 - DNA, 2085 bp, Ashbya gossypii; identical to SEQ ID NO: 879
  CDS (1)..(2085)

SEQ ID NO: 61854 - protein, 694 aa, Ashbya gossypii; identical to SEQ ID NO: 880

SEQ ID NO: 61855 - DNA, 1977 bp, Dictyostelium discoideum; identical to SEQ ID NO: 881
  CDS (1)..(1977)

SEQ ID NO: 61856 - protein, 658 aa, Dictyostelium discoideum; identical to SEQ ID NO: 882

SEQ ID NO: 61857 - DNA, 2046 bp, Dictyostelium discoideum; identical to SEQ ID NO: 883
  CDS (1)..(2046)

SEQ ID NO: 61858 - protein, 681 aa, Dictyostelium discoideum; identical to SEQ ID NO: 884

SEQ ID NO: 61859 - DNA, 2316 bp, Oryza sativa; identical to SEQ ID NO: 885
  CDS (1)..(2316)

SEQ ID NO: 61860 - protein, 771 aa, Oryza sativa; identical to SEQ ID NO: 886

SEQ ID NO: 61861 - DNA, 1965 bp, Wolinella succinogenes; identical to SEQ ID NO: 887
  CDS (1)..(1965)

SEQ ID NO: 61862 - protein, 654 aa, Wolinella succinogenes; identical to SEQ ID NO: 888

SEQ ID NO: 61863 - DNA, 1956 bp, Photorhabdus luminescens; identical to SEQ ID NO: 889
  CDS (1)..(1956)

SEQ ID NO: 61864 - protein, 651 aa, Photorhabdus luminescens; identical to SEQ ID NO: 890

SEQ ID NO: 61865 - DNA, 2043 bp, Vibrio vulnificus; identical to SEQ ID NO: 891
  CDS (1)..(2043)

SEQ ID NO: 61866 - protein, 680 aa, Vibrio vulnificus; identical to SEQ ID NO: 892

SEQ ID NO: 61867 - DNA, 2013 bp, Vibrio vulnificus; identical to SEQ ID NO: 893
  CDS (1)..(2013)

SEQ ID NO: 61868 - protein, 670 aa, Vibrio vulnificus; identical to SEQ ID NO: 894

SEQ ID NO: 61869 - DNA, 1887 bp, Photorhabdus luminescens; identical to SEQ ID NO: 895
  CDS (1)..(1887)

SEQ ID NO: 61870 - protein, 628 aa, Photorhabdus luminescens; identical to SEQ ID NO: 896

SEQ ID NO: 61871 - DNA, 1944 bp, Gloeobacter violaceus; identical to SEQ ID NO: 897
  CDS (1)..(1944)

SEQ ID NO: 61872 - protein, 647 aa, Gloeobacter violaceus; identical to SEQ ID NO: 898

SEQ ID NO: 61873 - DNA, 1965 bp, Chromobacterium violaceum; identical to SEQ ID NO: 899
  CDS (1)..(1965)

SEQ ID NO: 61874 - protein, 654 aa, Chromobacterium violaceum; identical to SEQ ID NO: 900

SEQ ID NO: 61875 - DNA, 1962 bp, Chromobacterium violaceum; identical to SEQ ID NO: 901
  CDS (1)..(1962)

SEQ ID NO: 61876 - protein, 653 aa, Chromobacterium violaceum; identical to SEQ ID NO: 902

SEQ ID NO: 61877 - DNA, 1713 bp, Anopheles gambiae str; identical to SEQ ID NO: 903
  CDS (1)..(1713)

SEQ ID NO: 61878 - protein, 570 aa, Anopheles gambiae str; identical to SEQ ID NO: 904

SEQ ID NO: 61879 - DNA, 2856 bp, Plasmodium yoelii yoelii; identical to SEQ ID NO: 905
  CDS (1)..(2856)

SEQ ID NO: 61880 - protein, 951 aa, Plasmodium yoelii yoelii; identical to SEQ ID NO: 906

SEQ ID NO: 61881 - DNA, 2130 bp, Neurospora crassa; identical to SEQ ID NO: 907
  CDS (1)..(2130)

SEQ ID NO: 61882 - protein, 709 aa, Neurospora crassa; identical to SEQ ID NO: 908

SEQ ID NO: 61883 - DNA, 2070 bp, Synechococcus sp; identical to SEQ ID NO: 909
  CDS (1)..(2070)

SEQ ID NO: 61884 - protein, 689 aa, Synechococcus sp; identical to SEQ ID NO: 910

SEQ ID NO: 61885 - DNA, 1983 bp, Prochlorococcus marinus subsp; identical to SEQ ID NO: 911
  CDS (1)..(1983)

SEQ ID NO: 61886 - protein, 660 aa, Prochlorococcus marinus subsp; identical to SEQ ID NO: 912

SEQ ID NO: 61887 - DNA, 1977 bp, Prochlorococcus marinus; identical to SEQ ID NO: 913
  CDS (1)..(1977)

SEQ ID NO: 61888 - protein, 658 aa, Prochlorococcus marinus; identical to SEQ ID NO: 914

SEQ ID NO: 61889 - DNA, 1977 bp, Prochlorococcus marinus; identical to SEQ ID NO: 915
  CDS (1)..(1977)

SEQ ID NO: 61890 - protein, 658 aa, Prochlorococcus marinus; identical to SEQ ID NO: 916

SEQ ID NO: 61891 - DNA, 1902 bp, Helicobacter hepaticus; identical to SEQ ID NO: 917
  CDS (1)..(1902)

SEQ ID NO: 61892 - protein, 633 aa, Helicobacter hepaticus; identical to SEQ ID NO: 918

SEQ ID NO: 61893 - DNA, 1890 bp, Bordetella parapertussis; identical to SEQ ID NO: 919
  CDS (1)..(1890)

SEQ ID NO: 61894 - protein, 629 aa, Bordetella parapertussis; identical to SEQ ID NO: 920

SEQ ID NO: 61895 - DNA, 2046 bp, Bordetella parapertussis; identical to SEQ ID NO: 921
  CDS (1)..(2046)

SEQ ID NO: 61896 - protein, 681 aa, Bordetella parapertussis; identical to SEQ ID NO: 922

SEQ ID NO: 61897 - DNA, 1950 bp, Bordetella bronchiseptica; identical to SEQ ID NO: 923
  CDS (1)..(1950)

SEQ ID NO: 61898 - protein, 649 aa, Bordetella bronchiseptica; identical to SEQ ID NO: 924

SEQ ID NO: 61899 - DNA, 3626 bp, Homo sapiens; identical to SEQ ID NO: 925
  CDS (6)..(2069)

SEQ ID NO: 61900 - protein, 687 aa, Homo sapiens [sequence omitted]

SEQ ID NO: 61901 - DNA, 1941 bp, Bacillus cereus; identical to SEQ ID NO: 927
  CDS (1)..(1941)

SEQ ID NO: 61902 - protein, 646 aa, Bacillus cereus; identical to SEQ ID NO: 928

SEQ ID NO: 61903 - DNA, 1968 bp, Streptomyces avermitilis; identical to SEQ ID NO: 929
  CDS (1)..(1968)

SEQ ID NO: 61904 - protein, 655 aa, Streptomyces avermitilis; identical to SEQ ID NO: 930

SEQ ID NO: 61905 - DNA, 2019 bp, Streptomyces avermitilis; identical to SEQ ID NO: 931
  CDS (1)..(2019)

SEQ ID NO: 61906 - protein, 672 aa, Streptomyces avermitilis; identical to SEQ ID NO: 932

SEQ ID NO: 61907 - DNA, 1953 bp, Coxiella burnetii; identical to SEQ ID NO: 933
  CDS (1)..(1953)

SEQ ID NO: 61908 - protein, 650 aa, Coxiella burnetii; identical to SEQ ID NO: 934

SEQ ID NO: 61909 - DNA, 1968 bp, Dictyostelium discoideum; identical to SEQ ID NO: 935
  CDS (1)..(1968)

SEQ ID NO: 61910 - protein, 655 aa, Dictyostelium discoideum; identical to SEQ ID NO: 936

SEQ ID NO: 61911 - DNA, 1956 bp, Dictyostelium discoideum; identical to SEQ ID NO: 937
  CDS (1)..(1956)

SEQ ID NO: 61912 - protein, 651 aa, Dictyostelium discoideum; identical to SEQ ID NO: 938

SEQ ID NO: 61913 - DNA, 1968 bp, Dictyostelium discoideum; identical to SEQ ID NO: 939
  CDS (1)..(1968)

SEQ ID NO: 61914 - protein, 655 aa, Dictyostelium discoideum; identical to SEQ ID NO: 940

SEQ ID NO: 61915 - DNA, 1944 bp, Dictyostelium discoideum; identical to SEQ ID NO: 941
  CDS (1)..(1944)

SEQ ID NO: 61916 - protein, 647 aa, Dictyostelium discoideum; identical to SEQ ID NO: 942

SEQ ID NO: 61917 - DNA, 1941 bp, Dictyostelium discoideum; identical to SEQ ID NO: 943
  CDS (1)..(1941)

SEQ ID NO: 61918 - protein, 646 aa, Dictyostelium discoideum; identical to SEQ ID NO: 944

SEQ ID NO: 61919 - DNA, 2085 bp, Neurospora crassa; identical to SEQ ID NO: 945
  CDS (1)..(2085)

SEQ ID NO: 61920 - protein, 694 aa, Neurospora crassa; identical to SEQ ID NO: 946

SEQ ID NO: 61921 - DNA, 2034 bp, Vibrio parahaemolyticus; identical to SEQ ID NO: 947
  CDS (1)..(2034)

SEQ ID NO: 61922 - protein, 677 aa, Vibrio parahaemolyticus; identical to SEQ ID NO: 948

SEQ ID NO: 61923 - DNA, 1971 bp, Vibrio parahaemolyticus; identical to SEQ ID NO: 949
  CDS (1)..(1971)

SEQ ID NO: 61924 - protein, 656 aa, Vibrio parahaemolyticus; identical to SEQ ID NO: 950

SEQ ID NO: 61925 - DNA, 1905 bp, Vibrio parahaemolyticus; identical to SEQ ID NO: 951
  CDS (1)..(1905)

SEQ ID NO: 61926 - protein, 634 aa, Vibrio parahaemolyticus; identical to SEQ ID NO: 952

SEQ ID NO: 61927 - DNA, 1953 bp, Pseudomonas putida; identical to SEQ ID NO: 953
  CDS (1)..(1953)

SEQ ID NO: 61928 - protein, 650 aa, Pseudomonas putida; identical to SEQ ID NO: 954

SEQ ID NO: 61929 - DNA, 1890 bp, Pseudomonas putida; identical to SEQ ID NO: 955
  CDS (1)..(1890)

SEQ ID NO: 61930 - protein, 629 aa, Pseudomonas putida; identical to SEQ ID NO: 956

SEQ ID NO: 61931 - DNA, 1686 bp, Pseudomonas putida; identical to SEQ ID NO: 957
  CDS (1)..(1686)

SEQ ID NO: 61932 - protein, 561 aa, Pseudomonas putida; identical to SEQ ID NO: 958

SEQ ID NO: 61933 - DNA, 1689 bp, Bradyrhizobium japonicum; identical to SEQ ID NO: 959
  CDS (1)..(1689)

SEQ ID NO: 61934 - protein, 562 aa, Bradyrhizobium japonicum; identical to SEQ ID NO: 960

SEQ ID NO: 61935 - DNA, 2049 bp, Bradyrhizobium japonicum; identical to SEQ ID NO: 961
  CDS (1)..(2049)

SEQ ID NO: 61936 - protein, 682 aa, Bradyrhizobium japonicum; identical to SEQ ID NO: 962

SEQ ID NO: 61937 - DNA, 1911 bp, Bradyrhizobium japonicum; identical to SEQ ID NO: 963
  CDS (1)..(1911)

SEQ ID NO: 61938 - protein, 636 aa, Bradyrhizobium japonicum; identical to SEQ ID NO: 964

SEQ ID NO: 61939 - DNA, 1656 bp, Bacteroides thetaiotaomicron; identical to SEQ ID NO: 965
  CDS (1)..(1656)

SEQ ID NO: 61940 - protein, 551 aa, Bacteroides thetaiotaomicron; identical to SEQ ID NO: 966

SEQ ID NO: 61941 - DNA, 2495 bp, Mus musculus; identical to SEQ ID NO: 967
  CDS (87)..(1580)

SEQ ID NO: 61942 - protein, 497 aa, Mus musculus; identical to SEQ ID NO: 968

SEQ ID NO: 61943 - DNA, 1881 bp, Vibrio vulnificus; identical to SEQ ID NO: 969
  CDS (1)..(1881)

SEQ ID NO: 61944 - protein, 626 aa, Vibrio vulnificus; identical to SEQ ID NO: 970

SEQ ID NO: 61945 - DNA, 1986 bp, Oceanobacillus iheyensis; identical to SEQ ID NO: 971
  CDS (1)..(1986)

SEQ ID NO: 61946 - protein, 661 aa, Oceanobacillus iheyensis; identical to SEQ ID NO: 972

SEQ ID NO: 61947 - DNA, 1716 bp, Oceanobacillus iheyensis; identical to SEQ ID NO: 973
  CDS (1)..(1716)

SEQ ID NO: 61948 - protein, 571 aa, Oceanobacillus iheyensis; identical to SEQ ID NO: 974

SEQ ID NO: 61949 - DNA, 1887 bp, Escherichia coli O6; identical to SEQ ID NO: 975
  CDS (1)..(1887)

SEQ ID NO: 61950 - protein, 628 aa, Escherichia coli O6; identical to SEQ ID NO: 976

SEQ ID NO: 61951 - DNA, 1671 bp, Brucella suis; identical to SEQ ID NO: 977
  CDS (1)..(1671)

SEQ ID NO: 61952 - protein, 556 aa, Brucella suis; identical to SEQ ID NO: 978

SEQ ID NO: 61953 - DNA, 1989 bp, Brucella suis; identical to SEQ ID NO: 979
  CDS (1)..(1989)

SEQ ID NO: 61954 - protein, 662 aa, Brucella suis; identical to SEQ ID NO: 980

SEQ ID NO: 61955 - DNA, 2924 bp, Homo sapiens; identical to SEQ ID NO: 981
  CDS (34)..(2178)

SEQ ID NO: 61956 - protein, 714 aa, Homo sapiens [sequence omitted]

SEQ ID NO: 61957 - DNA, 1899 bp, Encephalitozoon cuniculi; identical to SEQ ID NO: 983
  CDS (1)..(1899)

SEQ ID NO: 61958 - protein, 632 aa, Encephalitozoon cuniculi; identical to SEQ ID NO: 984

SEQ ID NO: 61959 - DNA, 2004 bp, Neurospora crassa; identical to SEQ ID NO: 985
  CDS (1)..(2004)

SEQ ID NO: 61960 - protein, 667 aa, Neurospora crassa; identical to SEQ ID NO: 986

SEQ ID NO: 61961 - DNA, 1899 bp, Ralstonia solanacearum; identical to SEQ ID NO: 987
  CDS (1)..(1899)

SEQ ID NO: 61962 - protein, 632 aa, Ralstonia solanacearum; identical to SEQ ID NO: 988

SEQ ID NO: 61963 - DNA, 1956 bp, Pyrobaculum aerophilum; identical to SEQ ID NO: 989
  CDS (1)..(1956)

SEQ ID NO: 61964 - protein, 651 aa, Pyrobaculum aerophilum; identical to SEQ ID NO: 990

SEQ ID NO: 61965 - DNA, 1881 bp, Pyrobaculum aerophilum; identical to SEQ ID NO: 991
  CDS (1)..(1881)

SEQ ID NO: 61966 - protein, 626 aa, Pyrobaculum aerophilum; identical to SEQ ID NO: 992

SEQ ID NO: 61967 - DNA, 1848 bp, Pyrobaculum aerophilum; identical to SEQ ID NO: 993
  CDS (1)..(1848)

SEQ ID NO: 61968 - protein, 615 aa, Pyrobaculum aerophilum; identical to SEQ ID NO: 994

SEQ ID NO: 61969 - DNA, 1908 bp, Rhizobium meliloti; identical to SEQ ID NO: 995
  CDS (1)..(1908)

SEQ ID NO: 61970 - protein, 635 aa, Rhizobium meliloti; identical to SEQ ID NO: 996

SEQ ID NO: 61971 - DNA, 1647 bp, Rhizobium meliloti; identical to SEQ ID NO: 997
  CDS (1)..(1647)

SEQ ID NO: 61972 - protein, 548 aa, Rhizobium meliloti; identical to SEQ ID NO: 998

SEQ ID NO: 61973 - DNA, 2028 bp, Zygosaccharomyces bailii; identical to SEQ ID NO: 999
  CDS (1)..(2028)

SEQ ID NO: 61974 - protein, 675 aa, Zygosaccharomyces bailii; identical to SEQ ID NO: 1000

SEQ ID NO: 61975 - DNA, 1635 bp, Sulfolobus tokodaii; identical to SEQ ID NO: 1001
  CDS (1)..(1635)

SEQ ID NO: 61976 - protein, 544 aa, Sulfolobus tokodaii; identical to SEQ ID NO: 1002

SEQ ID NO: 61977 - DNA, 1731 bp, Sulfolobus tokodaii; identical to SEQ ID NO: 1003
  CDS (1)..(1731)

SEQ ID NO: 61978 - protein, 576 aa, Sulfolobus tokodaii; identical to SEQ ID NO: 1004

SEQ ID NO: 61979 - DNA, 1986 bp, Sulfolobus tokodaii; identical to SEQ ID NO: 1005
  CDS (1)..(1986)

SEQ ID NO: 61980 - protein, 661 aa, Sulfolobus tokodaii; identical to SEQ ID NO: 1006

SEQ ID NO: 61981 - DNA, 1866 bp, Sulfolobus tokodaii; identical to SEQ ID NO: 1007
  CDS (1)..(1866)

SEQ ID NO: 61982 - protein, 621 aa, Sulfolobus tokodaii; identical to SEQ ID NO: 1008

SEQ ID NO: 61983 - DNA, 1494 bp, Sulfolobus tokodaii; identical to SEQ ID NO: 1009
  CDS (1)..(1494)

SEQ ID NO: 61984 - protein, 497 aa, Sulfolobus tokodaii; identical to SEQ ID NO: 1010

SEQ ID NO: 61985 - DNA, 1980 bp, Sulfolobus tokodaii; identical to SEQ ID NO: 1011
  CDS (1)..(1980)

SEQ ID NO: 61986 - protein, 659 aa, Sulfolobus tokodaii; identical to SEQ ID NO: 1012

SEQ ID NO: 61987 - DNA, 1989 bp, Sulfolobus tokodaii; identical to SEQ ID NO: 1013
  CDS (1)..(1989)

SEQ ID NO: 61988 - protein, 662 aa, Sulfolobus tokodaii; identical to SEQ ID NO: 1014

SEQ ID NO: 61989 - DNA, 1689 bp, Sulfolobus tokodaii; identical to SEQ ID NO: 1015
  CDS (1)..(1689)

SEQ ID NO: 61990 - protein, 562 aa, Sulfolobus tokodaii; identical to SEQ ID NO: 1016

SEQ ID NO: 61991 - DNA, 1860 bp, Thermoplasma volcanium; identical to SEQ ID NO: 1017
  CDS (1)..(1860)

SEQ ID NO: 61992 - protein, 619 aa, Thermoplasma volcanium; identical to SEQ ID NO: 1018

SEQ ID NO: 61993 - DNA, 1926 bp, Thermoplasma volcanium; identical to SEQ ID NO: 1019
  CDS (1)..(1926)

SEQ ID NO: 61994 - protein, 641 aa, Thermoplasma volcanium; identical to SEQ ID NO: 1020

SEQ ID NO: 61995 - DNA, 1953 bp, Thermoplasma volcanium; identical to SEQ ID NO: 1021
  CDS (1)..(1953)

SEQ ID NO: 61996 - protein, 650 aa, Thermoplasma volcanium; identical to SEQ ID NO: 1022

SEQ ID NO: 61997 - DNA, 1959 bp, Rhizobium loti; identical to SEQ ID NO: 1023
  CDS (1)..(1959)

SEQ ID NO: 61998 - protein, 652 aa, Rhizobium loti; identical to SEQ ID NO: 1024

SEQ ID NO: 61999 - DNA, 1689 bp, Rhizobium loti; identical to SEQ ID NO: 1025
  CDS (1)..(1689)

SEQ ID NO: 62000 - protein, 562 aa, Rhizobium loti; identical to SEQ ID NO: 1026

SEQ ID NO: 62001 - DNA, 1929 bp, Rhizobium loti; identical to SEQ ID NO: 1027
  CDS (1)..(1929)

SEQ ID NO: 62002 - protein, 642 aa, Rhizobium loti; identical to SEQ ID NO: 1028

SEQ ID NO: 62003 - DNA, 1680 bp, Rhizobium loti; identical to SEQ ID NO: 1029
  CDS (1)..(1680)

SEQ ID NO: 62004 - protein, 559 aa, Rhizobium loti; identical to SEQ ID NO: 1030

SEQ ID NO: 62005 - DNA, 1686 bp, Pseudomonas putida; identical to SEQ ID NO: 1031
  CDS (1)..(1686)

SEQ ID NO: 62006 - protein, 561 aa, Pseudomonas putida; identical to SEQ ID NO: 1032

SEQ ID NO: 62007 - DNA, 2582 bp, Bos taurus; identical to SEQ ID NO: 1033
  CDS (1)..(2028)

SEQ ID NO: 62008 - protein, 675 aa, Bos taurus; identical to SEQ ID NO: 1034

SEQ ID NO: 62009 - DNA, 1800 bp, Thermoplasma acidophilum; identical to SEQ ID NO: 1035
  CDS (1)..(1800)

SEQ ID NO: 62010 - protein, 599 aa, Thermoplasma acidophilum; identical to SEQ ID NO: 1036

SEQ ID NO: 62011 - DNA, 1944 bp, Thermoplasma acidophilum; identical to SEQ ID NO: 1037
  CDS (1)..(1944)

SEQ ID NO: 62012 - protein, 647 aa, Thermoplasma acidophilum; identical to SEQ ID NO: 1038

SEQ ID NO: 62013 - DNA, 1860 bp, Thermoplasma acidophilum; identical to SEQ ID NO: 1039
  CDS (1)..(1860)

SEQ ID NO: 62014 - protein, 619 aa, Thermoplasma acidophilum; identical to SEQ ID NO: 1040

SEQ ID NO: 62015 - DNA, 1977 bp, Streptomyces coelicolor; identical to SEQ ID NO: 1041
  CDS (1)..(1977)

SEQ ID NO: 62016 - protein, 658 aa, Streptomyces coelicolor; identical to SEQ ID NO: 1042

SEQ ID NO: 62017 - DNA, 2113 bp, Arabidopsis thaliana; identical to SEQ ID NO: 1043
  CDS (1)..(2082)

SEQ ID NO: 62018 - protein, 693 aa, Arabidopsis thaliana; identical to SEQ ID NO: 1044

SEQ ID NO: 62019 - DNA, 2088 bp, Leishmania major; identical to SEQ ID NO: 1045
  CDS (1)..(2088)

SEQ ID NO: 62020 - protein, 695 aa, Leishmania major; identical to SEQ ID NO: 1046

SEQ ID NO: 62021 - DNA, 1956 bp, Tetrahymena pyriformis; identical to SEQ ID NO: 1047
  CDS (1)..(978)

SEQ ID NO: 62022 - protein, 325 aa, Tetrahymena pyriformis; identical to SEQ ID NO: 1048

SEQ ID NO: 62023 - DNA, 2267 bp, Drosophila melanogaster; identical to SEQ ID NO: 1049
  CDS (113)..(2137)

SEQ ID NO: 62024 - protein, 674 aa, Drosophila melanogaster; identical to SEQ ID NO: 1050

SEQ ID NO: 62025 - DNA, 2383 bp, Solanum tuberosum; identical to SEQ ID NO: 1051
  CDS (271)..(2166)

SEQ ID NO: 62026 - protein, 631 aa, Solanum tuberosum; identical to SEQ ID NO: 1052

SEQ ID NO: 62027 - DNA, 3584 bp, Mus musculus; identical to SEQ ID NO: 1053
  CDS (33)..(2081)

SEQ ID NO: 62028 - protein, 682 aa, Mus musculus; identical to SEQ ID NO: 1054

SEQ ID NO: 62029 - DNA, 2052 bp, Kluyveromyces lactis; identical to SEQ ID NO: 1055
  CDS (1)..(2052)

SEQ ID NO: 62030 - protein, 683 aa, Kluyveromyces lactis [sequence omitted]

SEQ ID NO: 62031 - DNA, 2492 bp, Saccharomyces cerevisiae; identical to SEQ ID NO: 1057
  CDS (162)..(2303)

SEQ ID NO: 62032 - protein, 713 aa, Saccharomyces cerevisiae [sequence omitted]

SEQ ID NO: 62033 - DNA, 3543 bp, Kluyveromyces lactis; identical to SEQ ID NO: 1059
  CDS (817)..(2871)

SEQ ID NO: 62034 - protein, 684 aa, Kluyveromyces lactis; identical to SEQ ID NO: 1060

SEQ ID NO: 62035 - DNA, 1935 bp, Pseudomonas putida; identical to SEQ ID NO: 1061
  CDS (1)..(1935)

SEQ ID NO: 62036 - protein, 644 aa, Pseudomonas putida [sequence omitted]

SEQ ID NO: 62037 - DNA, 1950 bp, Rhizobium meliloti; identical to SEQ ID NO: 1063
  CDS (1)..(1950)

SEQ ID NO: 62038 - protein, 649 aa, Rhizobium meliloti [sequence omitted]

SEQ ID NO: 62039 - DNA, 1959 bp, Agrobacterium rhizogenes; identical to SEQ ID NO: 1065
  CDS (1)..(1959)

SEQ ID NO: 62040 - protein, 652 aa, Agrobacterium rhizogenes; identical to SEQ ID NO: 1066

SEQ ID NO: 62041 - DNA, 1956 bp, Agrobacterium tumefaciens; identical to SEQ ID NO: 1067
  CDS (1)..(1956)

SEQ ID NO: 62042 - protein, 651 aa, Agrobacterium tumefaciens; identical to SEQ ID NO: 1068

SEQ ID NO: 62043 - DNA, 1947 bp, Bradyrhizobium japonicum; identical to SEQ ID NO: 1069
  CDS (1)..(1947)

SEQ ID NO: 62044 - protein, 648 aa, Bradyrhizobium japonicum [sequence omitted]

SEQ ID NO: 62045 - DNA, 1956 bp, Brucella suis; identical to SEQ ID NO: 1071
  CDS (1)..(1956)

SEQ ID NO: 62046 - protein, 651 aa, Brucella suis; identical to SEQ ID NO: 1072

SEQ ID NO: 62047 - DNA, 2028 bp, Candida albicans; identical to SEQ ID NO: 1073
  CDS (1)..(2028)

SEQ ID NO: 62048 - protein, 675 aa, Candida albicans [sequence omitted]

SEQ ID NO: 62049 - DNA, 1980 bp, Chlorobium tepidum; identical to SEQ ID NO: 1075
  CDS (1)..(1980)

SEQ ID NO: 62050 - protein, 659 aa, Chlorobium tepidum [sequence omitted]

SEQ ID NO: 62051 - DNA, 2041 bp, Coprinus cinereus; identical to SEQ ID NO: 1077
  CDS (20)..(2005)

SEQ ID NO: 62052 - protein, 661 aa, Coprinus cinereus [sequence omitted]

SEQ ID NO: 62053 - DNA, 2222 bp, Cryptosporidium parvum; identical to SEQ ID NO: 1079
  CDS (70)..(2154)

SEQ ID NO: 62054 - protein, 694 aa, Cryptosporidium parvum [sequence omitted]

SEQ ID NO: 62055 - DNA, 2874 bp, Drosophila melanogaster; identical to SEQ ID NO: 1081
  CDS (451)..(2463)

SEQ ID NO: 62056 - protein, 670 aa, Drosophila melanogaster [sequence omitted]

SEQ ID NO: 62057 - DNA, 1986 bp, Leptospira interrogans; identical to SEQ ID NO: 1083
  CDS (1)..(1986)

SEQ ID NO: 62058 - protein, 661 aa, Leptospira interrogans [sequence omitted]

SEQ ID NO: 62059 - DNA, 2535 bp, Mus musculus; identical to SEQ ID NO: 1085
  CDS (15)..(2120)

SEQ ID NO: 62060 - protein, 701 aa, Mus musculus; identical to SEQ ID NO: 1086

SEQ ID NO: 62061 - DNA, 1956 bp, Mycobacterium bovis; identical to SEQ ID NO: 1087
  CDS (1)..(1956)

SEQ ID NO: 62062 - protein, 651 aa, Mycobacterium bovis [sequence omitted]

SEQ ID NO: 62063 - DNA, 1968 bp, Nitrosomonas europaea; identical to SEQ ID NO: 1089
  CDS (1)..(1968)

SEQ ID NO: 62064 - protein, 655 aa, Nitrosomonas europaea [sequence omitted]

SEQ ID NO: 62065 - DNA, 1962 bp, Pasteurella multocida; identical to SEQ ID NO: 1091
  CDS (1)..(1962)

SEQ ID NO: 62066 - protein, 653 aa, Pasteurella multocida [sequence omitted]

SEQ ID NO: 62067 - DNA, 1926 bp, Gamma; identical to SEQ ID NO: 1093
  CDS (1)..(1926)

SEQ ID NO: 62068 - protein, 641 aa, Gamma [sequence omitted]

SEQ ID NO: 62069 - DNA, 1983 bp, Ralstonia solanacearum; identical to SEQ ID NO: 1095
  CDS (1)..(1983)

SEQ ID NO: 62070 - protein, 660 aa, Ralstonia solanacearum; identical to SEQ ID NO: 1096

SEQ ID NO: 62071 - DNA, 1956 bp, Rhizobium loti; identical to SEQ ID NO: 1097
  CDS (1)..(1956)

SEQ ID NO: 62072 - protein, 651 aa, Rhizobium loti; identical to SEQ ID NO: 1098

SEQ ID NO: 62073 - DNA, 2016 bp, Rhodopirellula baltica; identical to SEQ ID NO: 1099
  CDS (1)..(2016)

SEQ ID NO: 62074 - protein, 671 aa, Rhodopirellula baltica [sequence omitted]

SEQ ID NO: 62075 - DNA, 1959 bp, Salmonella typhimurium; identical to SEQ ID NO: 1101
  CDS (1)..(1959)

SEQ ID NO: 62076 - protein, 652 aa, Salmonella typhimurium; identical to SEQ ID NO: 1102

SEQ ID NO: 62077 - DNA, 1953 bp, Shewanella oneidensis; identical to SEQ ID NO: 1103
  CDS (1)..(1953)

SEQ ID NO: 62078 - protein, 650 aa, Shewanella oneidensis [sequence omitted]

SEQ ID NO: 62079 - DNA, 1959 bp, Streptomyces avermitilis; identical to SEQ ID NO: 1105
  CDS (1)..(1959)

SEQ ID NO: 62080 - protein, 652 aa, Streptomyces avermitilis [sequence omitted]

SEQ ID NO: 62081 - DNA, 1971 bp, Synechococcus elongatus; identical to SEQ ID NO: 1107
  CDS (1)..(1971)

SEQ ID NO: 62082 - protein, 656 aa, Synechococcus elongatus [sequence omitted]

SEQ ID NO: 62083 - DNA, 1950 bp, Vibrio cholerae; identical to SEQ ID NO: 1109
  CDS (1)..(1950)

SEQ ID NO: 62084 - protein, 649 aa, Vibrio cholerae [sequence omitted]

SEQ ID NO: 62085 - DNA, 1953 bp, Vibrio parahaemolyticus; identical to SEQ ID NO: 1111
  CDS (1)..(1953)

SEQ ID NO: 62086 - protein, 650 aa, Vibrio parahaemolyticus; identical to SEQ ID NO: 1112

SEQ ID NO: 62087 - DNA, 1944 bp, Xanthomonas axonopodis; identical to SEQ ID NO: 1113
  CDS (1)..(1944)

SEQ ID NO: 62088 - protein, 647 aa, Xanthomonas axonopodis [sequence omitted]

SEQ ID NO: 62089 - DNA, 1944 bp, Xanthomonas campestris; identical to SEQ ID NO: 1115
  CDS (1)..(1944)

SEQ ID NO: 62090 - protein, 647 aa, Xanthomonas campestris; identical to SEQ ID NO: 1116

SEQ ID NO: 62091 - DNA, 1944 bp, Xylella fastidiosa; identical to SEQ ID NO: 1117
  CDS (1)..(1944)

SEQ ID NO: 62092 - protein, 647 aa, Xylella fastidiosa; identical to SEQ ID NO: 1118

SEQ ID NO: 62093 - DNA, 26 bp, Artificial sequence
  Primer sequence
atgacaatcaaggaacataaagtagt

SEQ ID NO: 62094 - DNA, 28 bp, Artificial sequence
  Primer sequence
ttatttctttttttgagagaaaaattgg

SEQ ID NO: 62095 - protein, 695 aa, Artificial sequence; identical to SEQ ID NO: 59486
  Consensus
  Variant (2)..(7): Xaa in position 2 to 7 is any amino acid
  Variant (9)..(29): Xaa in position 9 to 29 is any amino acid
  Variant (31)..(54): Xaa in position 31 to 54 is any amino acid
  Variant (56)..(65): Xaa in position 56 to 65 is any amino acid
  Variant (67)..(74): Xaa in position 67 to 74 is any amino acid
  Variant (76)..(78): Xaa in position 76 to 78 is any amino acid
  Variant (81)..(81): Xaa in position 81 is any amino acid
  Variant (83)..(86): Xaa in position 83 to 86 is any amino acid
  Variant (88)..(96): Xaa in position 88 to 96 is any amino acid
  Variant (99)..(102): Xaa in position 99 to 102 is any amino acid
  Variant (105)..(109): Xaa in position 105 to 109 is any amino acid
  Variant (111)..(112): Xaa in position 111 to 112 is any amino acid
  Variant (114)..(120): Xaa in position 114 to 120 is any amino acid
  Variant (122)..(255): Xaa in position 122 to 255 is any amino acid
  Variant (260)..(260): Xaa in position 260 is any amino acid
  Variant (263)..(263): Xaa in position 263 is any amino acid
  Variant (267)..(306): Xaa in position 267 to 306 is any amino acid
  Variant (308)..(308): Xaa in position 308 is any amino acid
  Variant (311)..(321): Xaa in position 311 to 321 is any amino acid
  Variant (323)..(324): Xaa in position 323 to 324 is any amino acid
  Variant (326)..(332): Xaa in position 326 to 332 is any amino acid
  Variant (334)..(362): Xaa in position 334 to 362 is any amino acid
  Variant (365)..(366): Xaa in position 365 to 366 is any amino acid
  Variant (368)..(390): Xaa in position 368 to 390 is any amino acid
  Variant (392)..(397): Xaa in position 392 to 397 is any amino acid
  Variant (400)..(407): Xaa in position 400 to 407 is any amino acid
  Variant (409)..(431): Xaa in position 409 to 431 is any amino acid
  Variant (434)..(468): Xaa in position 434 to 468 is any amino acid
  Variant (470)..(478): Xaa in position 470 to 478 is any amino acid
  Variant (480)..(506): Xaa in position 480 to 506 is any amino acid
  Variant (508)..(517): Xaa in position 508 to 517 is any amino acid
  Variant (519)..(558): Xaa in position 519 to 558 is any amino acid
  Variant (561)..(564): Xaa in position 561 to 564 is any amino acid
  Variant (566)..(568): Xaa in position 566 to 568 is any amino acid
  Variant (570)..(574): Xaa in position 570 to 574 is any amino acid
  Variant (577)..(577): Xaa in position 577 is any amino acid
  Variant (580)..(584): Xaa in position 580 to 584 is any amino acid
  Variant (586)..(586): Xaa in position 586 is any amino acid
  Variant (588)..(591): Xaa in position 588 to 591 is any amino acid
  Variant (593)..(593): Xaa in position 593 is any amino acid
  Variant (595)..(604): Xaa in position 595 to 604 is any amino acid
  Variant (606)..(606): Xaa in position 606 is any amino acid
  Variant (608)..(609): Xaa in position 608 to 609 is any amino acid
  Variant (611)..(616): Xaa in position 611 to 616 is any amino acid
  Variant (618)..(625): Xaa in position 618 to 625 is any amino acid
  Variant (627)..(684): Xaa in position 627 to 684 is any amino acid
  Variant (689)..(689): Xaa in position 689 is any amino acid
  Variant (694)..(694): Xaa in position 694 is any amino acid

SEQ ID NO: 62096 - protein, 43 aa, Artificial sequence; identical to SEQ ID NO: 1308
  Consensus
  Variant (1)..(1): Xaa in position 1 is Gly, Asn or Asp
  Variant (2)..(2): Xaa in position 2 is Asp, Glu or Gln
  Variant (3)..(3): Xaa in position 3 is any amino acid
  Variant (4)..(4): Xaa in position 4 is Val or Ile
  Variant (5)..(7): Xaa in position 5 to 7 is any amino acid
  Variant (8)..(8): Xaa in position 8 is Met, Leu, Ile or Ala
  Variant (9)..(18): Xaa in position 9 to 18 is any amino acid
  Variant (19)..(19): Xaa in position 19 is Leu, Met, Gln, Phe or Tyr
  Variant (20)..(20): Xaa in position 20 is Ala, Gly or Ser
  Variant (21)..(23): Xaa in position 21 to 23 is any amino acid
  Variant (24)..(24): Xaa in position 24 is Ile, Leu, Val or Ala
  Variant (26)..(26): Xaa in position 26 is Ala, Gly, Val or no amino acid
  Variant (27)..(34): Xaa in position 27 to 34 is any amino acid
  Variant (35)..(35): Xaa in position 35 is Phe, Tyr or Leu
  Variant (36)..(39): Xaa in position 36 to 39 is any amino acid
  Variant (40)..(40): Xaa in position 40 is Leu, Ile or Val
  Variant (41)..(42): Xaa in position 41 to 42 is any amino acid
  Variant (43)..(43): Xaa in position 43 is Arg or Gln

SEQ ID NO: 62097 - protein, 14 aa, Artificial sequence
  Consensus
  Variant (1)..(1): Xaa in position 1 is Ile, Leu, Met or Val
  Variant (2)..(2): Xaa in position 2 is any amino acid
  Variant (3)..(3): Xaa in position 3 is Tyr, Phe or Ser
  Variant (4)..(4): Xaa in position 4 is Thr or Ser
  Variant (7)..(7): Xaa in position 7 is Thr or Ser
  Variant (10)..(10): Xaa in position 10 is any amino acid
  Variant (11)..(11): Xaa in position 11 is Pro, Ala or Ser
  Variant (13)..(13): Xaa in position 13 is any amino acid
  Variant (14)..(14): Xaa in position 14 is Val, Ile, Leu, Ala or Thr
XXXXSGXTGXXKXX

SEQ ID NO: 62098 - protein, 55 aa, Artificial sequence; identical to SEQ ID NO: 1310
  Consensus
  Variant (1)..(1): Xaa in position 1 is Tyr, Trp, Phe, Leu or His
  Variant (2)..(3): Xaa in position 2 to 3 is any amino acid
  Variant (4)..(4): Xaa in position 4 is Gly, Ala or Phe
  Variant (6)..(12): Xaa in position 6 to 12 is any amino acid
  Variant (13)..(13): Xaa in position 13 is any or no amino acid
  Variant (14)..(14): Xaa in position 14 is Gly, Asp or no amino acid
  Variant (15)..(19): Xaa in position 15 to 19 is any amino acid
  Variant (20)..(20): Xaa in position 20 is Gly, Ser, Ala or Asp
  Variant (22)..(22): Xaa in position 22 is any amino acid
  Variant (23)..(23): Xaa in position 23 is Asp or Lys
  Variant (24)..(24): Xaa in position 24 is Asp, Glu, Ser, Ala or Thr
  Variant (25)..(25): Xaa in position 25 is any amino acid
  Variant (26)..(26): Xaa in position 26 is Ile, Leu, Met or Val
  Variant (27)..(29): Xaa in position 27 to 29 is any amino acid
  Variant (31)..(31): Xaa in position 31 is any amino acid
  Variant (32)..(32): Xaa in position 32 is Arg, Lys, Gln or Leu
  Variant (33)..(33): Xaa in position 33 is Leu, Ile, Val or Met
  Variant (34)..(36): Xaa in position 34 to 36 is any amino acid
  Variant (37)..(37): Xaa in position 37 is Glu, Asp, Thr or Ala
  Variant (38)..(38): Xaa in position 38 is Ile, Val, Met or Leu
  Variant (39)..(39): Xaa in position 39 is Glu, Tyr or Asp
  Variant (40)..(41): Xaa in position 40 to 41 is any amino acid
  Variant (42)..(42): Xaa in position 42 is Leu, Ile, Val or Met
  Variant (43)..(47): Xaa in position 43 to 47 is any amino acid
  Variant (48)..(48): Xaa in position 48 is Val or Ile
  Variant (49)..(49): Xaa in position 49 is any amino acid
  Variant (50)..(50): Xaa in position 50 is Glu or Asp
  Variant (51)..(51): Xaa in position 51 is Ala, Cys, Ser, Val or Thr
  Variant (52)..(53): Xaa in position 52 to 53 is any amino acid
  Variant (54)..(54): Xaa in position 54 is Val, Ile, Leu, Thr or Phe
  Variant (55)..(55): Xaa in position 55 is Gly, Ala, Ser or Pro

SEQ ID NO: 62099 - protein, 14 aa, Artificial sequence
  Consensus
  Variant (1)..(1): Xaa in position 1 is Leu, Ile or Met
  Variant (3)..(3): Xaa in position 3 is Lys, Arg, Met or His
  Variant (4)..(4): Xaa in position 4 is Thr or Ser
  Variant (5)..(5): Xaa in position 5 is any amino acid
  Variant (6)..(6): Xaa in position 6 is Ser, Thr, Asn or Val
  Variant (7)..(7): Xaa in position 7 is Gly, Ala or Ser
  Variant (9)..(9): Xaa in position 9 is Ile, Val, Leu, Met, Lys or Arg
  Variant (10)..(10): Xaa in position 10 is any amino acid
  Variant (11)..(11): Xaa in position 11 is Arg or Glu
  Variant (12)..(13): Xaa in position 12 to 13 is any amino acid
  Variant (14)..(14): Xaa in position 14 is Leu, Ile, Val or Met
XPXXXXXKXXXXXX

SEQ ID NO: 62100 - DNA, 612 bp, Escherichia coli; identical to SEQ ID NO: 15395
  CDS (1)..(612)

SEQ ID NO: 62101 - protein, 203 aa, Escherichia coli; identical to SEQ ID NO: 15396

SEQ ID NO: 62102 - DNA, 558 bp, Mesorhizobium loti MAFF303099; identical to SEQ ID NO: 15397
  CDS (1)..(558): transl_table=11

SEQ ID NO: 62103 - protein, 185 aa, Mesorhizobium loti MAFF303099; identical to SEQ ID NO: 15398

SEQ ID NO: 62104 - DNA, 591 bp, Mesorhizobium loti MAFF303099; identical to SEQ ID NO: 15399
  CDS (1)..(591): transl_table=11

SEQ ID NO: 62105 - protein, 196 aa, Mesorhizobium loti MAFF303099; identical to SEQ ID NO: 15400

SEQ ID NO: 62106 - DNA, 558 bp, Mesorhizobium loti MAFF303099; identical to SEQ ID NO: 15401
  CDS (1)..(558): transl_table=11

SEQ ID NO: 62107 - protein, 185 aa, Mesorhizobium loti MAFF303099; identical to SEQ ID NO: 15402

SEQ ID NO: 62108 - DNA, 579 bp, Vibrio cholerae O1 biovar eltor str. N16961; identical to SEQ ID NO: 15403
  CDS (1)..(579): transl_table=11

SEQ ID NO: 62109 - protein, 192 aa, Vibrio cholerae O1 biovar eltor str. N16961; identical to SEQ ID NO: 15404

SEQ ID NO: 62110 - DNA, 561 bp, Bacillus halodurans C-125; identical to SEQ ID NO: 15405
  CDS (1)..(561): transl_table=11

SEQ ID NO: 62111 - protein, 186 aa, Bacillus halodurans C-125; identical to SEQ ID NO: 15406

SEQ ID NO: 62112 - DNA, 612 bp, Pasteurella multocida subsp. multocida str. Pm70; identical to SEQ ID NO: 15407
  CDS (1)..(612): transl_table=11

SEQ ID NO: 62113 - protein, 203 aa, Pasteurella multocida subsp. multocida str. Pm70; identical to SEQ ID NO: 15408

SEQ ID NO: 62114 - DNA, 771 bp, Lactococcus lactis subsp. lactis Il1403; identical to SEQ ID NO: 15409
  CDS (1)..(771): transl_table=11

SEQ ID NO: 62115 - protein, 256 aa, Lactococcus lactis subsp. lactis Il1403; identical to SEQ ID NO: 15410

SEQ ID NO: 62116 - DNA, 612 bp, Lactococcus lactis subsp. lactis Il1403; identical to SEQ ID NO: 15411
  CDS (1)..(612): transl_table=11

SEQ ID NO: 62117 - protein, 203 aa, Lactococcus lactis subsp. lactis Il1403; identical to SEQ ID NO: 15412

SEQ ID NO: 62118 - DNA, 603 bp, Lactococcus lactis subsp. lactis Il1403; identical to SEQ ID NO: 15413
  CDS (1)..(603): transl_table=11

SEQ ID NO: 62119 - protein, 200 aa, Lactococcus lactis subsp. lactis Il1403; identical to SEQ ID NO: 15414

SEQ ID NO: 62120 - DNA, 612 bp, Lactococcus lactis subsp. lactis Il1403; identical to SEQ ID NO: 15415
  CDS (1)..(612): transl_table=11

SEQ ID NO: 62121 - protein, 203 aa, Lactococcus lactis subsp. lactis Il1403; identical to SEQ ID NO: 15416

SEQ ID NO: 62122 - DNA, 462 bp, Lactococcus lactis subsp. lactis Il1403; identical to SEQ ID NO: 15417
  CDS (1)..(462): transl_table=11

SEQ ID NO: 62123 - protein, 153 aa, Lactococcus lactis subsp. lactis Il1403; identical to SEQ ID NO: 15418

SEQ ID NO: 62124 - DNA, 567 bp, Streptococcus pyogenes M1 GAS; identical to SEQ ID NO: 15419
  CDS (1)..(567): transl_table=11

SEQ ID NO: 62125 - protein, 188 aa, Streptococcus pyogenes M1 GAS; identical to SEQ ID NO: 15420

SEQ ID NO: 62126 - DNA, 513 bp, Neisseria meningitidis Z2491; identical to SEQ ID NO: 15421
  CDS (1)..(513): transl_table=11

SEQ ID NO: 62127 - protein, 170 aa, Neisseria meningitidis Z2491; identical to SEQ ID NO: 15422

SEQ ID NO: 62128 - DNA, 549 bp, Escherichia coli O157:H7; identical to SEQ ID NO: 15423
  CDS (1)..(549): transl_table=11

SEQ ID NO: 62129 - protein, 182 aa, Escherichia coli O157:H7; identical to SEQ ID NO: 15424

SEQ ID NO: 62130 - DNA, 558 bp, Streptococcus pneumoniae TIGR4; identical to SEQ ID NO: 15425
  CDS (1)..(558): transl_table=11

SEQ ID NO: 62131 - protein, 185 aa, Streptococcus pneumoniae TIGR4; identical to SEQ ID NO: 15426

SEQ ID NO: 62132 - DNA, 561 bp, Clostridium acetobutylicum ATCC 824; identical to SEQ ID NO: 15427
  CDS (1)..(561): transl_table=11

SEQ ID NO: 62133 - protein, 186 aa, Clostridium acetobutylicum ATCC 824; identical to SEQ ID NO: 15428

SEQ ID NO: 62134 - DNA, 615 bp, Clostridium acetobutylicum ATCC 824; identical to SEQ ID NO: 15429
  CDS (1)..(615): transl_table=11

SEQ ID NO: 62135 - protein, 204 aa, Clostridium acetobutylicum ATCC 824; identical to SEQ ID NO: 15430

SEQ ID NO: 62136 - DNA, 600 bp, Staphylococcus aureus subsp. aureus Mu50; identical to SEQ ID NO: 15431
  CDS (1)..(600): transl_table=11

SEQ ID NO: 62137 - protein, 199 aa, Staphylococcus aureus subsp. aureus Mu50; identical to SEQ ID NO: 15432

SEQ ID NO: 62138 - DNA, 552 bp, Escherichia coli K12; identical to SEQ ID NO: 15433
  CDS (1)..(552): transl_table=11

SEQ ID NO: 62139 - protein, 183 aa, Escherichia coli K12; identical to SEQ ID NO: 15434

SEQ ID NO: 62140 - DNA, 615 bp, Sinorhizobium meliloti 1021; identical to SEQ ID NO: 15435
  CDS (1)..(615): transl_table=11

SEQ ID NO: 62141 - protein, 204 aa, Sinorhizobium meliloti 1021; identical to SEQ ID NO: 15436

SEQ ID NO: 62142 - DNA, 552 bp, Salmonella typhimurium LT2; identical to SEQ ID NO: 15437
  CDS (1)..(552): transl_table=11

SEQ ID NO: 62143 - protein, 183 aa, Salmonella typhimurium LT2; identical to SEQ ID NO: 15438

SEQ ID NO: 62144 - DNA, 564 bp, Listeria monocytogenes EGD-e; identical to SEQ ID NO: 15439
  CDS (1)..(564): transl_table=11

SEQ ID NO: 62145 - protein, 187 aa, Listeria monocytogenes EGD-e; identical to SEQ ID NO: 15440

SEQ ID NO: 62146 - DNA, 570 bp, Listeria innocua Clip11262; identical to SEQ ID NO: 15441
  CDS (1)..(570): transl_table=11

SEQ ID NO: 62147 - protein, 189 aa, Listeria innocua Clip11262; identical to SEQ ID NO: 15442

SEQ ID NO: 62148 - DNA, 564 bp, Listeria innocua Clip11262; identical to SEQ ID NO: 15443
  CDS (1)..(564): transl_table=11

SEQ ID NO: 62149 - protein, 187 aa, Listeria innocua Clip11262; identical to SEQ ID NO: 15444

SEQ ID NO: 62150 - DNA, 579 bp, Nostoc sp. PCC 7120; identical to SEQ ID NO: 15445
  CDS (1)..(579): transl_table=11

SEQ ID NO: 62151 - protein, 192 aa, Nostoc sp. PCC 7120; identical to SEQ ID NO: 15446

SEQ ID NO: 62152 - DNA, 828 bp, Nostoc sp. PCC 7120; identical to SEQ ID NO: 15447
  CDS (1)..(828): transl_table=11

SEQ ID NO: 62153 - protein, 275 aa, Nostoc sp. PCC 7120; identical to SEQ ID NO: 15448

SEQ ID NO: 62154 - DNA, 513 bp, Ralstonia solanacearum GMI1000; identical to SEQ ID NO: 15449
  CDS (1)..(513): transl_table=11

SEQ ID NO: 62155 - protein, 170 aa, Ralstonia solanacearum GMI1000; identical to SEQ ID NO: 15450

SEQ ID NO: 62156 - DNA, 618 bp, Agrobacterium tumefaciens str. C58; identical to SEQ ID NO: 15451
  CDS (1)..(618): transl_table=11

SEQ ID NO: 62157 - protein, 205 aa, Agrobacterium tumefaciens str. C58; identical to SEQ ID NO: 15452

SEQ ID NO: 62158 - DNA, 561 bp, Agrobacterium tumefaciens str. C58; identical to SEQ ID NO: 15453
  CDS (1)..(561): transl_table=11

SEQ ID NO: 62159 - protein, 186 aa, Agrobacterium tumefaciens str. C58; identical to SEQ ID NO: 15454

SEQ ID NO: 62160 - DNA, 633 bp, Agrobacterium tumefaciens str. C58; identical to SEQ ID NO: 15455
  CDS (1)..(633): transl_table=11

SEQ ID NO: 62161 - protein, 210 aa, Agrobacterium tumefaciens str. C58; identical to SEQ ID NO: 15456

SEQ ID NO: 62162 - DNA, 687 bp, Brucella melitensis 16M; identical to SEQ ID NO: 15457
  CDS (1)..(687): transl_table=11

SEQ ID NO: 62163 - protein, 228 aa, Brucella melitensis 16M; identical to SEQ ID NO: 15458

SEQ ID NO: 62164 - DNA, 681 bp, Pyrobaculum aerophilum str. IM2; identical to SEQ ID NO: 15459
  CDS (1)..(681): transl_table=11

SEQ ID NO: 62165 - protein, 226 aa, Pyrobaculum aerophilum str. IM2; identical to SEQ ID NO: 15460

SEQ ID NO: 62166 - DNA, 585 bp, Clostridium perfringens str. 13; identical to SEQ ID NO: 15461
  CDS (1)..(585): transl_table=11

SEQ ID NO: 62167 - protein, 194 aa, Clostridium perfringens str. 13; identical to SEQ ID NO: 15462

SEQ ID NO: 62168 - DNA, 501 bp, Pyrococcus furiosus DSM 3638; identical to SEQ ID NO: 15463
  CDS (1)..(501): transl_table=11

SEQ ID NO: 62169 - protein, 166 aa, Pyrococcus furiosus DSM 3638; identical to SEQ ID NO: 15464

SEQ ID NO: 62170 - DNA, 687 bp, Corynebacterium glutamicum ATCC 13032; identical to SEQ ID NO: 15465
  CDS (1)..(687): transl_table=11

SEQ ID NO: 62171 - protein, 228 aa, Corynebacterium glutamicum ATCC 13032; identical to SEQ ID NO: 15466

SEQ ID NO: 62172 - DNA, 576 bp, Methanosarcina acetivorans C2A; identical to SEQ ID NO: 15467
  CDS (1)..(576): transl_table=11

SEQ ID NO: 62173 - protein, 191 aa, Methanosarcina acetivorans C2A; identical to SEQ ID NO: 15468

SEQ ID NO: 62174 - DNA, 600 bp, Methanosarcina acetivorans C2A; identical to SEQ ID NO: 15469
  CDS (1)..(600): transl_table=11

SEQ ID NO: 62175 - protein, 199 aa, Methanosarcina acetivorans C2A; identical to SEQ ID NO: 15470

SEQ ID NO: 62176 - DNA, 525 bp, Methanosarcina acetivorans C2A; identical to SEQ ID NO: 15471
  CDS (1)..(525): transl_table=11

SEQ ID NO: 62177 - protein, 174 aa, Methanosarcina acetivorans C2A; identical to SEQ ID NO: 15472

SEQ ID NO: 62178 - DNA, 555 bp, Methanosarcina acetivorans C2A; identical to SEQ ID NO: 15473
  CDS (1)..(555): transl_table=11

SEQ ID NO: 62179 - protein, 184 aa, Methanosarcina acetivorans C2A; identical to SEQ ID NO: 15474

SEQ ID NO: 62180 - DNA, 663 bp, Thermoanaerobacter tengcongensis MB4; identical to SEQ ID NO: 15475
  CDS (1)..(663): transl_table=11

SEQ ID NO: 62181 - protein, 220 aa, Thermoanaerobacter tengcongensis MB4; identical to SEQ ID NO: 15476

SEQ ID NO: 62182 - DNA, 528 bp, Streptomyces coelicolor A3(2); identical to SEQ ID NO: 15477
  CDS (1)..(528)

SEQ ID NO: 62183 - protein, 175 aa, Streptomyces coelicolor A3(2); identical to SEQ ID NO: 15478

SEQ ID NO: 62184 - DNA, 804 bp, Streptomyces coelicolor A3(2); identical to SEQ ID NO: 15479
  CDS (1)..(804)

SEQ ID NO: 62185 - protein, 267 aa, Streptomyces coelicolor A3(2); identical to SEQ ID NO: 15480

SEQ ID NO: 62186 - DNA, 582 bp, Streptomyces coelicolor A3(2); identical to SEQ ID NO: 15481
  CDS (1)..(582)

SEQ ID NO: 62187 - protein, 193 aa, Streptomyces coelicolor A3(2); identical to SEQ ID NO: 15482

SEQ ID NO: 62188 - DNA, 564 bp, Methanosarcina mazei Go1; identical to SEQ ID NO: 15483
  CDS (1)..(564): transl_table=11

SEQ ID NO: 62189 - protein, 187 aa, Methanosarcina mazei Go1; identical to SEQ ID NO: 15484

SEQ ID NO: 62190 - DNA, 702 bp, Methanosarcina mazei Go1; identical to SEQ ID NO: 15485
  CDS (1)..(702): transl_table=11

SEQ ID NO: 62191 - protein, 233 aa, Methanosarcina mazei Go1; identical to SEQ ID NO: 15486

SEQ ID NO: 62192 - DNA, 579 bp, Xanthomonas campestris pv. campestris str. ATCC 33913; identical to SEQ ID NO: 15487
  CDS (1)..(579): transl_table=11

SEQ ID NO: 62193 - protein, 192 aa, Xanthomonas campestris pv. campestris str. ATCC 33913; identical to SEQ ID NO: 15488

SEQ ID NO: 62194 - DNA, 579 bp, Xanthomonas axonopodis pv. citri str. 306; identical to SEQ ID NO: 15489
  CDS (1)..(579): transl_table=11

SEQ ID NO: 62195 - protein, 192 aa, Xanthomonas axonopodis pv. citri str. 306; identical to SEQ ID NO: 15490

SEQ ID NO: 62196 - DNA, 639 bp, Streptococcus agalactiae 2603V/R; identical to SEQ ID NO: 15491
  CDS (1)..(639): transl_table=11

SEQ ID NO: 62197 - protein, 212 aa, Streptococcus agalactiae 2603V/R; identical to SEQ ID NO: 15492

SEQ ID NO: 62198 - DNA, 549 bp, Streptococcus agalactiae 2603V/R; identical to SEQ ID NO: 15493
  CDS (1)..(549): transl_table=11

SEQ ID NO: 62199 - protein, 182 aa, Streptococcus agalactiae 2603V/R; identical to SEQ ID NO: 15494

SEQ ID NO: 62200 - DNA, 540 bp, Oceanobacillus iheyensis HTE831; identical to SEQ ID NO: 15495
  CDS (1)..(540): transl_table=11

SEQ ID NO: 62201 - protein, 179 aa, Oceanobacillus iheyensis HTE831; identical to SEQ ID NO: 15496

SEQ ID NO: 62202 - DNA, 675 bp, Bifidobacterium longum NCC2705; identical to SEQ ID NO: 15497
  CDS (1)..(675): transl_table=11

SEQ ID NO: 62203 - protein, 224 aa, Bifidobacterium longum NCC2705; identical to SEQ ID NO: 15498

SEQ ID NO: 62204 - DNA, 678 bp, Bifidobacterium longum NCC2705; identical to SEQ ID NO: 15499
  CDS (1)..(678): transl_table=11

SEQ ID NO: 62205 - protein, 225 aa, Bifidobacterium longum NCC2705; identical to SEQ ID NO: 15500

SEQ ID NO: 62206 - DNA, 597 bp, Leptospira interrogans serovar Lai str. 56601; identical to SEQ ID NO: 15501
  CDS (1)..(597): transl_table=11

SEQ ID NO: 62207 - protein, 198 aa, Leptospira interrogans serovar Lai str. 56601; identical to SEQ ID NO: 15502

SEQ ID NO: 62208 - DNA, 579 bp, Shewanella oneidensis MR-1; identical to SEQ ID NO: 15503
  CDS (1)..(579): transl_table=11

SEQ ID NO: 62209 - protein, 192 aa, Shewanella oneidensis MR-1; identical to SEQ ID NO: 15504

SEQ ID NO: 62210 - DNA, 630 bp, Shewanella oneidensis MR-1; identical to SEQ ID NO: 15505
  CDS (1)..(630): transl_table=11

SEQ ID NO: 62211 - protein, 209 aa, Shewanella oneidensis MR-1; identical to SEQ ID NO: 15506

SEQ ID NO: 62212 - DNA, 699 bp, Streptococcus mutans UA159; identical to SEQ ID NO: 15507
  CDS (1)..(699): transl_table=11

SEQ ID NO: 62213 - protein, 232 aa, Streptococcus mutans UA159; identical to SEQ ID NO: 15508

SEQ ID NO: 62214 - DNA, 648 bp, Streptomyces coelicolor A3(2); identical to SEQ ID NO: 15509
  CDS (1)..(648)

SEQ ID NO: 62215 - protein, 215 aa, Streptomyces coelicolor A3(2); identical to SEQ ID NO: 15510

SEQ ID NO: 62216 - DNA, 567 bp, Pseudomonas putida KT2440; identical to SEQ ID NO: 15511
  CDS (1)..(567): transl_table=11

SEQ ID NO: 62217 - protein, 188 aa, Pseudomonas putida KT2440; identical to SEQ ID NO: 15512

SEQ ID NO: 62218 - DNA, 552 bp, Escherichia coli CFT073; identical to SEQ ID NO: 15513
  CDS (1)..(552): transl_table=11

SEQ ID NO: 62219 - protein, 183 aa, Escherichia coli CFT073; identical to SEQ ID NO: 15514

SEQ ID NO: 62220 - DNA, 549 bp, Escherichia coli CFT073; identical to SEQ ID NO: 15515
  CDS (1)..(549): transl_table=11

SEQ ID NO: 62221 - protein, 182 aa, Escherichia coli CFT073; identical to SEQ ID NO: 15516

SEQ ID NO: 62222 - DNA, 588 bp, Mycoplasma penetrans HF-2; identical to SEQ ID NO: 15517
  CDS (1)..(588): transl_table=4

SEQ ID NO: 62223 - protein, 195 aa, Mycoplasma penetrans HF-2; identical to SEQ ID NO: 15518

SEQ ID NO: 62224 - DNA, 771 bp, Vibrio vulnificus CMCP6; identical to SEQ ID NO: 15519
  CDS (1)..(771): transl_table=11

SEQ ID NO: 62225 - protein, 256 aa, Vibrio vulnificus CMCP6; identical to SEQ ID NO: 15520

SEQ ID NO: 62226 - DNA, 594 bp, Vibrio vulnificus CMCP6; identical to SEQ ID NO: 15521
  CDS (1)..(594): transl_table=11

SEQ ID NO: 62227 - protein, 197 aa, Vibrio vulnificus CMCP6; identical to SEQ ID NO: 15522

SEQ ID NO: 62228 - DNA, 549 bp, Vibrio vulnificus CMCP6; identical to SEQ ID NO: 15523
  CDS (1)..(549): transl_table=11

SEQ ID NO: 62229 - protein, 182 aa, Vibrio vulnificus CMCP6; identical to SEQ ID NO: 15524

SEQ ID NO: 62230 - DNA, 621 bp, Bradyrhizobium japonicum USDA 110; identical to SEQ ID NO: 15525
  CDS (1)..(621)

SEQ ID NO: 62231 - protein, 206 aa, Bradyrhizobium japonicum USDA 110; identical to SEQ ID NO: 15526

SEQ ID NO: 62232 - DNA, 564 bp, Clostridium tetani E88; identical to SEQ ID NO: 15527
  CDS (1)..(564): transl_table=11

SEQ ID NO: 62233 - protein, 187 aa, Clostridium tetani E88; identical to SEQ ID NO: 15528

SEQ ID NO: 62234 - DNA, 618 bp, Lactobacillus plantarum WCFS1; identical to SEQ ID NO: 15529
  CDS (1)..(618): transl_table=11

SEQ ID NO: 62235 - protein, 205 aa, Lactobacillus plantarum WCFS1; identical to SEQ ID NO: 15530

SEQ ID NO: 62236 - DNA, 609 bp, Lactobacillus plantarum WCFS1; identical to SEQ ID NO: 15531
  CDS (1)..(609): transl_table=11

SEQ ID NO: 62237 - protein, 202 aa, Lactobacillus plantarum WCFS1; identical to SEQ ID NO: 15532

SEQ ID NO: 62238 - DNA, 555 bp, Lactobacillus plantarum WCFS1; identical to SEQ ID NO: 15533
  CDS (1)..(555): transl_table=11

SEQ ID NO: 62239 - protein, 184 aa, Lactobacillus plantarum WCFS1; identical to SEQ ID NO: 15534

SEQ ID NO: 62240 - DNA, 603 bp, Lactobacillus plantarum WCFS1; identical to SEQ ID NO: 15535
  CDS (1)..(603): transl_table=11

SEQ ID NO: 62241 - protein, 200 aa, Lactobacillus plantarum WCFS1; identical to SEQ ID NO: 15536

SEQ ID NO: 62242 - DNA, 621 bp, Lactobacillus plantarum WCFS1; identical to SEQ ID NO: 15537
  CDS (1)..(621): transl_table=11

SEQ ID NO: 62243 - protein, 206 aa, Lactobacillus plantarum WCFS1; identical to SEQ ID NO: 15538

SEQ ID NO: 62244 - DNA, 570 bp, Lactobacillus plantarum WCFS1; identical to SEQ ID NO: 15539
  CDS (1)..(570): transl_table=11

SEQ ID NO: 62245 - protein, 189 aa, Lactobacillus plantarum WCFS1; identical to SEQ ID NO: 15540

SEQ ID NO: 62246 - DNA, 561 bp, Lactobacillus plantarum WCFS1; identical to SEQ ID NO: 15541
  CDS (1)..(561): transl_table=11

SEQ ID NO: 62247 - protein, 186 aa, Lactobacillus plantarum WCFS1; identical to SEQ ID NO: 15542

SEQ ID NO: 62248 - DNA, 555 bp, Vibrio parahaemolyticus RIMD 2210633; identical to SEQ ID NO: 15543
  CDS (1)..(555): transl_table=11

SEQ ID NO: 62249 - protein, 184 aa, Vibrio parahaemolyticus RIMD 2210633; identical to SEQ ID NO: 15544

SEQ ID NO: 62250 - DNA, 549 bp, Vibrio parahaemolyticus RIMD 2210633; identical to SEQ ID NO: 15545
  CDS (1)..(549): transl_table=11

SEQ ID NO: 62251 - protein, 182 aa, Vibrio parahaemolyticus RIMD 2210633; identical to SEQ ID NO: 15546

SEQ ID NO: 62252 - DNA, 552 bp, Salmonella enterica subsp. enterica serovar Typhi Ty2; identical to SEQ ID NO: 15547
  CDS (1)..(552): transl_table=11

SEQ ID NO: 62253 - protein, 183 aa, Salmonella enterica subsp. enterica serovar Typhi Ty2; identical to SEQ ID NO: 15548

SEQ ID NO: 62254 - DNA, 759 bp, Bacteroides thetaiotaomicron VPI-5482; identical to SEQ ID NO: 15549
  CDS (1)..(759): transl_table=11

SEQ ID NO: 62255 - protein, 252 aa, Bacteroides thetaiotaomicron VPI-5482; identical to SEQ ID NO: 15550

SEQ ID NO: 62256 - DNA, 624 bp, Bacteroides thetaiotaomicron VPI-5482; identical to SEQ ID NO: 15551
  CDS (1)..(624): transl_table=11

SEQ ID NO: 62257 - protein, 207 aa, Bacteroides thetaiotaomicron VPI-5482; identical to SEQ ID NO: 15552

SEQ ID NO: 62258 - DNA, 564 bp, Bacteroides thetaiotaomicron VPI-5482; identical to SEQ ID NO: 15553
  CDS (1)..(564): transl_table=11

SEQ ID NO: 62259 - protein, 187 aa, Bacteroides thetaiotaomicron VPI-5482; identical to SEQ ID NO: 15554

SEQ ID NO: 62260 - DNA, 606 bp, Bacteroides thetaiotaomicron VPI-5482; identical to SEQ ID NO: 15555
  CDS (1)..(606): transl_table=11

SEQ ID NO: 62261 - protein, 201 aa, Bacteroides thetaiotaomicron VPI-5482; identical to SEQ ID NO: 15556

SEQ ID NO: 62262 - DNA, 552 bp, Bacteroides thetaiotaomicron VPI-5482; identical to SEQ ID NO: 15557
  CDS (1)..(552): transl_table=11

SEQ ID NO: 62263 - protein, 183 aa, Bacteroides thetaiotaomicron VPI-5482; identical to SEQ ID NO: 15558

SEQ ID NO: 62264 - DNA, 846 bp, Enterococcus faecalis V583; identical to SEQ ID NO: 15559
  CDS (1)..(846): transl_table=11

SEQ ID NO: 62265 - protein, 281 aa, Enterococcus faecalis V583; identical to SEQ ID NO: 15560

SEQ ID NO: 62266 - DNA, 639 bp, Enterococcus faecalis V583; identical to SEQ ID NO: 15561
  CDS (1)..(639): transl_table=11

SEQ ID NO: 62267 - protein, 212 aa, Enterococcus faecalis V583; identical to SEQ ID NO: 15562

SEQ ID NO: 62268 - DNA, 582 bp, Enterococcus faecalis V583; identical to SEQ ID NO: 15563
  CDS (1)..(582): transl_table=11

SEQ ID NO: 62269 - protein, 193 aa, Enterococcus faecalis V583; identical to SEQ ID NO: 15564

SEQ ID NO: 62270 - DNA, 723 bp, Bacillus cereus ATCC 14579; identical to SEQ ID NO: 15565
  CDS (1)..(723): transl_table=11

SEQ ID NO: 62271 - protein, 240 aa, Bacillus cereus ATCC 14579; identical to SEQ ID NO: 15566

SEQ ID NO: 62272 - DNA, 561 bp, Bacillus cereus ATCC 14579; identical to SEQ ID NO: 15567
  CDS (1)..(561): transl_table=11

SEQ ID NO: 62273 - protein, 186 aa, Bacillus cereus ATCC 14579; identical to SEQ ID NO: 15568

SEQ ID NO: 62274 - DNA, 666 bp, Bacillus anthracis str. Ames; identical to SEQ ID NO: 15569
  CDS (1)..(666): transl_table=11

SEQ ID NO: 62275 - protein, 221 aa, Bacillus anthracis str. Ames; identical to SEQ ID NO: 15570

SEQ ID NO: 62276 - DNA, 564 bp, Bacillus anthracis str. Ames; identical to SEQ ID NO: 15571
  CDS (1)..(564): transl_table=11

SEQ ID NO: 62277 - protein, 187 aa, Bacillus anthracis str. Ames; identical to SEQ ID NO: 15572

SEQ ID NO: 62278 - DNA, 723 bp, Bacillus anthracis str. Ames; identical to SEQ ID NO: 15573
  CDS (1)..(723): transl_table=11

SEQ ID NO: 62279 - protein, 240 aa, Bacillus anthracis str. Ames; identical to SEQ ID NO: 15574

SEQ ID NO: 62280 - DNA, 618 bp, Helicobacter hepaticus ATCC 51449; identical to SEQ ID NO: 15575
  CDS (1)..(618): transl_table=11

SEQ ID NO: 62281 - protein, 205 aa, Helicobacter hepaticus ATCC 51449; identical to SEQ ID NO: 15576

SEQ ID NO: 62282 - DNA, 555 bp, Rhodopirellula baltica SH 1; identical to SEQ ID NO: 15577
  CDS (1)..(555): transl_table=11

SEQ ID NO: 62283 - protein, 184 aa, Rhodopirellula baltica SH 1; identical to SEQ ID NO: 15578

SEQ ID NO: 62284 - DNA, 522 bp, Chromobacterium violaceum ATCC 12472; identical to SEQ ID NO: 15579
  CDS (1)..(522): transl_table=11

SEQ ID NO: 62285 - protein, 173 aa, Chromobacterium violaceum ATCC 12472; identical to SEQ ID NO: 15580

SEQ ID NO: 62286 - DNA, 561 bp, Gloeobacter violaceus PCC 7421; identical to SEQ ID NO: 15581
  CDS (1)..(561): transl_table=11

SEQ ID NO: 62287 - protein, 186 aa, Gloeobacter violaceus PCC 7421; identical to SEQ ID NO: 15582

SEQ ID NO: 62288 - DNA, 771 bp, Vibrio vulnificus YJ016; identical to SEQ ID NO: 15583
  CDS (1)..(771): transl_table=11

SEQ ID NO: 62289 - protein, 256 aa, Vibrio vulnificus YJ016; identical to SEQ ID NO: 15584

SEQ ID NO: 62290 - DNA, 558 bp, Vibrio vulnificus YJ016; identical to SEQ ID NO: 15585
  CDS (1)..(558): transl_table=11

SEQ ID NO: 62291 - protein, 185 aa, Vibrio vulnificus YJ016; identical to SEQ ID NO: 15586

SEQ ID NO: 62292 - DNA, 657 bp, Vibrio vulnificus YJ016; identical to SEQ ID NO: 15587
  CDS (1)..(657): transl_table=11

SEQ ID NO: 62293 - protein, 218 aa, Vibrio vulnificus YJ016; identical to SEQ ID NO: 15588

SEQ ID NO: 62294 - DNA, 621 bp, Vibrio vulnificus YJ016; identical to SEQ ID NO: 15589
  CDS (1)..(621): transl_table=11

SEQ ID NO: 62295 - protein, 206 aa, Vibrio vulnificus YJ016; identical to SEQ ID NO: 15590

SEQ ID NO: 62296 - DNA, 570 bp, Corynebacterium diphtheriae NCTC 13129; identical to SEQ ID NO: 15591
  CDS (1)..(570): transl_table=11

SEQ ID NO: 62297 - protein, 189 aa, Corynebacterium diphtheriae NCTC 13129; identical to SEQ ID NO: 15592

SEQ ID NO: 62298 - DNA, 573 bp, Rhodopseudomonas palustris CGA009; identical to SEQ ID NO: 15593
  CDS (1)..(573): transl_table=11

SEQ ID NO: 62299 - protein, 190 aa, Rhodopseudomonas palustris CGA009; identical to SEQ ID NO: 15594

SEQ ID NO: 62300 - DNA, 615 bp, Lactobacillus johnsonii NCC 533; identical to SEQ ID NO: 15595
  CDS (1)..(615): transl_table=11

SEQ ID NO: 62301 - protein, 204 aa, Lactobacillus johnsonii NCC 533; identical to SEQ ID NO: 15596

SEQ ID NO: 62302 - DNA, 564 bp, Bacillus cereus ATCC 10987; identical to SEQ ID NO: 15597
  CDS (1)..(564): transl_table=11

SEQ ID NO: 62303 - protein, 187 aa, Bacillus cereus ATCC 10987; identical to SEQ ID NO: 15598

SEQ ID NO: 62304 - DNA, 2154 bp, Neurospora crassa; identical to SEQ ID NO: 15599
  CDS (1)..(2154)

SEQ ID NO: 62305 - protein, 717 aa, Neurospora crassa; identical to SEQ ID NO: 15600

SEQ ID NO: 62306 - DNA, 660 bp, Magnaporthe grisea 70-15; identical to SEQ ID NO: 15601
  CDS (1)..(660)

SEQ ID NO: 62307 - protein, 219 aa, Magnaporthe grisea 70-15; identical to SEQ ID NO: 15602

SEQ ID NO: 62308 - DNA, 699 bp, Gibberella zeae PH-1; identical to SEQ ID NO: 15603
  CDS (1)..(699)

SEQ ID NO: 62309 - protein, 232 aa, Gibberella zeae PH-1; identical to SEQ ID NO: 15604

SEQ ID NO: 62310 - DNA, 699 bp, Gibberella zeae PH-1; identical to SEQ ID NO: 15605
  CDS (1)..(699)

SEQ ID NO: 62311 - protein, 232 aa, Gibberella zeae PH-1; identical to SEQ ID NO: 15606

SEQ ID NO: 62312 - DNA, 690 bp, Ustilago maydis 521; identical to SEQ ID NO: 15607
  CDS (1)..(690)

SEQ ID NO: 62313 - protein, 229 aa, Ustilago maydis 521; identical to SEQ ID NO: 15608

SEQ ID NO: 62314 - DNA, 702 bp, Aspergillus nidulans FGSC A4; identical to SEQ ID NO: 15609
  CDS (1)..(702)

SEQ ID NO: 62315 - protein, 233 aa, Aspergillus nidulans FGSC A4; identical to SEQ ID NO: 15610

SEQ ID NO: 62316 - DNA, 618 bp, Aspergillus nidulans FGSC A4; identical to SEQ ID NO: 15611
  CDS (1)..(618)

SEQ ID NO: 62317 - protein, 205 aa, Aspergillus nidulans FGSC A4; identical to SEQ ID NO: 15612

SEQ ID NO: 62318 - DNA, 573 bp, Candida glabrata CBS138; identical to SEQ ID NO: 15613
  CDS (1)..(573)

SEQ ID NO: 62319 - protein, 190 aa, Candida glabrata CBS138; identical to SEQ ID NO: 15614

SEQ ID NO: 62320 - DNA, 570 bp, Kluyveromyces lactis NRRL Y-1140; identical to SEQ ID NO: 15615
  CDS (1)..(570)

SEQ ID NO: 62321 - protein, 189 aa, Kluyveromyces lactis NRRL Y-1140; identical to SEQ ID NO: 15616

SEQ ID NO: 62322 - DNA, 693 bp, Debaryomyces hansenii CBS767; identical to SEQ ID NO: 15617
  CDS (1)..(693)

SEQ ID NO: 62323 - protein, 230 aa, Debaryomyces hansenii CBS767; identical to SEQ ID NO: 15618

SEQ ID NO: 62324 - DNA, 690 bp, Debaryomyces hansenii CBS767; identical to SEQ ID NO: 15619
  CDS (1)..(690)

SEQ ID NO: 62325 - protein, 229 aa, Debaryomyces hansenii CBS767; identical to SEQ ID NO: 15620

SEQ ID NO: 62326 - DNA, 666 bp, Yarrowia lipolytica CLIB99; identical to SEQ ID NO: 15621
  CDS (1)..(666)

SEQ ID NO: 62327 - protein, 221 aa, Yarrowia lipolytica CLIB99; identical to SEQ ID NO: 15622

SEQ ID NO: 62328 - DNA, 840 bp, Yarrowia lipolytica CLIB99; identical to SEQ ID NO: 15623
  CDS (1)..(840)

SEQ ID NO: 62329 - protein, 279 aa, Yarrowia lipolytica CLIB99; identical to SEQ ID NO: 15624

SEQ ID NO: 62330 - DNA, 642 bp, Cryptococcus neoformans var. neoformans JEC21; identical to SEQ ID NO: 15625
  CDS (1)..(642)

SEQ ID NO: 62331 - protein, 213 aa, Cryptococcus neoformans var. neoformans JEC21; identical to SEQ ID NO: 15626

SEQ ID NO: 62332 - DNA, 546 bp, Dictyostelium discoideum; identical to SEQ ID NO: 15627
  CDS (1)..(546)

SEQ ID NO: 62333 - protein, 181 aa, Dictyostelium discoideum; identical to SEQ ID NO: 15628

SEQ ID NO: 62334 - DNA, 576 bp, Dictyostelium discoideum; identical to SEQ ID NO: 15629
  CDS (1)..(576)

SEQ ID NO: 62335 - protein, 191 aa, Dictyostelium discoideum; identical to SEQ ID NO: 15630

SEQ ID NO: 62336 - DNA, 591 bp, Dictyostelium discoideum; identical to SEQ ID NO: 15631
  CDS (1)..(591)

SEQ ID NO: 62337 - protein, 196 aa, Dictyostelium discoideum; identical to SEQ ID NO: 15632

SEQ ID NO: 62338 - DNA, 573 bp, Dictyostelium discoideum; identical to SEQ ID NO: 15633
  CDS (1)..(573)

SEQ ID NO: 62339 - protein, 190 aa, Dictyostelium discoideum; identical to SEQ ID NO: 15634

SEQ ID NO: 62340 - DNA, 459 bp, Entamoeba histolytica HM-1:IMSS; identical to SEQ ID NO: 15635
  CDS (1)..(459)

SEQ ID NO: 62341 - protein, 152 aa, Entamoeba histolytica HM-1:IMSS; identical to SEQ ID NO: 15636

SEQ ID NO: 62342 - DNA, 609 bp, Entamoeba histolytica HM-1:IMSS; identical to SEQ ID NO: 15637
  CDS (1)..(609)

SEQ ID NO: 62343 - protein, 202 aa, Entamoeba histolytica HM-1:IMSS; identical to SEQ ID NO: 15638

SEQ ID NO: 62344 - DNA, 609 bp, Entamoeba histolytica HM-1:IMSS; identical to SEQ ID NO: 15639
  CDS (1)..(609)

SEQ ID NO: 62345 - protein, 202 aa, Entamoeba histolytica HM-1:IMSS; identical to SEQ ID NO: 15640

SEQ ID NO: 62346 - DNA, 549 bp, Entamoeba histolytica HM-1:IMSS; identical to SEQ ID NO: 15641
  CDS (1)..(549)

SEQ ID NO: 62347 - protein, 182 aa, Entamoeba histolytica HM-1:IMSS; identical to SEQ ID NO: 15642

SEQ ID NO: 62348 - DNA, 612 bp, Entamoeba histolytica HM-1:IMSS; identical to SEQ ID NO: 15643
  CDS (1)..(612)

SEQ ID NO: 62349 - protein, 203 aa, Entamoeba histolytica HM-1:IMSS; identical to SEQ ID NO: 15644

SEQ ID NO: 62350 - DNA, 615 bp, Entamoeba histolytica HM-1:IMSS; identical to SEQ ID NO: 15645
  CDS (1)..(615)

SEQ ID NO: 62351 - protein, 204 aa, Entamoeba histolytica HM-1:IMSS; identical to SEQ ID NO: 15646

SEQ ID NO: 62352 - DNA, 924 bp, Candida albicans SC5314; identical to SEQ ID NO: 15647
  CDS (1)..(924): transl_table=12

SEQ ID NO: 62353 - protein, 307 aa, Candida albicans SC5314; identical to SEQ ID NO: 15648

SEQ ID NO: 62354 - DNA, 888 bp, Thermus thermophilus HB27; identical to SEQ ID NO: 15649
  CDS (1)..(888): transl_table=11

SEQ ID NO: 62355 - protein, 295 aa, Thermus thermophilus HB27; identical to SEQ ID NO: 15650

SEQ ID NO: 62356 - DNA, 594 bp, Desulfovibrio vulgaris subsp. vulgaris str. Hildenborough; identical to SEQ ID NO: 15651
  CDS (1)..(594): transl_table=11

SEQ ID NO: 62357 - protein, 197 aa, Desulfovibrio vulgaris subsp. vulgaris str. Hildenborough; identical to SEQ ID NO: 15652

SEQ ID NO: 62358 - DNA, 570 bp, Listeria monocytogenes str. 4b F2365; identical to SEQ ID NO: 15653
  CDS (1)..(570): transl_table=11

SEQ ID NO: 62359 - protein, 189 aa, Listeria monocytogenes str. 4b F2365; identical to SEQ ID NO: 15654

SEQ ID NO: 62360 - DNA, 564 bp, Listeria monocytogenes str. 4b F2365; identical to SEQ ID NO: 15655
  CDS (1)..(564): transl_table=11

SEQ ID NO: 62361 - protein, 187 aa, Listeria monocytogenes str. 4b F2365; identical to SEQ ID NO: 15656

SEQ ID NO: 62362 - DNA, 564 bp, Bacillus thuringiensis serovar konkukian str. 97-27; identical to SEQ ID NO: 15657
  CDS (1)..(564): transl_table=11

SEQ ID NO: 62363 - protein, 187 aa, Bacillus thuringiensis serovar konkukian str. 97-27; identical to SEQ ID NO: 15658

SEQ ID NO: 62364 - DNA, 486 bp, Staphylococcus aureus subsp. aureus MRSA252; identical to SEQ ID NO: 15659
  CDS (1)..(486): transl_table=11

SEQ ID NO: 62365 - protein, 161 aa, Staphylococcus aureus subsp. aureus MRSA252; identical to SEQ ID NO: 15660

SEQ ID NO: 62366 - DNA, 600 bp, Staphylococcus aureus subsp. aureus MRSA252; identical to SEQ ID NO: 15661
  CDS (1)..(600): transl_table=11

SEQ ID NO: 62367 - protein, 199 aa, Staphylococcus aureus subsp. aureus MRSA252; identical to SEQ ID NO: 15662

SEQ ID NO: 62368 - DNA, 627 bp, Erwinia carotovora subsp. atroseptica SCRI1043; identical to SEQ ID NO: 15663
  CDS (1)..(627)

SEQ ID NO: 62369 - protein, 208 aa, Erwinia carotovora subsp. atroseptica SCRI1043; identical to SEQ ID NO: 15664

SEQ ID NO: 62370 - DNA, 573 bp, Propionibacterium acnes KPA171202; identical to SEQ ID NO: 15665
  CDS (1)..(573): transl_table=11

SEQ ID NO: 62371 - protein, 190 aa, Propionibacterium acnes KPA171202; identical to SEQ ID NO: 15666

SEQ ID NO: 62372 - DNA, 510 bp, Desulfotalea psychrophila LSv54; identical to SEQ ID NO: 15667
  CDS (1)..(510): transl_table=11

SEQ ID NO: 62373 - protein, 169 aa, Desulfotalea psychrophila LSv54; identical to SEQ ID NO: 15668

SEQ ID NO: 62374 - DNA, 579 bp, Bacillus licheniformis ATCC 14580; identical to SEQ ID NO: 15669
  CDS (1)..(579): transl_table=11

SEQ ID NO: 62375 - protein, 192 aa, Bacillus licheniformis ATCC 14580; identical to SEQ ID NO: 15670

SEQ ID NO: 62376 - DNA, 564 bp, Bacillus cereus E33L; identical to SEQ ID NO: 15671
  CDS (1)..(564): transl_table=11

SEQ ID NO: 62377 - protein, 187 aa, Bacillus cereus E33L; identical to SEQ ID NO: 15672

SEQ ID NO: 62378 - DNA, 603 bp, Mannheimia succiniciproducens MBEL55E; identical to SEQ ID NO: 15673
  CDS (1)..(603): transl_table=11

SEQ ID NO: 62379 - protein, 200 aa, Mannheimia succiniciproducens MBEL55E; identical to SEQ ID NO: 15674

SEQ ID NO: 62380 - DNA, 597 bp, Mannheimia succiniciproducens MBEL55E; identical to SEQ ID NO: 15675
  CDS (1)..(597): transl_table=11

SEQ ID NO: 62381 - protein, 198 aa, Mannheimia succiniciproducens MBEL55E; identical to SEQ ID NO: 15676

SEQ ID NO: 62382 - DNA, 606 bp, Bacteroides fragilis YCH46; identical to SEQ ID NO: 15677
  CDS (1)..(606): transl_table=11

SEQ ID NO: 62383 - protein, 201 aa, Bacteroides fragilis YCH46; identical to SEQ ID NO: 15678

SEQ ID NO: 62384 - DNA, 630 bp, Bacteroides fragilis YCH46; identical to SEQ ID NO: 15679
  CDS (1)..(630): transl_table=11

SEQ ID NO: 62385 - protein, 209 aa, Bacteroides fragilis YCH46; identical to SEQ ID NO: 15680

SEQ ID NO: 62386 - DNA, 627 bp, Bacteroides fragilis YCH46; identical to SEQ ID NO: 15681
  CDS (1)..(627): transl_table=11

SEQ ID NO: 62387 - protein, 208 aa, Bacteroides fragilis YCH46; identical to SEQ ID NO: 15682

SEQ ID NO: 62388 - DNA, 591 bp, Methylococcus capsulatus str. Bath; identical to SEQ ID NO: 15683
  CDS (1)..(591): transl_table=11

SEQ ID NO: 62389 - protein, 196 aa, Methylococcus capsulatus str. Bath; identical to SEQ ID NO: 15684

SEQ ID NO: 62390 - DNA, 648 bp, Photobacterium profundum SS9; identical to SEQ ID NO: 15685
  CDS (1)..(648): transl_table=11

SEQ ID NO: 62391 - protein, 215 aa, Photobacterium profundum SS9; identical to SEQ ID NO: 15686

SEQ ID NO: 62392 - DNA, 549 bp, Photobacterium profundum SS9; identical to SEQ ID NO: 15687
  CDS (1)..(549): transl_table=11

SEQ ID NO: 62393 - protein, 182 aa, Photobacterium profundum SS9; identical to SEQ ID NO: 15688

SEQ ID NO: 62394 - DNA, 564 bp, Photobacterium profundum SS9; identical to SEQ ID NO: 15689
  CDS (1)..(564): transl_table=11

SEQ ID NO: 62395 - protein, 187 aa, Photobacterium profundum SS9; identical to SEQ ID NO: 15690

SEQ ID NO: 62396 - DNA, 561 bp, Haloarcula marismortui ATCC 43049; identical to SEQ ID NO: 15691
  CDS (1)..(561): transl_table=11

SEQ ID NO: 62397 - protein, 186 aa, Haloarcula marismortui ATCC 43049; identical to SEQ ID NO: 15692

SEQ ID NO: 62398 - DNA, 675 bp, Geobacillus kaustophilus HTA426; identical to SEQ ID NO: 15693
  CDS (1)..(675): transl_table=11

SEQ ID NO: 62399 - protein, 224 aa, Geobacillus kaustophilus HTA426; identical to SEQ ID NO: 15694

SEQ ID NO: 62400 - DNA, 558 bp, Geobacillus kaustophilus HTA426; identical to SEQ ID NO: 15695
  CDS (1)..(558): transl_table=11

SEQ ID NO: 62401 - protein, 185 aa, Geobacillus kaustophilus HTA426; identical to SEQ ID NO: 15696

SEQ ID NO: 62402 - DNA, 552 bp, Azoarcus sp. EbN1; identical to SEQ ID NO: 15697
  CDS (1)..(552): transl_table=11

SEQ ID NO: 62403 - protein, 183 aa, Azoarcus sp. EbN1; identical to SEQ ID NO: 15698

SEQ ID NO: 62404 - DNA, 600 bp, Zymomonas mobilis subsp. mobilis ZM4; identical to SEQ ID NO: 15699
  CDS (1)..(600): transl_table=11

SEQ ID NO: 62405 - protein, 199 aa, Zymomonas mobilis subsp. mobilis ZM4; identical to SEQ ID NO: 15700

SEQ ID NO: 62406 - DNA, 693 bp, Dehalococcoides ethenogenes 195; identical to SEQ ID NO: 15701
  CDS (1)..(693): transl_table=11

SEQ ID NO: 62407 - protein, 230 aa, Dehalococcoides ethenogenes 195; identical to SEQ ID NO: 15702

SEQ ID NO: 62408 - DNA, 486 bp, Staphylococcus aureus subsp. aureus COL; identical to SEQ ID NO: 15703
  CDS (1)..(486): transl_table=11

SEQ ID NO: 62409 - protein, 161 aa, Staphylococcus aureus subsp. aureus COL; identical to SEQ ID NO: 15704

SEQ ID NO: 62410 - DNA, 600 bp, Staphylococcus aureus subsp. aureus COL; identical to SEQ ID NO: 15705
  CDS (1)..(600): transl_table=11

SEQ ID NO: 62411 - protein, 199 aa, Staphylococcus aureus subsp. aureus COL; identical to SEQ ID NO: 15706

SEQ ID NO: 62412 - DNA, 615 bp, Lactobacillus acidophilus NCFM; identical to SEQ ID NO: 15707
  CDS (1)..(615): transl_table=11

SEQ ID NO: 62413 - protein, 204 aa, Lactobacillus acidophilus NCFM; identical to SEQ ID NO: 15708

SEQ ID NO: 62414 - DNA, 600 bp, Vibrio fischeri ES114; identical to SEQ ID NO: 15709
  CDS (1)..(600): transl_table=11

SEQ ID NO: 62415 - protein, 199 aa, Vibrio fischeri ES114; identical to SEQ ID NO: 15710

SEQ ID NO: 62416 - DNA, 546 bp, Vibrio fischeri ES114; identical to SEQ ID NO: 15711
  CDS (1)..(546): transl_table=11

SEQ ID NO: 62417 - protein, 181 aa, Vibrio fischeri ES114; identical to SEQ ID NO: 15712

SEQ ID NO: 62418 - DNA, 552 bp, Vibrio fischeri ES114; identical to SEQ ID NO: 15713
  CDS (1)..(552): transl_table=11

SEQ ID NO: 62419 - protein, 183 aa, Vibrio fischeri ES114; identical to SEQ ID NO: 15714

SEQ ID NO: 62420 - DNA, 756 bp, Vibrio fischeri ES114; identical to SEQ ID NO: 15715
  CDS (1)..(756): transl_table=11

SEQ ID NO: 62421 - protein, 251 aa, Vibrio fischeri ES114; identical to SEQ ID NO: 15716

SEQ ID NO: 62422 - DNA, 522 bp, Bacteroides fragilis NCTC 9343; identical to SEQ ID NO: 15717
  CDS (1)..(522): transl_table=11

SEQ ID NO: 62423 - protein, 173 aa, Bacteroides fragilis NCTC 9343; identical to SEQ ID NO: 15718

SEQ ID NO: 62424 - DNA, 600 bp, Bacteroides fragilis NCTC 9343; identical to SEQ ID NO: 15719
  CDS (1)..(600): transl_table=11

SEQ ID NO: 62425 - protein, 199 aa, Bacteroides fragilis NCTC 9343; identical to SEQ ID NO: 15720

SEQ ID NO: 62426 - DNA, 630 bp, Bacteroides fragilis NCTC 9343; identical to SEQ ID NO: 15721
  CDS (1)..(630): transl_table=11

SEQ ID NO: 62427 - protein, 209 aa, Bacteroides fragilis NCTC 9343; identical to SEQ ID NO: 15722

SEQ ID NO: 62428 - DNA, 624 bp, Bacteroides fragilis NCTC 9343; identical to SEQ ID NO: 15723
  CDS (1)..(624): transl_table=11

SEQ ID NO: 62429 - protein, 207 aa, Bacteroides fragilis NCTC 9343; identical to SEQ ID NO: 15724

SEQ ID NO: 62430 - DNA, 552 bp, Bacteroides fragilis NCTC 9343; identical to SEQ ID NO: 15725
  CDS (1)..(552): transl_table=11

SEQ ID NO: 62431 - protein, 183 aa, Bacteroides fragilis NCTC 9343; identical to SEQ ID NO: 15726

SEQ ID NO: 62432 - DNA, 588 bp, Bacteroides fragilis NCTC 9343; identical to SEQ ID NO: 15727
  CDS (1)..(588): transl_table=11

SEQ ID NO: 62433 - protein, 195 aa, Bacteroides fragilis NCTC 9343; identical to SEQ ID NO: 15728

SEQ ID NO: 62434 - DNA, 690 bp, Brucella abortus biovar 1 str. 9-941; identical to SEQ ID NO: 15729
  CDS (1)..(690): transl_table=11

SEQ ID NO: 62435 - protein, 229 aa, Brucella abortus biovar 1 str. 9-941; identical to SEQ ID NO: 15730

SEQ ID NO: 62436 - DNA, 690 bp, Chloroflexus aurantiacus; identical to SEQ ID NO: 15731
  CDS (1)..(690)

SEQ ID NO: 62437 - protein, 229 aa, Chloroflexus aurantiacus; identical to SEQ ID NO: 15732

SEQ ID NO: 62438 - DNA, 564 bp, Chloroflexus aurantiacus; identical to SEQ ID NO: 15733
  CDS (1)..(564)

SEQ ID NO: 62439 - protein, 187 aa, Chloroflexus aurantiacus; identical to SEQ ID NO: 15734

SEQ ID NO: 62440 - DNA, 615 bp, Lactobacillus gasseri; identical to SEQ ID NO: 15735
  CDS (1)..(615)

SEQ ID NO: 62441 - protein, 204 aa, Lactobacillus gasseri; identical to SEQ ID NO: 15736

SEQ ID NO: 62442 - DNA, 606 bp, Magnetospirillum magnetotacticum MS-1; identical to SEQ ID NO: 15737
  CDS (1)..(606)

SEQ ID NO: 62443 - protein, 201 aa, Magnetospirillum magnetotacticum MS-1; identical to SEQ ID NO: 15738

SEQ ID NO: 62444 - DNA, 702 bp, Leuconostoc mesenteroides subsp. mesenteroides ATCC 8293; identical to SEQ ID NO: 15739
  CDS (1)..(702)

SEQ ID NO: 62445 - protein, 233 aa, Leuconostoc mesenteroides subsp. mesenteroides ATCC 8293; identical to SEQ ID NO: 15740

SEQ ID NO: 62446 - DNA, 561 bp, Nostoc punctiforme PCC 73102; identical to SEQ ID NO: 15741
  CDS (1)..(561)

SEQ ID NO: 62447 - protein, 186 aa, Nostoc punctiforme PCC 73102; identical to SEQ ID NO: 15742

SEQ ID NO: 62448 - DNA, 594 bp, Nostoc punctiforme PCC 73102; identical to SEQ ID NO: 15743
  CDS (1)..(594)

SEQ ID NO: 62449 - protein, 197 aa, Nostoc punctiforme PCC 73102; identical to SEQ ID NO: 15744

SEQ ID NO: 62450 - DNA, 702 bp, Nostoc punctiforme PCC 73102; identical to SEQ ID NO: 15745
  CDS (1)..(702)

SEQ ID NO: 62451 - protein, 233 aa, Nostoc punctiforme PCC 73102; identical to SEQ ID NO: 15746

SEQ ID NO: 62452 - DNA, 675 bp, Bifidobacterium longum DJO10A; identical to SEQ ID NO: 15747
  CDS (1)..(675)

SEQ ID NO: 62453 - protein, 224 aa, Bifidobacterium longum DJO10A; identical to SEQ ID NO: 15748

SEQ ID NO: 62454 - DNA, 633 bp, Bifidobacterium longum DJO10A; identical to SEQ ID NO: 15749
  CDS (1)..(633)

SEQ ID NO: 62455 - protein, 210 aa, Bifidobacterium longum DJO10A; identical to SEQ ID NO: 15750

SEQ ID NO: 62456 - DNA, 609 bp, Desulfovibrio desulfuricans G20; identical to SEQ ID NO: 15751
  CDS (1)..(609)

SEQ ID NO: 62457 - protein, 202 aa, Desulfovibrio desulfuricans G20; identical to SEQ ID NO: 15752

SEQ ID NO: 62458 - DNA, 558 bp, Desulfovibrio desulfuricans G20; identical to SEQ ID NO: 15753
  CDS (1)..(558)

SEQ ID NO: 62459 - protein, 185 aa, Desulfovibrio desulfuricans G20; identical to SEQ ID NO: 15754

SEQ ID NO: 62460 - DNA, 576 bp, Anabaena variabilis ATCC 29413; identical to SEQ ID NO: 15755
  CDS (1)..(576)

SEQ ID NO: 62461 - protein, 191 aa, Anabaena variabilis ATCC 29413; identical to SEQ ID NO: 15756

SEQ ID NO: 62462 - DNA, 561 bp, Anabaena variabilis ATCC 29413; identical to SEQ ID NO: 15757
  CDS (1)..(561)

SEQ ID NO: 62463 - protein, 186 aa, Anabaena variabilis ATCC 29413; identical to SEQ ID NO: 15758

SEQ ID NO: 62464 - DNA, 576 bp, Actinobacillus pleuropneumoniae serovar 1 str. 4074; identical to SEQ ID NO: 15759
  CDS (1)..(576)

SEQ ID NO: 62465 - protein, 191 aa, Actinobacillus pleuropneumoniae serovar 1 str. 4074; identical to SEQ ID NO: 15760

SEQ ID NO: 62466 - DNA, 501 bp, Burkholderia cepacia R18194; identical to SEQ ID NO: 15761
  CDS (1)..(501)

SEQ ID NO: 62467 - protein, 166 aa, Burkholderia cepacia R18194; identical to SEQ ID NO: 15762

SEQ ID NO: 62468 - DNA, 609 bp, Burkholderia cepacia R18194; identical to SEQ ID NO: 15763
  CDS (1)..(609)

SEQ ID NO: 62469 - protein, 202 aa, Burkholderia cepacia R18194; identical to SEQ ID NO: 15764

SEQ ID NO: 62470 - DNA, 528 bp, Listeria monocytogenes str. 4b H7858; identical to SEQ ID NO: 15765
  CDS (1)..(528): transl_table=11

SEQ ID NO: 62471 - protein, 175 aa, Listeria monocytogenes str. 4b H7858; identical to SEQ ID NO: 15766

SEQ ID NO: 62472 - DNA, 570 bp, Listeria monocytogenes str. 4b H7858; identical to SEQ ID NO: 15767
  CDS (1)..(570): transl_table=11

SEQ ID NO: 62473 - protein, 189 aa, Listeria monocytogenes str. 4b H7858; identical to SEQ ID NO: 15768

SEQ ID NO: 62474 - DNA, 564 bp, Bacillus cereus G9241; identical to SEQ ID NO: 15769
  CDS (1)..(564): transl_table=11

SEQ ID NO: 62475 - protein, 187 aa, Bacillus cereus G9241; identical to SEQ ID NO: 15770

SEQ ID NO: 62476 - DNA, 558 bp, Bacillus cereus G9241; identical to SEQ ID NO: 15771
  CDS (1)..(558): transl_table=11

SEQ ID NO: 62477 - protein, 185 aa, Bacillus cereus G9241; identical to SEQ ID NO: 15772

SEQ ID NO: 62478 - DNA, 588 bp, Burkholderia fungorum LB400; identical to SEQ ID NO: 15773
  CDS (1)..(588)

SEQ ID NO: 62479 - protein, 195 aa, Burkholderia fungorum LB400; identical to SEQ ID NO: 15774

SEQ ID NO: 62480 - DNA, 555 bp, Thermobifida fusca; identical to SEQ ID NO: 15775
  CDS (1)..(555)

SEQ ID NO: 62481 - protein, 184 aa, Thermobifida fusca; identical to SEQ ID NO: 15776

SEQ ID NO: 62482 - DNA, 513 bp, Cytophaga hutchinsonii; identical to SEQ ID NO: 15777
  CDS (1)..(513)

SEQ ID NO: 62483 - protein, 170 aa, Cytophaga hutchinsonii; identical to SEQ ID NO: 15778

SEQ ID NO: 62484 - DNA, 654 bp, Cytophaga hutchinsonii; identical to SEQ ID NO: 15779
  CDS (1)..(654)

SEQ ID NO: 62485 - protein, 217 aa, Cytophaga hutchinsonii; identical to SEQ ID NO: 15780

SEQ ID NO: 62486 - DNA, 744 bp, Microbulbifer degradans 2-40; identical to SEQ ID NO: 15781
  CDS (1)..(744)

SEQ ID NO: 62487 - protein, 247 aa, Microbulbifer degradans 2-40; identical to SEQ ID NO: 15782

SEQ ID NO: 62488 - DNA, 549 bp, Microbulbifer degradans 2-40; identical to SEQ ID NO: 15783
  CDS (1)..(549)

SEQ ID NO: 62489 - protein, 182 aa, Microbulbifer degradans 2-40; identical to SEQ ID NO: 15784

SEQ ID NO: 62490 - DNA, 417 bp, Oenococcus oeni PSU-1; identical to SEQ ID NO: 15785
  CDS (1)..(417)

SEQ ID NO: 62491 - protein, 138 aa, Oenococcus oeni PSU-1; identical to SEQ ID NO: 15786

SEQ ID NO: 62492 - DNA, 567 bp, Pediococcus pentosaceus ATCC 25745; identical to SEQ ID NO: 15787
  CDS (1)..(567)

SEQ ID NO: 62493 - protein, 188 aa, Pediococcus pentosaceus ATCC 25745; identical to SEQ ID NO: 15788

SEQ ID NO: 62494 - DNA, 555 bp, Pediococcus pentosaceus ATCC 25745; identical to SEQ ID NO: 15789
  CDS (1)..(555)

SEQ ID NO: 62495 - protein, 184 aa, Pediococcus pentosaceus ATCC 25745; identical to SEQ ID NO: 15790

SEQ ID NO: 62496 - DNA, 552 bp, Pediococcus pentosaceus ATCC 25745; identical to SEQ ID NO: 15791
  CDS (1)..(552)

SEQ ID NO: 62497 - protein, 183 aa, Pediococcus pentosaceus ATCC 25745; identical to SEQ ID NO: 15792

SEQ ID NO: 62498 - DNA, 465 bp, Streptococcus suis 89/1591; identical to SEQ ID NO: 15793
  CDS (1)..(465)

SEQ ID NO: 62499 - protein, 154 aa, Streptococcus suis 89/1591; identical to SEQ ID NO: 15794

SEQ ID NO: 62500 - DNA, 606 bp, Desulfovibrio desulfuricans G20; identical to SEQ ID NO: 15795
  CDS (1)..(606)

SEQ ID NO: 62501 - protein, 201 aa, Desulfovibrio desulfuricans G20; identical to SEQ ID NO: 15796

SEQ ID NO: 62502 - DNA, 543 bp, Chloroflexus aurantiacus; identical to SEQ ID NO: 15797
  CDS (1)..(543)

SEQ ID NO: 62503 - protein, 180 aa, Chloroflexus aurantiacus; identical to SEQ ID NO: 15798

SEQ ID NO: 62504 - DNA, 186 bp, Brevibacterium linens BL2; identical to SEQ ID NO: 15799
  CDS (1)..(186)

SEQ ID NO: 62505 - protein, 61 aa, Brevibacterium linens BL2; identical to SEQ ID NO: 15800

SEQ ID NO: 62506 - DNA, 612 bp, Lactococcus lactis subsp. cremoris SK11; identical to SEQ ID NO: 15801
  CDS (1)..(612)

SEQ ID NO: 62507 - protein, 203 aa, Lactococcus lactis subsp. cremoris SK11; identical to SEQ ID NO: 15802

SEQ ID NO: 62508 - DNA, 588 bp, Lactococcus lactis subsp. cremoris SK11; identical to SEQ ID NO: 15803
  CDS (1)..(588)

SEQ ID NO: 62509 - protein, 195 aa, Lactococcus lactis subsp. cremoris SK11; identical to SEQ ID NO: 15804

SEQ ID NO: 62510 - DNA, 597 bp, Lactobacillus casei ATCC 334; identical to SEQ ID NO: 15805
  CDS (1)..(597)

SEQ ID NO: 62511 - protein, 198 aa, Lactobacillus casei ATCC 334; identical to SEQ ID NO: 15806

SEQ ID NO: 62512 - DNA, 705 bp, Lactobacillus casei ATCC 334; identical to SEQ ID NO: 15807
  CDS (1)..(705)

SEQ ID NO: 62513 - protein, 234 aa, Lactobacillus casei ATCC 334; identical to SEQ ID NO: 15808

SEQ ID NO: 62514 - DNA, 591 bp, Lactobacillus delbrueckii subsp. bulgaricus ATCC BAA-365; identical to SEQ ID NO: 15809
  CDS (1)..(591)

SEQ ID NO: 62515 - protein, 196 aa, Lactobacillus delbrueckii subsp. bulgaricus ATCC BAA-365; identical to SEQ ID NO: 15810

SEQ ID NO: 62516 - DNA, 609 bp, Bacillus anthracis str. A2012; identical to SEQ ID NO: 15811
  CDS (1)..(609): Xaa of translated CDS can stand for any naturally occuring amino acid which can be translated from respective CDS-codon

SEQ ID NO: 62517 - protein, 202 aa, Bacillus anthracis str. A2012; identical to SEQ ID NO: 15812
  misc_feature (136)..(136): Xaa can be any naturally occuring amino acid

SEQ ID NO: 62518 - DNA, 534 bp, Anaeromyxobacter dehalogenans 2CP-C; identical to SEQ ID NO: 15813
  CDS (1)..(534): transl_table=11

SEQ ID NO: 62519 - protein, 177 aa, Anaeromyxobacter dehalogenans 2CP-C; identical to SEQ ID NO: 15814

SEQ ID NO: 62520 - DNA, 663 bp, Streptococcus pneumoniae TIGR4; identical to SEQ ID NO: 15815
  CDS (1)..(663)

SEQ ID NO: 62521 - protein, 220 aa, Streptococcus pneumoniae TIGR4; identical to SEQ ID NO: 15816

SEQ ID NO: 62522 - DNA, 558 bp, Burkholderia vietnamiensis G4; identical to SEQ ID NO: 15817
  CDS (1)..(558): transl_table=11

SEQ ID NO: 62523 - protein, 185 aa, Burkholderia vietnamiensis G4; identical to SEQ ID NO: 15818

SEQ ID NO: 62524 - DNA, 576 bp, Crocosphaera watsonii WH 8501; identical to SEQ ID NO: 15819
  CDS (1)..(576): transl_table=11

SEQ ID NO: 62525 - protein, 191 aa, Crocosphaera watsonii WH 8501; identical to SEQ ID NO: 15820

SEQ ID NO: 62526 - DNA, 555 bp, Chlorobium phaeobacteroides DSM 266; identical to SEQ ID NO: 15821
  CDS (1)..(555): transl_table=11

SEQ ID NO: 62527 - protein, 184 aa, Chlorobium phaeobacteroides DSM 266; identical to SEQ ID NO: 15822

SEQ ID NO: 62528 - DNA, 618 bp, Chlorobium phaeobacteroides BS1; identical to SEQ ID NO: 15823
  CDS (1)..(618): transl_table=11

SEQ ID NO: 62529 - protein, 205 aa, Chlorobium phaeobacteroides BS1; identical to SEQ ID NO: 15824

SEQ ID NO: 62530 - DNA, 576 bp, Exiguobacterium sp. 255-15; identical to SEQ ID NO: 15825
  CDS (1)..(576): transl_table=11

SEQ ID NO: 62531 - protein, 191 aa, Exiguobacterium sp. 255-15; identical to SEQ ID NO: 15826

SEQ ID NO: 62532 - DNA, 552 bp, Exiguobacterium sp. 255-15; identical to SEQ ID NO: 15827
  CDS (1)..(552): transl_table=11

SEQ ID NO: 62533 - protein, 183 aa, Exiguobacterium sp. 255-15; identical to SEQ ID NO: 15828

SEQ ID NO: 62534 - DNA, 702 bp, Exiguobacterium sp. 255-15; identical to SEQ ID NO: 15829
  CDS (1)..(702): transl_table=11

SEQ ID NO: 62535 - protein, 233 aa, Exiguobacterium sp. 255-15; identical to SEQ ID NO: 15830

SEQ ID NO: 62536 - DNA, 642 bp, Methanosarcina barkeri str. fusaro; identical to SEQ ID NO: 15831
  CDS (1)..(642): transl_table=11

SEQ ID NO: 62537 - protein, 213 aa, Methanosarcina barkeri str. fusaro; identical to SEQ ID NO: 15832

SEQ ID NO: 62538 - DNA, 600 bp, Methanosarcina barkeri str. fusaro; identical to SEQ ID NO: 15833
  CDS (1)..(600): transl_table=11

SEQ ID NO: 62539 - protein, 199 aa, Methanosarcina barkeri str. fusaro; identical to SEQ ID NO: 15834

SEQ ID NO: 62540 - DNA, 549 bp, Methanosarcina barkeri str. fusaro; identical to SEQ ID NO: 15835
  CDS (1)..(549): transl_table=11

SEQ ID NO: 62541 - protein, 182 aa, Methanosarcina barkeri str. fusaro; identical to SEQ ID NO: 15836

SEQ ID NO: 62542 - DNA, 609 bp, Methanosarcina barkeri str. fusaro; identical to SEQ ID NO: 15837
  CDS (1)..(609): transl_table=11

SEQ ID NO: 62543 - protein, 202 aa, Methanosarcina barkeri str. fusaro; identical to SEQ ID NO: 15838

SEQ ID NO: 62544 - DNA, 531 bp, Desulfuromonas acetoxidans DSM 684; identical to SEQ ID NO: 15839
  CDS (1)..(531): transl_table=11

SEQ ID NO: 62545 - protein, 176 aa, Desulfuromonas acetoxidans DSM 684; identical to SEQ ID NO: 15840

SEQ ID NO: 62546 - DNA, 555 bp, Jannaschia sp. CCS1; identical to SEQ ID NO: 15841
  CDS (1)..(555): transl_table=11

SEQ ID NO: 62547 - protein, 184 aa, Jannaschia sp. CCS1; identical to SEQ ID NO: 15842

SEQ ID NO: 62548 - DNA, 630 bp, Frankia sp. EAN1pec; identical to SEQ ID NO: 15843
  CDS (1)..(630): transl_table=11

SEQ ID NO: 62549 - protein, 209 aa, Frankia sp. EAN1pec; identical to SEQ ID NO: 15844

SEQ ID NO: 62550 - DNA, 555 bp, Shewanella baltica OS155; identical to SEQ ID NO: 15845
  CDS (1)..(555): transl_table=11

SEQ ID NO: 62551 - protein, 184 aa, Shewanella baltica OS155; identical to SEQ ID NO: 15846

SEQ ID NO: 62552 - DNA, 585 bp, Shewanella baltica OS155; identical to SEQ ID NO: 15847
  CDS (1)..(585): transl_table=11

SEQ ID NO: 62553 - protein, 194 aa, Shewanella baltica OS155; identical to SEQ ID NO: 15848

SEQ ID NO: 62554 - DNA, 726 bp, Ralstonia metallidurans CH34; identical to SEQ ID NO: 15849
  CDS (1)..(726): transl_table=11

SEQ ID NO: 62555 - protein, 241 aa, Ralstonia metallidurans CH34; identical to SEQ ID NO: 15850

SEQ ID NO: 62556 - DNA, 549 bp, Paracoccus denitrificans PD1222; identical to SEQ ID NO: 15851
  CDS (1)..(549): transl_table=11

SEQ ID NO: 62557 - protein, 182 aa, Paracoccus denitrificans PD1222; identical to SEQ ID NO: 15852

SEQ ID NO: 62558 - DNA, 615 bp, Shewanella frigidimarina NCIMB 400; identical to SEQ ID NO: 15853
  CDS (1)..(615): transl_table=11

SEQ ID NO: 62559 - protein, 204 aa, Shewanella frigidimarina NCIMB 400; identical to SEQ ID NO: 15854

SEQ ID NO: 62560 - DNA, 777 bp, Escherichia coli; identical to SEQ ID NO: 15855
  CDS (1)..(777): transl_table=11

SEQ ID NO: 62561 - protein, 258 aa, Escherichia coli; identical to SEQ ID NO: 15856

SEQ ID NO: 62562 - DNA, 651 bp, Pseudomonas fluorescens; identical to SEQ ID NO: 15857
  CDS (1)..(651): transl_table=11

SEQ ID NO: 62563 - protein, 216 aa, Pseudomonas fluorescens; identical to SEQ ID NO: 15858

SEQ ID NO: 62564 - DNA, 579 bp, Staphylococcus haemolyticus; identical to SEQ ID NO: 15859
  CDS (1)..(579): transl_table=11

SEQ ID NO: 62565 - protein, 192 aa, Staphylococcus haemolyticus; identical to SEQ ID NO: 15860

SEQ ID NO: 62566 - DNA, 648 bp, Aspergillus fumigatus Af293; identical to SEQ ID NO: 15861
  CDS (1)..(648)

SEQ ID NO: 62567 - protein, 215 aa, Aspergillus fumigatus Af293; identical to SEQ ID NO: 15862

SEQ ID NO: 62568 - DNA, 747 bp, Aspergillus fumigatus Af293; identical to SEQ ID NO: 15863
  CDS (1)..(747)

SEQ ID NO: 62569 - protein, 248 aa, Aspergillus fumigatus Af293; identical to SEQ ID NO: 15864

SEQ ID NO: 62570 - DNA, 687 bp, Aspergillus fumigatus Af293; identical to SEQ ID NO: 15865
  CDS (1)..(687)

SEQ ID NO: 62571 - protein, 228 aa, Aspergillus fumigatus Af293; identical to SEQ ID NO: 15866

SEQ ID NO: 62572 - DNA, 603 bp, Lactobacillus crispatus; identical to SEQ ID NO: 15867
  CDS (1)..(603): transl_table=11

SEQ ID NO: 62573 - protein, 200 aa, Lactobacillus crispatus; identical to SEQ ID NO: 15868

SEQ ID NO: 62574 - DNA, 642 bp, Cryptococcus neoformans var; identical to SEQ ID NO: 15869
  CDS (1)..(642)

SEQ ID NO: 62575 - protein, 213 aa, Cryptococcus neoformans var; identical to SEQ ID NO: 15870

SEQ ID NO: 62576 - DNA, 513 bp, Klebsiella pneumoniae; identical to SEQ ID NO: 15871
  CDS (1)..(513): transl_table=11

SEQ ID NO: 62577 - protein, 170 aa, Klebsiella pneumoniae; identical to SEQ ID NO: 15872

SEQ ID NO: 62578 - DNA, 555 bp, Vibrio cholerae non; identical to SEQ ID NO: 15873
  CDS (1)..(555): transl_table=11

SEQ ID NO: 62579 - protein, 184 aa, Vibrio cholerae non; identical to SEQ ID NO: 15874

SEQ ID NO: 62580 - DNA, 645 bp, Rhizobium etli; identical to SEQ ID NO: 15875
  CDS (1)..(645): transl_table=11

SEQ ID NO: 62581 - protein, 214 aa, Rhizobium etli; identical to SEQ ID NO: 15876

SEQ ID NO: 62582 - DNA, 558 bp, Bacillus stearothermophilus; identical to SEQ ID NO: 15877
  CDS (1)..(558): transl_table=11

SEQ ID NO: 62583 - protein, 185 aa, Bacillus stearothermophilus; identical to SEQ ID NO: 15878

SEQ ID NO: 62584 - DNA, 594 bp, Rhizobium leguminosarum bv; identical to SEQ ID NO: 15879
  CDS (1)..(594): transl_table=11

SEQ ID NO: 62585 - protein, 197 aa, Rhizobium leguminosarum bv; identical to SEQ ID NO: 15880

SEQ ID NO: 62586 - DNA, 573 bp, Dictyostelium discoideum; identical to SEQ ID NO: 15881
  CDS (1)..(573)

SEQ ID NO: 62587 - protein, 190 aa, Dictyostelium discoideum; identical to SEQ ID NO: 15882

SEQ ID NO: 62588 - DNA, 657 bp, Physcomitrella patens; identical to SEQ ID NO: 15883
  CDS (1)..(657)

SEQ ID NO: 62589 - protein, 218 aa, Physcomitrella patens; identical to SEQ ID NO: 15884

SEQ ID NO: 62590 - DNA, 636 bp, Aeromonas hydrophila; identical to SEQ ID NO: 15885
  CDS (1)..(636): transl_table=11

SEQ ID NO: 62591 - protein, 211 aa, Aeromonas hydrophila; identical to SEQ ID NO: 15886

SEQ ID NO: 62592 - DNA, 600 bp, Aeromonas hydrophila; identical to SEQ ID NO: 15887
  CDS (1)..(600): transl_table=11

SEQ ID NO: 62593 - protein, 199 aa, Aeromonas hydrophila; identical to SEQ ID NO: 15888

SEQ ID NO: 62594 - DNA, 678 bp, Corynebacterium glutamicum; identical to SEQ ID NO: 15889
  CDS (1)..(678): transl_table=11

SEQ ID NO: 62595 - protein, 225 aa, Corynebacterium glutamicum; identical to SEQ ID NO: 15890

SEQ ID NO: 62596 - DNA, 624 bp, Lactococcus lactis; identical to SEQ ID NO: 15891
  CDS (1)..(624): transl_table=11

SEQ ID NO: 62597 - protein, 207 aa, Lactococcus lactis; identical to SEQ ID NO: 15892

SEQ ID NO: 62598 - DNA, 621 bp, Candida albicans; identical to SEQ ID NO: 15893
  CDS (1)..(621): transl_table=12

SEQ ID NO: 62599 - protein, 206 aa, Candida albicans; identical to SEQ ID NO: 15894

SEQ ID NO: 62600 - DNA, 519 bp, Staphylococcus aureus; identical to SEQ ID NO: 15895
  CDS (1)..(519): transl_table=11

SEQ ID NO: 62601 - protein, 172 aa, Staphylococcus aureus; identical to SEQ ID NO: 15896

SEQ ID NO: 62602 - DNA, 555 bp, Bacillus subtilis; identical to SEQ ID NO: 15897
  CDS (1)..(555): transl_table=11

SEQ ID NO: 62603 - protein, 184 aa, Bacillus subtilis; identical to SEQ ID NO: 15898

SEQ ID NO: 62604 - DNA, 552 bp, Escherichia coli; identical to SEQ ID NO: 15433
  CDS (1)..(552)

SEQ ID NO: 62605 - protein, 183 aa, Escherichia coli; identical to SEQ ID NO: 15434

SEQ ID NO: 62606 - DNA, 573 bp, Rhizobium leguminosarum bv; identical to SEQ ID NO: 15901
  CDS (1)..(573): transl_table=11

SEQ ID NO: 62607 - protein, 190 aa, Rhizobium leguminosarum bv; identical to SEQ ID NO: 15902

SEQ ID NO: 62608 - DNA, 552 bp, Rhizobium meliloti; identical to SEQ ID NO: 15903
  CDS (1)..(552): transl_table=11

SEQ ID NO: 62609 - protein, 183 aa, Rhizobium meliloti; identical to SEQ ID NO: 15904

SEQ ID NO: 62610 - DNA, 624 bp, Lactococcus lactis subsp; identical to SEQ ID NO: 15905
  CDS (1)..(624): transl_table=11

SEQ ID NO: 62611 - protein, 207 aa, Lactococcus lactis subsp; identical to SEQ ID NO: 15906

SEQ ID NO: 62612 - DNA, 645 bp, Methanococcus jannaschii; identical to SEQ ID NO: 15907
  CDS (1)..(645): transl_table=11

SEQ ID NO: 62613 - protein, 214 aa, Methanococcus jannaschii; identical to SEQ ID NO: 15908

SEQ ID NO: 62614 - DNA, 624 bp, Schizosaccharomyces pombe; identical to SEQ ID NO: 15909
  CDS (1)..(624)

SEQ ID NO: 62615 - protein, 207 aa, Schizosaccharomyces pombe; identical to SEQ ID NO: 15910

SEQ ID NO: 62616 - DNA, 591 bp, Saccharomyces cerevisiae; identical to SEQ ID NO: 15911
  CDS (1)..(591)

SEQ ID NO: 62617 - protein, 196 aa, Saccharomyces cerevisiae; identical to SEQ ID NO: 15912

SEQ ID NO: 62618 - DNA, 25 bp, Artificial sequence
  Primer sequence
atgaacatgccaatgaccgaaagaa

SEQ ID NO: 62619 - DNA, 28 bp, Artificial sequence
  Primer sequence
ttaaactgacgattcaactttataatct

SEQ ID NO: 62620 - protein, 204 aa, Artificial sequence; identical to SEQ ID NO: 15915
  Consensus
  Variant (2)..(4): Xaa in position 2 to 4 is any amino acid
  Variant (5)..(9): Xaa in position 5 to 9 is any or no amino acid
  Variant (11)..(26): Xaa in position 11 to 26 is any or no amino acid
  Variant (28)..(28): Xaa in position 28 is any amino acid
  Variant (31)..(41): Xaa in position 31 to 41 is any amino acid
  Variant (42)..(92): Xaa in position 42 to 92 is any or no amino acid
  Variant (94)..(94): Xaa in position 94 is any or no amino acid
  Variant (97)..(97): Xaa in position 97 is any amino acid
  Variant (98)..(101): Xaa in position 98 to 101 is any or no amino acid
  Variant (103)..(106): Xaa in position 103 to 106 is any amino acid
  Variant (108)..(109): Xaa in position 108 to 109 is any amino acid
  Variant (110)..(112): Xaa in position 110 to 112 is any or no amino acid
  Variant (114)..(119): Xaa in position 114 to 119 is any amino acid
  Variant (120)..(152): Xaa in position 120 to 152 is any or no amino acid
  Variant (154)..(154): Xaa in position 154 is any amino acid
  Variant (156)..(159): Xaa in position 156 to 159 is any amino acid
  Variant (163)..(166): Xaa in position 163 to 166 is any or no amino acid
  Variant (168)..(169): Xaa in position 168 to 169 is any or no amino acid
  Variant (172)..(172): Xaa in position 172 is any or no amino acid
  Variant (175)..(177): Xaa in position 175 to 177 is any or no amino acid
  Variant (188)..(188): Xaa in position 188 is any amino acid
  Variant (191)..(193): Xaa in position 191 to 193 is any amino acid
  Variant (195)..(196): Xaa in position 195 to 196 is any amino acid
  Variant (198)..(198): Xaa in position 198 is any amino acid
  Variant (200)..(200): Xaa in position 200 is any amino acid

SEQ ID NO: 62621 - protein, 12 aa, Artificial sequence
  Consensus
  Variant (2)..(2): Xaa in position 2 is any or no amino acid
  Variant (4)..(5): Xaa in position 4 to 5 is any amino acid
  Variant (6)..(6): Xaa in position 6 is Ala, Cys, Thr or Val
  Variant (7)..(7): Xaa in position 7 is any amino acid
  Variant (8)..(8): Xaa in position 8 is Phe, Ile, Leu, Met or Val
  Variant (9)..(11): Xaa in position 9 to 11 is any amino acid
  Variant (12)..(12): Xaa in position 12 is Ala, Cys, Asp, Gly, Asn, Ser, Thr or Val
IXGXXXXXXXXX

SEQ ID NO: 62622 - protein, 43 aa, Artificial sequence; identical to SEQ ID NO: 15917
  Consensus
  Variant (2)..(2): Xaa in position 2 is any amino acid
  Variant (3)..(4): Xaa in position 3 to 4 is any or no amino acid
  Variant (6)..(10): Xaa in position 6 to 10 is any amino acid
  Variant (11)..(12): Xaa in position 11 to 12 is any or no amino acid
  Variant (14)..(14): Xaa in position 14 is Ala, Ile or Val
  Variant (15)..(15): Xaa in position 15 is any amino acid
  Variant (16)..(16): Xaa in position 16 is Ile, Leu or Val
  Variant (17)..(17): Xaa in position 17 is Asp, Gly or Thr
  Variant (18)..(19): Xaa in position 18 to 19 is any amino acid
  Variant (20)..(20): Xaa in position 20 is Ala, Cys, Gly, Ser, Thr or Val
  Variant (21)..(21): Xaa in position 21 is any amino acid
  Variant (22)..(22): Xaa in position 22 is Ala, Ile, Leu or Val
  Variant (23)..(23): Xaa in position 23 is Ala, Gly or Ser
  Variant (24)..(25): Xaa in position 24 to 25 is any amino acid
  Variant (26)..(26): Xaa in position 26 is Ala, Cys, Ser or Thr
  Variant (27)..(27): Xaa in position 27 is any amino acid
  Variant (28)..(28): Xaa in position 28 is Ala, Ile or Val
  Variant (29)..(31): Xaa in position 29 to 31 is any amino acid
  Variant (32)..(32): Xaa in position 32 is Phe, Ile, Leu, Met or Val
  Variant (33)..(39): Xaa in position 33 to 39 is any amino acid
  Variant (41)..(41): Xaa in position 41 is any amino acid
  Variant (43)..(43): Xaa in position 43 is Ala, Cys or Gly

SEQ ID NO: 62623 - DNA, 1392 bp, Escherichia coli K12; identical to SEQ ID NO: 28298
  CDS (1)..(1392): transl_table=11

SEQ ID NO: 62624 - protein, 463 aa, Escherichia coli K12; identical to SEQ ID NO: 28299

SEQ ID NO: 62625 - DNA, 1428 bp, Aquifex aeolicus VF5; identical to SEQ ID NO: 28300
  CDS (1)..(1428): transl_table=11

SEQ ID NO: 62626 - protein, 475 aa, Aquifex aeolicus VF5; identical to SEQ ID NO: 28301

SEQ ID NO: 62627 - DNA, 1212 bp, Pseudomonas aeruginosa PAO1; identical to SEQ ID NO: 28302
  CDS (1)..(1212): transl_table=11

SEQ ID NO: 62628 - protein, 403 aa, Pseudomonas aeruginosa PAO1; identical to SEQ ID NO: 28303

SEQ ID NO: 62629 - DNA, 1407 bp, Pseudomonas aeruginosa PAO1; identical to SEQ ID NO: 28304
  CDS (1)..(1407): transl_table=11

SEQ ID NO: 62630 - protein, 468 aa, Pseudomonas aeruginosa PAO1; identical to SEQ ID NO: 28305

SEQ ID NO: 62631 - DNA, 1296 bp, Pseudomonas aeruginosa PAO1; identical to SEQ ID NO: 28306
  CDS (1)..(1296): transl_table=11

SEQ ID NO: 62632 - protein, 431 aa, Pseudomonas aeruginosa PAO1; identical to SEQ ID NO: 28307

SEQ ID NO: 62633 - DNA, 1554 bp, Mycobacterium leprae TN; identical to SEQ ID NO: 28308
  CDS (1)..(1554): transl_table=11

SEQ ID NO: 62634 - protein, 517 aa, Mycobacterium leprae TN; identical to SEQ ID NO: 28309

SEQ ID NO: 62635 - DNA, 1389 bp, Escherichia coli O157:H7; identical to SEQ ID NO: 28310
  CDS (1)..(1389): transl_table=11

SEQ ID NO: 62636 - protein, 462 aa, Escherichia coli O157:H7; identical to SEQ ID NO: 28311

SEQ ID NO: 62637 - DNA, 1410 bp, Mycobacterium tuberculosis CDC1551; identical to SEQ ID NO: 28312
  CDS (1)..(1410): transl_table=11

SEQ ID NO: 62638 - protein, 469 aa, Mycobacterium tuberculosis CDC1551; identical to SEQ ID NO: 28313

SEQ ID NO: 62639 - DNA, 1392 bp, Mycobacterium tuberculosis CDC1551; identical to SEQ ID NO: 28314
  CDS (1)..(1392): transl_table=11

SEQ ID NO: 62640 - protein, 463 aa, Mycobacterium tuberculosis CDC1551; identical to SEQ ID NO: 28315

SEQ ID NO: 62641 - DNA, 1188 bp, Mycobacterium tuberculosis CDC1551; identical to SEQ ID NO: 28316
  CDS (1)..(1188): transl_table=11

SEQ ID NO: 62642 - protein, 395 aa, Mycobacterium tuberculosis CDC1551; identical to SEQ ID NO: 28317

SEQ ID NO: 62643 - DNA, 1548 bp, Mycobacterium tuberculosis CDC1551; identical to SEQ ID NO: 28318
  CDS (1)..(1548): transl_table=11

SEQ ID NO: 62644 - protein, 515 aa, Mycobacterium tuberculosis CDC1551; identical to SEQ ID NO: 28319

SEQ ID NO: 62645 - DNA, 1170 bp, Staphylococcus aureus subsp. aureus Mu50; identical to SEQ ID NO: 28320
  CDS (1)..(1170): transl_table=11

SEQ ID NO: 62646 - protein, 389 aa, Staphylococcus aureus subsp. aureus Mu50; identical to SEQ ID NO: 28321

SEQ ID NO: 62647 - DNA, 1422 bp, Caulobacter crescentus CB15; identical to SEQ ID NO: 28322
  CDS (1)..(1422): transl_table=11

SEQ ID NO: 62648 - protein, 473 aa, Caulobacter crescentus CB15; identical to SEQ ID NO: 28323

SEQ ID NO: 62649 - DNA, 1275 bp, Sinorhizobium meliloti 1021; identical to SEQ ID NO: 28324
  CDS (1)..(1275): transl_table=11

SEQ ID NO: 62650 - protein, 424 aa, Sinorhizobium meliloti 1021; identical to SEQ ID NO: 28325

SEQ ID NO: 62651 - DNA, 1398 bp, Salmonella typhimurium LT2; identical to SEQ ID NO: 28326
  CDS (1)..(1398): transl_table=11

SEQ ID NO: 62652 - protein, 465 aa, Salmonella typhimurium LT2; identical to SEQ ID NO: 28327

SEQ ID NO: 62653 - DNA, 1314 bp, Ralstonia solanacearum GMI1000; identical to SEQ ID NO: 28328
  CDS (1)..(1314): transl_table=11

SEQ ID NO: 62654 - protein, 437 aa, Ralstonia solanacearum GMI1000; identical to SEQ ID NO: 28329

SEQ ID NO: 62655 - DNA, 1386 bp, Ralstonia solanacearum GMI1000; identical to SEQ ID NO: 28330
  CDS (1)..(1386): transl_table=11

SEQ ID NO: 62656 - protein, 461 aa, Ralstonia solanacearum GMI1000; identical to SEQ ID NO: 28331

SEQ ID NO: 62657 - DNA, 2856 bp, Brucella melitensis 16M; identical to SEQ ID NO: 28332
  CDS (1)..(2856): transl_table=11

SEQ ID NO: 62658 - protein, 951 aa, Brucella melitensis 16M; identical to SEQ ID NO: 28333

SEQ ID NO: 62659 - DNA, 1293 bp, Clostridium perfringens str. 13; identical to SEQ ID NO: 28334
  CDS (1)..(1293): transl_table=11

SEQ ID NO: 62660 - protein, 430 aa, Clostridium perfringens str. 13; identical to SEQ ID NO: 28335

SEQ ID NO: 62661 - DNA, 1338 bp, Corynebacterium glutamicum ATCC 13032; identical to SEQ ID NO: 28336
  CDS (1)..(1338): transl_table=11

SEQ ID NO: 62662 - protein, 445 aa, Corynebacterium glutamicum ATCC 13032; identical to SEQ ID NO: 28337

SEQ ID NO: 62663 - DNA, 1239 bp, Streptomyces coelicolor A3(2); identical to SEQ ID NO: 28338
  CDS (1)..(1239): transl_table=11

SEQ ID NO: 62664 - protein, 412 aa, Streptomyces coelicolor A3(2); identical to SEQ ID NO: 28339

SEQ ID NO: 62665 - DNA, 1359 bp, Streptomyces coelicolor A3(2); identical to SEQ ID NO: 28340
  CDS (1)..(1359): transl_table=11

SEQ ID NO: 62666 - protein, 452 aa, Streptomyces coelicolor A3(2); identical to SEQ ID NO: 28341

SEQ ID NO: 62667 - DNA, 1236 bp, Xanthomonas campestris pv. campestris str. ATCC 33913; identical to SEQ ID NO: 28342
  CDS (1)..(1236): transl_table=11

SEQ ID NO: 62668 - protein, 411 aa, Xanthomonas campestris pv. campestris str. ATCC 33913; identical to SEQ ID NO: 28343

SEQ ID NO: 62669 - DNA, 2688 bp, Brucella suis 1330; identical to SEQ ID NO: 28344
  CDS (1)..(2688): transl_table=11

SEQ ID NO: 62670 - protein, 895 aa, Brucella suis 1330; identical to SEQ ID NO: 28345

SEQ ID NO: 62671 - DNA, 1389 bp, Shigella flexneri 2a str. 301; identical to SEQ ID NO: 28346
  CDS (1)..(1389): transl_table=11

SEQ ID NO: 62672 - protein, 462 aa, Shigella flexneri 2a str. 301; identical to SEQ ID NO: 28347

SEQ ID NO: 62673 - DNA, 1434 bp, Corynebacterium efficiens YS-314; identical to SEQ ID NO: 28348
  CDS (1)..(1434): transl_table=11

SEQ ID NO: 62674 - protein, 477 aa, Corynebacterium efficiens YS-314; identical to SEQ ID NO: 28349

SEQ ID NO: 62675 - DNA, 1302 bp, Corynebacterium efficiens YS-314; identical to SEQ ID NO: 28350
  CDS (1)..(1302): transl_table=11

SEQ ID NO: 62676 - protein, 433 aa, Corynebacterium efficiens YS-314; identical to SEQ ID NO: 28351

SEQ ID NO: 62677 - DNA, 1236 bp, Pseudomonas putida KT2440; identical to SEQ ID NO: 28352
  CDS (1)..(1236): transl_table=11

SEQ ID NO: 62678 - protein, 411 aa, Pseudomonas putida KT2440; identical to SEQ ID NO: 28353

SEQ ID NO: 62679 - DNA, 1164 bp, Staphylococcus epidermidis ATCC 12228; identical to SEQ ID NO: 28354
  CDS (1)..(1164): transl_table=11

SEQ ID NO: 62680 - protein, 387 aa, Staphylococcus epidermidis ATCC 12228; identical to SEQ ID NO: 28355

SEQ ID NO: 62681 - DNA, 1380 bp, Bradyrhizobium japonicum USDA 110; identical to SEQ ID NO: 28356
  CDS (1)..(1380): transl_table=11

SEQ ID NO: 62682 - protein, 459 aa, Bradyrhizobium japonicum USDA 110; identical to SEQ ID NO: 28357

SEQ ID NO: 62683 - DNA, 1191 bp, Lactobacillus plantarum WCFS1; identical to SEQ ID NO: 28358
  CDS (1)..(1191): transl_table=11

SEQ ID NO: 62684 - protein, 396 aa, Lactobacillus plantarum WCFS1; identical to SEQ ID NO: 28359

SEQ ID NO: 62685 - DNA, 1212 bp, Pseudomonas syringae pv. tomato str. DC3000; identical to SEQ ID NO: 28360
  CDS (1)..(1212): transl_table=11

SEQ ID NO: 62686 - protein, 403 aa, Pseudomonas syringae pv. tomato str. DC3000; identical to SEQ ID NO: 28361

SEQ ID NO: 62687 - DNA, 1389 bp, Salmonella enterica subsp. enterica serovar Typhi Ty2; identical to SEQ ID NO: 28362
  CDS (1)..(1389): transl_table=11

SEQ ID NO: 62688 - protein, 462 aa, Salmonella enterica subsp. enterica serovar Typhi Ty2; identical to SEQ ID NO: 28363

SEQ ID NO: 62689 - DNA, 1392 bp, Streptomyces avermitilis MA-4680; identical to SEQ ID NO: 28364
  CDS (1)..(1392): transl_table=11

SEQ ID NO: 62690 - protein, 463 aa, Streptomyces avermitilis MA-4680; identical to SEQ ID NO: 28365

SEQ ID NO: 62691 - DNA, 1170 bp, Bacillus cereus ATCC 14579; identical to SEQ ID NO: 28366
  CDS (1)..(1170): transl_table=11

SEQ ID NO: 62692 - protein, 389 aa, Bacillus cereus ATCC 14579; identical to SEQ ID NO: 28367

SEQ ID NO: 62693 - DNA, 1389 bp, Shigella flexneri 2a str. 2457T; identical to SEQ ID NO: 28368
  CDS (1)..(1389): transl_table=11

SEQ ID NO: 62694 - protein, 462 aa, Shigella flexneri 2a str. 2457T; identical to SEQ ID NO: 28369

SEQ ID NO: 62695 - DNA, 1203 bp, Chromobacterium violaceum ATCC 12472; identical to SEQ ID NO: 28370
  CDS (1)..(1203): transl_table=11

SEQ ID NO: 62696 - protein, 400 aa, Chromobacterium violaceum ATCC 12472; identical to SEQ ID NO: 28371

SEQ ID NO: 62697 - DNA, 1380 bp, Chromobacterium violaceum ATCC 12472; identical to SEQ ID NO: 28372
  CDS (1)..(1380): transl_table=11

SEQ ID NO: 62698 - protein, 459 aa, Chromobacterium violaceum ATCC 12472; identical to SEQ ID NO: 28373

SEQ ID NO: 62699 - DNA, 1284 bp, Chromobacterium violaceum ATCC 12472; identical to SEQ ID NO: 28374
  CDS (1)..(1284): transl_table=11

SEQ ID NO: 62700 - protein, 427 aa, Chromobacterium violaceum ATCC 12472; identical to SEQ ID NO: 28375

SEQ ID NO: 62701 - DNA, 1380 bp, Chromobacterium violaceum ATCC 12472; identical to SEQ ID NO: 28376
  CDS (1)..(1380): transl_table=11

SEQ ID NO: 62702 - protein, 459 aa, Chromobacterium violaceum ATCC 12472; identical to SEQ ID NO: 28377

SEQ ID NO: 62703 - DNA, 1332 bp, Corynebacterium diphtheriae NCTC 13129; identical to SEQ ID NO: 28378
  CDS (1)..(1332): transl_table=11

SEQ ID NO: 62704 - protein, 443 aa, Corynebacterium diphtheriae NCTC 13129; identical to SEQ ID NO: 28379

SEQ ID NO: 62705 - DNA, 1299 bp, Corynebacterium diphtheriae NCTC 13129; identical to SEQ ID NO: 28380
  CDS (1)..(1299): transl_table=11

SEQ ID NO: 62706 - protein, 432 aa, Corynebacterium diphtheriae NCTC 13129; identical to SEQ ID NO: 28381

SEQ ID NO: 62707 - DNA, 1281 bp, Cupriavidus necator; identical to SEQ ID NO: 28382
  CDS (1)..(1281): transl_table=11

SEQ ID NO: 62708 - protein, 426 aa, Cupriavidus necator; identical to SEQ ID NO: 28383

SEQ ID NO: 62709 - DNA, 1395 bp, Cupriavidus necator; identical to SEQ ID NO: 28384
  CDS (1)..(1395): transl_table=11

SEQ ID NO: 62710 - protein, 464 aa, Cupriavidus necator; identical to SEQ ID NO: 28385

SEQ ID NO: 62711 - DNA, 1458 bp, Mycobacterium avium subsp. paratuberculosis K-10; identical to SEQ ID NO: 28386
  CDS (1)..(1458): transl_table=11

SEQ ID NO: 62712 - protein, 485 aa, Mycobacterium avium subsp. paratuberculosis K-10; identical to SEQ ID NO: 28387

SEQ ID NO: 62713 - DNA, 1392 bp, Mycobacterium avium subsp. paratuberculosis K-10; identical to SEQ ID NO: 28388
  CDS (1)..(1392): transl_table=11

SEQ ID NO: 62714 - protein, 463 aa, Mycobacterium avium subsp. paratuberculosis K-10; identical to SEQ ID NO: 28389

SEQ ID NO: 62715 - DNA, 1392 bp, Mycobacterium avium subsp. paratuberculosis K-10; identical to SEQ ID NO: 28390
  CDS (1)..(1392): transl_table=11

SEQ ID NO: 62716 - protein, 463 aa, Mycobacterium avium subsp. paratuberculosis K-10; identical to SEQ ID NO: 28391

SEQ ID NO: 62717 - DNA, 1170 bp, Bacillus anthracis str. Sterne; identical to SEQ ID NO: 28392
  CDS (1)..(1170): transl_table=11

SEQ ID NO: 62718 - protein, 389 aa, Bacillus anthracis str. Sterne; identical to SEQ ID NO: 28393

SEQ ID NO: 62719 - DNA, 1170 bp, Bacillus thuringiensis serovar konkukian str. 97-27; identical to SEQ ID NO: 28394
  CDS (1)..(1170): transl_table=11

SEQ ID NO: 62720 - protein, 389 aa, Bacillus thuringiensis serovar konkukian str. 97-27; identical to SEQ ID NO: 28395

SEQ ID NO: 62721 - DNA, 1170 bp, Staphylococcus aureus subsp. aureus MRSA252; identical to SEQ ID NO: 28396
  CDS (1)..(1170): transl_table=11

SEQ ID NO: 62722 - protein, 389 aa, Staphylococcus aureus subsp. aureus MRSA252; identical to SEQ ID NO: 28397

SEQ ID NO: 62723 - DNA, 1170 bp, Staphylococcus aureus subsp. aureus MSSA476; identical to SEQ ID NO: 28398
  CDS (1)..(1170): transl_table=11

SEQ ID NO: 62724 - protein, 389 aa, Staphylococcus aureus subsp. aureus MSSA476; identical to SEQ ID NO: 28399

SEQ ID NO: 62725 - DNA, 1389 bp, Erwinia carotovora subsp. atroseptica SCRI1043; identical to SEQ ID NO: 28400
  CDS (1)..(1389): transl_table=11

SEQ ID NO: 62726 - protein, 462 aa, Erwinia carotovora subsp. atroseptica SCRI1043; identical to SEQ ID NO: 28401

SEQ ID NO: 62727 - DNA, 1317 bp, Propionibacterium acnes KPA171202; identical to SEQ ID NO: 28402
  CDS (1)..(1317): transl_table=11

SEQ ID NO: 62728 - protein, 438 aa, Propionibacterium acnes KPA171202; identical to SEQ ID NO: 28403

SEQ ID NO: 62729 - DNA, 1206 bp, Bacillus licheniformis ATCC 14580; identical to SEQ ID NO: 28404
  CDS (1)..(1206): transl_table=11

SEQ ID NO: 62730 - protein, 401 aa, Bacillus licheniformis ATCC 14580; identical to SEQ ID NO: 28405

SEQ ID NO: 62731 - DNA, 1185 bp, Bacillus licheniformis ATCC 14580; identical to SEQ ID NO: 28406
  CDS (1)..(1185): transl_table=11

SEQ ID NO: 62732 - protein, 394 aa, Bacillus licheniformis ATCC 14580; identical to SEQ ID NO: 28407

SEQ ID NO: 62733 - DNA, 1230 bp, Burkholderia mallei ATCC 23344; identical to SEQ ID NO: 28408
  CDS (1)..(1230): transl_table=11

SEQ ID NO: 62734 - protein, 409 aa, Burkholderia mallei ATCC 23344; identical to SEQ ID NO: 28409

SEQ ID NO: 62735 - DNA, 1404 bp, Burkholderia mallei ATCC 23344; identical to SEQ ID NO: 28410
  CDS (1)..(1404): transl_table=11

SEQ ID NO: 62736 - protein, 467 aa, Burkholderia mallei ATCC 23344; identical to SEQ ID NO: 28411

SEQ ID NO: 62737 - DNA, 1281 bp, Burkholderia pseudomallei K96243; identical to SEQ ID NO: 28412
  CDS (1)..(1281): transl_table=11

SEQ ID NO: 62738 - protein, 426 aa, Burkholderia pseudomallei K96243; identical to SEQ ID NO: 28413

SEQ ID NO: 62739 - DNA, 1386 bp, Burkholderia pseudomallei K96243; identical to SEQ ID NO: 28414
  CDS (1)..(1386): transl_table=11

SEQ ID NO: 62740 - protein, 461 aa, Burkholderia pseudomallei K96243; identical to SEQ ID NO: 28415

SEQ ID NO: 62741 - DNA, 1458 bp, Burkholderia pseudomallei K96243; identical to SEQ ID NO: 28416
  CDS (1)..(1458): transl_table=11

SEQ ID NO: 62742 - protein, 485 aa, Burkholderia pseudomallei K96243; identical to SEQ ID NO: 28417

SEQ ID NO: 62743 - DNA, 1275 bp, Burkholderia pseudomallei K96243; identical to SEQ ID NO: 28418
  CDS (1)..(1275): transl_table=11

SEQ ID NO: 62744 - protein, 424 aa, Burkholderia pseudomallei K96243; identical to SEQ ID NO: 28419

SEQ ID NO: 62745 - DNA, 1275 bp, Methylococcus capsulatus str. Bath; identical to SEQ ID NO: 28420
  CDS (1)..(1275): transl_table=11

SEQ ID NO: 62746 - protein, 424 aa, Methylococcus capsulatus str. Bath; identical to SEQ ID NO: 28421

SEQ ID NO: 62747 - DNA, 1470 bp, Nocardia farcinica IFM 10152; identical to SEQ ID NO: 28422
  CDS (1)..(1470): transl_table=11

SEQ ID NO: 62748 - protein, 489 aa, Nocardia farcinica IFM 10152; identical to SEQ ID NO: 28423

SEQ ID NO: 62749 - DNA, 1485 bp, Nocardia farcinica IFM 10152; identical to SEQ ID NO: 28424
  CDS (1)..(1485): transl_table=11

SEQ ID NO: 62750 - protein, 494 aa, Nocardia farcinica IFM 10152; identical to SEQ ID NO: 28425

SEQ ID NO: 62751 - DNA, 1323 bp, Haloarcula marismortui ATCC 43049; identical to SEQ ID NO: 28426
  CDS (1)..(1323): transl_table=11

SEQ ID NO: 62752 - protein, 440 aa, Haloarcula marismortui ATCC 43049; identical to SEQ ID NO: 28427

SEQ ID NO: 62753 - DNA, 1200 bp, Geobacillus kaustophilus HTA426; identical to SEQ ID NO: 28428
  CDS (1)..(1200): transl_table=11

SEQ ID NO: 62754 - protein, 399 aa, Geobacillus kaustophilus HTA426; identical to SEQ ID NO: 28429

SEQ ID NO: 62755 - DNA, 1203 bp, Geobacillus kaustophilus HTA426; identical to SEQ ID NO: 28430
  CDS (1)..(1203): transl_table=11

SEQ ID NO: 62756 - protein, 400 aa, Geobacillus kaustophilus HTA426; identical to SEQ ID NO: 28431

SEQ ID NO: 62757 - DNA, 1389 bp, Salmonella enterica subsp. enterica serovar Paratyphi A str. ATCC; identical to SEQ ID NO: 28432
  CDS (1)..(1389): transl_table=11

SEQ ID NO: 62758 - protein, 462 aa, Salmonella enterica subsp. enterica serovar Paratyphi A str. ATCC; identical to SEQ ID NO: 28433

SEQ ID NO: 62759 - DNA, 1332 bp, Idiomarina loihiensis L2TR; identical to SEQ ID NO: 28434
  CDS (1)..(1332): transl_table=11

SEQ ID NO: 62760 - protein, 443 aa, Idiomarina loihiensis L2TR; identical to SEQ ID NO: 28435

SEQ ID NO: 62761 - DNA, 1692 bp, Azoarcus sp. EbN1; identical to SEQ ID NO: 28436
  CDS (1)..(1692): transl_table=11

SEQ ID NO: 62762 - protein, 563 aa, Azoarcus sp. EbN1; identical to SEQ ID NO: 28437

SEQ ID NO: 62763 - DNA, 1377 bp, Azoarcus sp. EbN1; identical to SEQ ID NO: 28438
  CDS (1)..(1377): transl_table=11

SEQ ID NO: 62764 - protein, 458 aa, Azoarcus sp. EbN1; identical to SEQ ID NO: 28439

SEQ ID NO: 62765 - DNA, 1509 bp, Bacillus clausii KSM-K16; identical to SEQ ID NO: 28440
  CDS (1)..(1509): transl_table=11

SEQ ID NO: 62766 - protein, 502 aa, Bacillus clausii KSM-K16; identical to SEQ ID NO: 28441

SEQ ID NO: 62767 - DNA, 1206 bp, Bacillus clausii KSM-K16; identical to SEQ ID NO: 28442
  CDS (1)..(1206): transl_table=11

SEQ ID NO: 62768 - protein, 401 aa, Bacillus clausii KSM-K16; identical to SEQ ID NO: 28443

SEQ ID NO: 62769 - DNA, 1164 bp, Staphylococcus epidermidis RP62A; identical to SEQ ID NO: 28444
  CDS (1)..(1164): transl_table=11

SEQ ID NO: 62770 - protein, 387 aa, Staphylococcus epidermidis RP62A; identical to SEQ ID NO: 28445

SEQ ID NO: 62771 - DNA, 1389 bp, Salmonella enterica subsp. enterica serovar Choleraesuis str; identical to SEQ ID NO: 28446
  CDS (1)..(1389): transl_table=11

SEQ ID NO: 62772 - protein, 462 aa, Salmonella enterica subsp. enterica serovar Choleraesuis str; identical to SEQ ID NO: 28447

SEQ ID NO: 62773 - DNA, 1212 bp, Pseudomonas syringae pv. syringae B728a; identical to SEQ ID NO: 28448
  CDS (1)..(1212): transl_table=11

SEQ ID NO: 62774 - protein, 403 aa, Pseudomonas syringae pv. syringae B728a; identical to SEQ ID NO: 28449

SEQ ID NO: 62775 - DNA, 1158 bp, Staphylococcus haemolyticus JCSC1435; identical to SEQ ID NO: 28450
  CDS (1)..(1158): transl_table=11

SEQ ID NO: 62776 - protein, 385 aa, Staphylococcus haemolyticus JCSC1435; identical to SEQ ID NO: 28451

SEQ ID NO: 62777 - DNA, 1380 bp, Psychrobacter arcticum 273-4; identical to SEQ ID NO: 28452
  CDS (1)..(1380): transl_table=11

SEQ ID NO: 62778 - protein, 459 aa, Psychrobacter arcticum 273-4; identical to SEQ ID NO: 28453

SEQ ID NO: 62779 - DNA, 1212 bp, Pseudomonas syringae pv. phaseolicola 1448A; identical to SEQ ID NO: 28454
  CDS (1)..(1212): transl_table=11

SEQ ID NO: 62780 - protein, 403 aa, Pseudomonas syringae pv. phaseolicola 1448A; identical to SEQ ID NO: 28455

SEQ ID NO: 62781 - DNA, 1215 bp, Dechloromonas aromatica RCB; identical to SEQ ID NO: 28456
  CDS (1)..(1215): transl_table=11

SEQ ID NO: 62782 - protein, 404 aa, Dechloromonas aromatica RCB; identical to SEQ ID NO: 28457

SEQ ID NO: 62783 - DNA, 1290 bp, Ralstonia eutropha JMP134; identical to SEQ ID NO: 28458
  CDS (1)..(1290): transl_table=11

SEQ ID NO: 62784 - protein, 429 aa, Ralstonia eutropha JMP134; identical to SEQ ID NO: 28459

SEQ ID NO: 62785 - DNA, 1386 bp, Ralstonia eutropha JMP134; identical to SEQ ID NO: 28460
  CDS (1)..(1386): transl_table=11

SEQ ID NO: 62786 - protein, 461 aa, Ralstonia eutropha JMP134; identical to SEQ ID NO: 28461

SEQ ID NO: 62787 - DNA, 1362 bp, Shigella sonnei Ss046; identical to SEQ ID NO: 28462
  CDS (1)..(1362): transl_table=11

SEQ ID NO: 62788 - protein, 453 aa, Shigella sonnei Ss046; identical to SEQ ID NO: 28463

SEQ ID NO: 62789 - DNA, 1269 bp, Thiobacillus denitrificans ATCC 25259; identical to SEQ ID NO: 28464
  CDS (1)..(1269): transl_table=11

SEQ ID NO: 62790 - protein, 422 aa, Thiobacillus denitrificans ATCC 25259; identical to SEQ ID NO: 28465

SEQ ID NO: 62791 - DNA, 1677 bp, Thiobacillus denitrificans ATCC 25259; identical to SEQ ID NO: 28466
  CDS (1)..(1677): transl_table=11

SEQ ID NO: 62792 - protein, 558 aa, Thiobacillus denitrificans ATCC 25259; identical to SEQ ID NO: 28467

SEQ ID NO: 62793 - DNA, 1263 bp, Magnetospirillum magnetotacticum MS-1; identical to SEQ ID NO: 28468
  CDS (1)..(1263)

SEQ ID NO: 62794 - protein, 420 aa, Magnetospirillum magnetotacticum MS-1; identical to SEQ ID NO: 28469

SEQ ID NO: 62795 - DNA, 1407 bp, Pseudomonas aeruginosa UCBPP-PA14; identical to SEQ ID NO: 28470
  CDS (1)..(1407)

SEQ ID NO: 62796 - protein, 468 aa, Pseudomonas aeruginosa UCBPP-PA14; identical to SEQ ID NO: 28471

SEQ ID NO: 62797 - DNA, 1326 bp, Burkholderia cepacia R18194; identical to SEQ ID NO: 28472
  CDS (1)..(1326)

SEQ ID NO: 62798 - protein, 441 aa, Burkholderia cepacia R18194; identical to SEQ ID NO: 28473

SEQ ID NO: 62799 - DNA, 1326 bp, Burkholderia cenocepacia AU 1054; identical to SEQ ID NO: 28474
  CDS (1)..(1326): transl_table=11

SEQ ID NO: 62800 - protein, 441 aa, Burkholderia cenocepacia AU 1054; identical to SEQ ID NO: 28475

SEQ ID NO: 62801 - DNA, 1407 bp, Burkholderia pseudomallei S13; identical to SEQ ID NO: 28476
  CDS (1)..(1407)

SEQ ID NO: 62802 - protein, 468 aa, Burkholderia pseudomallei S13; identical to SEQ ID NO: 28477

SEQ ID NO: 62803 - DNA, 1212 bp, Polaromonas sp. JS666; identical to SEQ ID NO: 28478
  CDS (1)..(1212): transl_table=11

SEQ ID NO: 62804 - protein, 403 aa, Polaromonas sp. JS666; identical to SEQ ID NO: 28479

SEQ ID NO: 62805 - DNA, 1320 bp, Geobacter metallireducens GS-15; identical to SEQ ID NO: 28480
  CDS (1)..(1320): transl_table=11

SEQ ID NO: 62806 - protein, 439 aa, Geobacter metallireducens GS-15; identical to SEQ ID NO: 28481

SEQ ID NO: 62807 - DNA, 1230 bp, Nitrobacter hamburgensis X14; identical to SEQ ID NO: 28482
  CDS (1)..(1230): transl_table=11

SEQ ID NO: 62808 - protein, 409 aa, Nitrobacter hamburgensis X14; identical to SEQ ID NO: 28483

SEQ ID NO: 62809 - DNA, 1209 bp, Paracoccus denitrificans PD1222; identical to SEQ ID NO: 28484
  CDS (1)..(1209): transl_table=11

SEQ ID NO: 62810 - protein, 402 aa, Paracoccus denitrificans PD1222; identical to SEQ ID NO: 28485

SEQ ID NO: 62811 - DNA, 1401 bp, Pseudomonas aeruginosa; identical to SEQ ID NO: 28486
  CDS (1)..(1401): transl_table=11

SEQ ID NO: 62812 - protein, 466 aa, Pseudomonas aeruginosa; identical to SEQ ID NO: 28487

SEQ ID NO: 62813 - DNA, 1416 bp, Mycobacterium fortuitum; identical to SEQ ID NO: 28488
  CDS (1)..(1416): transl_table=11

SEQ ID NO: 62814 - protein, 471 aa, Mycobacterium fortuitum; identical to SEQ ID NO: 28489

SEQ ID NO: 62815 - DNA, 1527 bp, Populus tremula x Populus tremuloides; identical to SEQ ID NO: 28490
  CDS (1)..(1527)

SEQ ID NO: 62816 - protein, 508 aa, Populus tremula x Populus tremuloides; identical to SEQ ID NO: 28491

SEQ ID NO: 62817 - DNA, 1602 bp, Pseudomonas sp; identical to SEQ ID NO: 28492
  CDS (1)..(1602): transl_table=11

SEQ ID NO: 62818 - protein, 533 aa, Pseudomonas sp; identical to SEQ ID NO: 28493

SEQ ID NO: 62819 - DNA, 1302 bp, Halomonas maura; identical to SEQ ID NO: 28494
  CDS (1)..(1302): transl_table=11

SEQ ID NO: 62820 - protein, 433 aa, Halomonas maura; identical to SEQ ID NO: 28495

SEQ ID NO: 62821 - DNA, 1254 bp, Rhizobium sp; identical to SEQ ID NO: 28496
  CDS (1)..(1254): transl_table=11

SEQ ID NO: 62822 - protein, 417 aa, Rhizobium sp; identical to SEQ ID NO: 28497

SEQ ID NO: 62823 - DNA, 1311 bp, Halobacterium mediterranei; identical to SEQ ID NO: 28498
  CDS (1)..(1311): transl_table=11

SEQ ID NO: 62824 - protein, 436 aa, Halobacterium mediterranei; identical to SEQ ID NO: 28499

SEQ ID NO: 62825 - DNA, 1650 bp, Physcomitrella patens; identical to SEQ ID NO: 28500
  CDS (1)..(1650)

SEQ ID NO: 62826 - protein, 549 aa, Physcomitrella patens; identical to SEQ ID NO: 28501

SEQ ID NO: 62827 - DNA, 1353 bp, Corynebacterium glutamicum; identical to SEQ ID NO: 28502
  CDS (1)..(1353): transl_table=11

SEQ ID NO: 62828 - protein, 450 aa, Corynebacterium glutamicum; identical to SEQ ID NO: 28503

SEQ ID NO: 62829 - DNA, 1284 bp, Paracoccus halodenitrificans; identical to SEQ ID NO: 28504
  CDS (1)..(1284): transl_table=11

SEQ ID NO: 62830 - protein, 427 aa, Paracoccus halodenitrificans; identical to SEQ ID NO: 28505

SEQ ID NO: 62831 - DNA, 1593 bp, Paracoccus halodenitrificans; identical to SEQ ID NO: 28506
  CDS (1)..(1593): transl_table=11

SEQ ID NO: 62832 - protein, 530 aa, Paracoccus halodenitrificans; identical to SEQ ID NO: 28507

SEQ ID NO: 62833 - DNA, 2718 bp, Paracoccus pantotrophus; identical to SEQ ID NO: 28508
  CDS (1)..(2718): transl_table=11

SEQ ID NO: 62834 - protein, 905 aa, Paracoccus pantotrophus; identical to SEQ ID NO: 28509

SEQ ID NO: 62835 - DNA, 1266 bp, Pseudomonas fluorescens; identical to SEQ ID NO: 28510
  CDS (1)..(1266): transl_table=11

SEQ ID NO: 62836 - protein, 421 aa, Pseudomonas fluorescens; identical to SEQ ID NO: 28511

SEQ ID NO: 62837 - DNA, 1332 bp, Thermus thermophilus; identical to SEQ ID NO: 28512
  CDS (1)..(1332): transl_table=11

SEQ ID NO: 62838 - protein, 443 aa, Thermus thermophilus; identical to SEQ ID NO: 28513

SEQ ID NO: 62839 - DNA, 1308 bp, Thermus thermophilus; identical to SEQ ID NO: 28514
  CDS (1)..(1308): transl_table=11

SEQ ID NO: 62840 - protein, 435 aa, Thermus thermophilus; identical to SEQ ID NO: 28515

SEQ ID NO: 62841 - DNA, 1449 bp, Cylindrotheca fusiformis; identical to SEQ ID NO: 28516
  CDS (1)..(1449)

SEQ ID NO: 62842 - protein, 482 aa, Cylindrotheca fusiformis; identical to SEQ ID NO: 28517

SEQ ID NO: 62843 - DNA, 1449 bp, Cylindrotheca fusiformis; identical to SEQ ID NO: 28518
  CDS (1)..(1449)

SEQ ID NO: 62844 - protein, 482 aa, Cylindrotheca fusiformis; identical to SEQ ID NO: 28519

SEQ ID NO: 62845 - DNA, 1449 bp, Cylindrotheca fusiformis; identical to SEQ ID NO: 28520
  CDS (1)..(1449)

SEQ ID NO: 62846 - protein, 482 aa, Cylindrotheca fusiformis; identical to SEQ ID NO: 28521

SEQ ID NO: 62847 - DNA, 1212 bp, Pseudomonas aeruginosa; identical to SEQ ID NO: 28522
  CDS (1)..(1212): transl_table=11

SEQ ID NO: 62848 - protein, 403 aa, Pseudomonas aeruginosa; identical to SEQ ID NO: 28523

SEQ ID NO: 62849 - DNA, 1389 bp, Escherichia coli; identical to SEQ ID NO: 28524
  CDS (1)..(1389): transl_table=11

SEQ ID NO: 62850 - protein, 462 aa, Escherichia coli; identical to SEQ ID NO: 28525

SEQ ID NO: 62851 - DNA, 1389 bp, Salmonella typhimurium; identical to SEQ ID NO: 28526
  CDS (1)..(1389): transl_table=11

SEQ ID NO: 62852 - protein, 462 aa, Salmonella typhimurium; identical to SEQ ID NO: 28527

SEQ ID NO: 62853 - DNA, 1266 bp, Bacillus subtilis; identical to SEQ ID NO: 28528
  CDS (1)..(1266): transl_table=11

SEQ ID NO: 62854 - protein, 421 aa, Bacillus subtilis; identical to SEQ ID NO: 28529

SEQ ID NO: 62855 - DNA, 21 bp, Artificial sequence
  Primer sequence
atgagtcactcatccgccccc

SEQ ID NO: 62856 - DNA, 27 bp, Artificial sequence
  Primer sequence
ttattttttagaatgccgaccatatac

SEQ ID NO: 62857 - protein, 512 aa, Artificial sequence; identical to SEQ ID NO: 28532
  Consensus
  Variant (2)..(9): Xaa in position 2 to 9 is any amino acid
  Variant (11)..(11): Xaa in position 11 is any amino acid
  Variant (13)..(13): Xaa in position 13 is any amino acid
  Variant (16)..(16): Xaa in position 16 is any amino acid
  Variant (18)..(22): Xaa in position 18 to 22 is any amino acid
  Variant (23)..(24): Xaa in position 23 to 24 is any or no amino acid
  Variant (26)..(38): Xaa in position 26 to 38 is any amino acid
  Variant (39)..(49): Xaa in position 39 to 49 is any or no amino acid
  Variant (51)..(51): Xaa in position 51 is any amino acid
  Variant (53)..(54): Xaa in position 53 to 54 is any amino acid
  Variant (55)..(55): Xaa in position 55 is any or no amino acid
  Variant (57)..(57): Xaa in position 57 is any amino acid
  Variant (60)..(60): Xaa in position 60 is any amino acid
  Variant (64)..(72): Xaa in position 64 to 72 is any amino acid
  Variant (74)..(74): Xaa in position 74 is any amino acid
  Variant (76)..(86): Xaa in position 76 to 86 is any amino acid
  Variant (88)..(101): Xaa in position 88 to 101 is any amino acid
  Variant (102)..(110): Xaa in position 102 to 110 is any or no amino acid
  Variant (112)..(112): Xaa in position 112 is any amino acid
  Variant (113)..(113): Xaa in position 113 is any or no amino acid
  Variant (115)..(117): Xaa in position 115 to 117 is any amino acid
  Variant (119)..(119): Xaa in position 119 is any amino acid
  Variant (123)..(123): Xaa in position 123 is any amino acid
  Variant (126)..(127): Xaa in position 126 to 127 is any amino acid
  Variant (129)..(133): Xaa in position 129 to 133 is any amino acid
  Variant (137)..(140): Xaa in position 137 to 140 is any amino acid
  Variant (142)..(142): Xaa in position 142 is any amino acid
  Variant (144)..(144): Xaa in position 144 is any amino acid
  Variant (147)..(147): Xaa in position 147 is any amino acid
  Variant (150)..(150): Xaa in position 150 is any amino acid
  Variant (151)..(151): Xaa in position 151 is any or no amino acid
  Variant (153)..(153): Xaa in position 153 is any amino acid
  Variant (155)..(156): Xaa in position 155 to 156 is any amino acid
  Variant (158)..(162): Xaa in position 158 to 162 is any amino acid
  Variant (164)..(164): Xaa in position 164 is any or no amino acid
  Variant (166)..(181): Xaa in position 166 to 181 is any amino acid
  Variant (182)..(210): Xaa in position 182 to 210 is any or no amino acid
  Variant (212)..(212): Xaa in position 212 is any amino acid
  Variant (214)..(215): Xaa in position 214 to 215 is any amino acid
  Variant (217)..(243): Xaa in position 217 to 243 is any amino acid
  Variant (244)..(314): Xaa in position 244 to 314 is any or no amino acid
  Variant (316)..(320): Xaa in position 316 to 320 is any amino acid
  Variant (322)..(324): Xaa in position 322 to 324 is any amino acid
  Variant (327)..(327): Xaa in position 327 is any amino acid
  Variant (331)..(342): Xaa in position 331 to 342 is any amino acid
  Variant (344)..(357): Xaa in position 344 to 357 is any amino acid
  Variant (358)..(377): Xaa in position 358 to 377 is any or no amino acid
  Variant (379)..(381): Xaa in position 379 to 381 is any amino acid
  Variant (383)..(384): Xaa in position 383 to 384 is any amino acid
  Variant (387)..(387): Xaa in position 387 is any amino acid
  Variant (392)..(392): Xaa in position 392 is any amino acid
  Variant (395)..(432): Xaa in position 395 to 432 is any amino acid
  Variant (433)..(455): Xaa in position 433 to 455 is any or no amino acid
  Variant (457)..(457): Xaa in position 457 is any amino acid
  Variant (459)..(459): Xaa in position 459 is any amino acid
  Variant (462)..(462): Xaa in position 462 is any amino acid
  Variant (464)..(465): Xaa in position 464 to 465 is any amino acid
  Variant (467)..(469): Xaa in position 467 to 469 is any amino acid
  Variant (471)..(474): Xaa in position 471 to 474 is any amino acid
  Variant (475)..(497): Xaa in position 475 to 497 is any or no amino acid
  Variant (499)..(501): Xaa in position 499 to 501 is any amino acid
  Variant (503)..(507): Xaa in position 503 to 507 is any amino acid
  Variant (510)..(510): Xaa in position 510 is any amino acid

SEQ ID NO: 62858 - protein, 19 aa, Artificial sequence
  Consensus
  Variant (2)..(10): Xaa in position 2 to 10 is any amino acid
  Variant (11)..(11): Xaa in position 11 is any or no amino acid
  Variant (13)..(13): Xaa in position 13 is any amino acid
  Variant (14)..(14): Xaa in position 14 is Ala, Ile or Val
  Variant (16)..(16): Xaa in position 16 is any amino acid
  Variant (17)..(17): Xaa in position 17 is Ile, Leu, Met or Val
  Variant (18)..(18): Xaa in position 18 is any amino acid
  Variant (19)..(19): Xaa in position 19 is Ala, Gly or Ser
LXXXXXXXXXXFXXWXXXX

SEQ ID NO: 62859 - protein, 45 aa, Artificial sequence; identical to SEQ ID NO: 28534
  Consensus
  Variant (2)..(3): Xaa in position 2 to 3 is any amino acid
  Variant (4)..(4): Xaa in position 4 is any or no amino acid
  Variant (6)..(6): Xaa in position 6 is Ala, Gly or Thr
  Variant (7)..(7): Xaa in position 7 is any amino acid
  Variant (9)..(9): Xaa in position 9 is Ala, Gly or Ser
  Variant (10)..(12): Xaa in position 10 to 12 is any amino acid
  Variant (13)..(13): Xaa in position 13 is Ala, Gly, Pro, Ser or Thr
  Variant (14)..(15): Xaa in position 14 to 15 is any amino acid
  Variant (16)..(16): Xaa in position 16 is Ala, Gly, Asn, Pro or Ser
  Variant (17)..(18): Xaa in position 17 to 18 is any amino acid
  Variant (19)..(19): Xaa in position 19 is Phe, His or Tyr
  Variant (20)..(24): Xaa in position 20 to 24 is any amino acid
  Variant (26)..(26): Xaa in position 26 is any amino acid
  Variant (27)..(27): Xaa in position 27 is Ala, Ser or Val
  Variant (28)..(28): Xaa in position 28 is any amino acid
  Variant (30)..(31): Xaa in position 30 to 31 is any amino acid
  Variant (32)..(33): Xaa in position 32 to 33 is any or no amino acid
  Variant (35)..(38): Xaa in position 35 to 38 is any amino acid
  Variant (39)..(39): Xaa in position 39 is Ala, Gly or Val
  Variant (40)..(44): Xaa in position 40 to 44 is any amino acid
  Variant (45)..(45): Xaa in position 45 is Phe, Ile, Leu or Val

SEQ ID NO: 62860 - protein, 24 aa, Artificial sequence
  Consensus
  Variant (2)..(3): Xaa in position 2 to 3 is any amino acid
  Variant (4)..(4): Xaa in position 4 is any or no amino acid
  Variant (6)..(6): Xaa in position 6 is any or no amino acid
  Variant (8)..(8): Xaa in position 8 is Ala, Gly or Ser
  Variant (9)..(9): Xaa in position 9 is Phe or Tyr
  Variant (10)..(10): Xaa in position 10 is Ala, Ile or Val
  Variant (11)..(11): Xaa in position 11 is Ala or Gly
  Variant (12)..(12): Xaa in position 12 is any amino acid
  Variant (13)..(13): Xaa in position 13 is Ala, Gly, Ser or Thr
  Variant (14)..(15): Xaa in position 14 to 15 is any amino acid
  Variant (16)..(16): Xaa in position 16 is Phe, Leu, Met or Val
  Variant (17)..(17): Xaa in position 17 is Ala, Gly, Pro, Ser or Thr
  Variant (18)..(23): Xaa in position 18 to 23 is any amino acid
  Variant (24)..(24): Xaa in position 24 is Phe or Tyr
YXXXFXGXXXXXXXXXXXXXXXXX

SEQ ID NO: 62861 - protein, 33 aa, Artificial sequence; identical to SEQ ID NO: 28536
  Consensus
  Variant (2)..(19): Xaa in position 2 to 19 is any amino acid
  Variant (20)..(22): Xaa in position 20 to 22 is any or no amino acid
  Variant (24)..(24): Xaa in position 24 is Phe, Ile, Leu, Met or Val
  Variant (25)..(25): Xaa in position 25 is any amino acid
  Variant (26)..(26): Xaa in position 26 is Ala, Gly or Ser
  Variant (27)..(28): Xaa in position 27 to 28 is any amino acid
  Variant (30)..(30): Xaa in position 30 is Ala, Cys, Gly, Asn, Ser or Thr
  Variant (31)..(31): Xaa in position 31 is any amino acid
  Variant (33)..(33): Xaa in position 33 is Ala, Gly, Pro or Ser

SEQ ID NO: 62862 - DNA, 990 bp, Escherichia coli; identical to SEQ ID NO: 31211
  CDS (1)..(990)

SEQ ID NO: 62863 - protein, 329 aa, Escherichia coli; identical to SEQ ID NO: 31212

SEQ ID NO: 62864 - DNA, 978 bp, Xenopus tropicalis; identical to SEQ ID NO: 31213
  CDS (1)..(978)

SEQ ID NO: 62865 - protein, 325 aa, Xenopus tropicalis; identical to SEQ ID NO: 31214

SEQ ID NO: 62866 - DNA, 1773 bp, Cryptococcus neoformans var. neoformans JEC21; identical to SEQ ID NO: 31215
  CDS (1)..(1773)

SEQ ID NO: 62867 - protein, 590 aa, Cryptococcus neoformans var. neoformans JEC21; identical to SEQ ID NO: 31216

SEQ ID NO: 62868 - DNA, 996 bp, Cryptococcus neoformans var. neoformans JEC21; identical to SEQ ID NO: 31217
  CDS (1)..(996)

SEQ ID NO: 62869 - protein, 331 aa, Cryptococcus neoformans var. neoformans JEC21; identical to SEQ ID NO: 31218

SEQ ID NO: 62870 - DNA, 1146 bp, Thermococcus kodakaraensis; identical to SEQ ID NO: 31219
  CDS (1)..(1146)

SEQ ID NO: 62871 - protein, 381 aa, Thermococcus kodakaraensis; identical to SEQ ID NO: 31220

SEQ ID NO: 62872 - DNA, 1269 bp, Staphylococcus aureus subsp. aureus COL; identical to SEQ ID NO: 31221
  CDS (1)..(1269)

SEQ ID NO: 62873 - protein, 422 aa, Staphylococcus aureus subsp. aureus COL; identical to SEQ ID NO: 31222

SEQ ID NO: 62874 - DNA, 1104 bp, Staphylococcus epidermidis RP62A; identical to SEQ ID NO: 31223
  CDS (40)..(1104)

SEQ ID NO: 62875 - protein, 354 aa, Staphylococcus epidermidis RP62A; identical to SEQ ID NO: 31224

SEQ ID NO: 62876 - DNA, 1269 bp, Staphylococcus epidermidis RP62A; identical to SEQ ID NO: 31225
  CDS (1)..(1269)

SEQ ID NO: 62877 - protein, 422 aa, Staphylococcus epidermidis RP62A; identical to SEQ ID NO: 31226

SEQ ID NO: 62878 - DNA, 1227 bp, Gluconobacter oxydans 621H; identical to SEQ ID NO: 31227
  CDS (1)..(1227)

SEQ ID NO: 62879 - protein, 408 aa, Gluconobacter oxydans 621H; identical to SEQ ID NO: 31228

SEQ ID NO: 62880 - DNA, 1071 bp, Xanthomonas oryzae pv. oryzae KACC10331; identical to SEQ ID NO: 31229
  CDS (1)..(1071)

SEQ ID NO: 62881 - protein, 356 aa, Xanthomonas oryzae pv. oryzae KACC10331; identical to SEQ ID NO: 31230

SEQ ID NO: 62882 - DNA, 897 bp, Xanthomonas oryzae pv. oryzae KACC10331; identical to SEQ ID NO: 31231
  CDS (1)..(897)

SEQ ID NO: 62883 - protein, 298 aa, Xanthomonas oryzae pv. oryzae KACC10331; identical to SEQ ID NO: 31232

SEQ ID NO: 62884 - DNA, 1131 bp, Vibrio fischeri ES114; identical to SEQ ID NO: 31233
  CDS (1)..(1131)

SEQ ID NO: 62885 - protein, 376 aa, Vibrio fischeri ES114; identical to SEQ ID NO: 31234

SEQ ID NO: 62886 - DNA, 1527 bp, Neisseria gonorrhoeae FA 1090; identical to SEQ ID NO: 31235
  CDS (1)..(1527)

SEQ ID NO: 62887 - protein, 508 aa, Neisseria gonorrhoeae FA 1090; identical to SEQ ID NO: 31236

SEQ ID NO: 62888 - DNA, 1302 bp, Mesorhizobium loti MAFF303099; identical to SEQ ID NO: 31237
  CDS (1)..(1302): transl_table=11

SEQ ID NO: 62889 - protein, 433 aa, Mesorhizobium loti MAFF303099; identical to SEQ ID NO: 31238

SEQ ID NO: 62890 - DNA, 942 bp, Mesorhizobium loti MAFF303099; identical to SEQ ID NO: 31239
  CDS (1)..(942): transl_table=11

SEQ ID NO: 62891 - protein, 313 aa, Mesorhizobium loti MAFF303099; identical to SEQ ID NO: 31240

SEQ ID NO: 62892 - DNA, 984 bp, Mesorhizobium loti MAFF303099; identical to SEQ ID NO: 31241
  CDS (1)..(984): transl_table=11

SEQ ID NO: 62893 - protein, 327 aa, Mesorhizobium loti MAFF303099; identical to SEQ ID NO: 31242

SEQ ID NO: 62894 - DNA, 1059 bp, Mesorhizobium loti MAFF303099; identical to SEQ ID NO: 31243
  CDS (1)..(1059): transl_table=11

SEQ ID NO: 62895 - protein, 352 aa, Mesorhizobium loti MAFF303099; identical to SEQ ID NO: 31244

SEQ ID NO: 62896 - DNA, 1005 bp, Mesorhizobium loti MAFF303099; identical to SEQ ID NO: 31245
  CDS (1)..(1005): transl_table=11

SEQ ID NO: 62897 - protein, 334 aa, Mesorhizobium loti MAFF303099; identical to SEQ ID NO: 31246

SEQ ID NO: 62898 - DNA, 1221 bp, Thermoplasma volcanium GSS1; identical to SEQ ID NO: 31247
  CDS (1)..(1221): transl_table=11

SEQ ID NO: 62899 - protein, 406 aa, Thermoplasma volcanium GSS1; identical to SEQ ID NO: 31248

SEQ ID NO: 62900 - DNA, 1320 bp, Pyrococcus abyssi GE5; identical to SEQ ID NO: 31249
  CDS (1)..(1320): transl_table=11

SEQ ID NO: 62901 - protein, 439 aa, Pyrococcus abyssi GE5; identical to SEQ ID NO: 31250

SEQ ID NO: 62902 - DNA, 1185 bp, Pyrococcus abyssi GE5; identical to SEQ ID NO: 31251
  CDS (1)..(1185): transl_table=11

SEQ ID NO: 62903 - protein, 394 aa, Pyrococcus abyssi GE5; identical to SEQ ID NO: 31252

SEQ ID NO: 62904 - DNA, 1185 bp, Pyrococcus horikoshii OT3; identical to SEQ ID NO: 31253
  CDS (1)..(1185): transl_table=11

SEQ ID NO: 62905 - protein, 394 aa, Pyrococcus horikoshii OT3; identical to SEQ ID NO: 31254

SEQ ID NO: 62906 - DNA, 1323 bp, Pyrococcus horikoshii OT3; identical to SEQ ID NO: 31255
  CDS (1)..(1323): transl_table=11

SEQ ID NO: 62907 - protein, 440 aa, Pyrococcus horikoshii OT3; identical to SEQ ID NO: 31256

SEQ ID NO: 62908 - DNA, 1050 bp, Aeropyrum pernix K1; identical to SEQ ID NO: 31257
  CDS (1)..(1050): transl_table=11

SEQ ID NO: 62909 - protein, 349 aa, Aeropyrum pernix K1; identical to SEQ ID NO: 31258

SEQ ID NO: 62910 - DNA, 1182 bp, Aeropyrum pernix K1; identical to SEQ ID NO: 31259
  CDS (1)..(1182): transl_table=11

SEQ ID NO: 62911 - protein, 393 aa, Aeropyrum pernix K1; identical to SEQ ID NO: 31260

SEQ ID NO: 62912 - DNA, 1041 bp, Arabidopsis thaliana; identical to SEQ ID NO: 31261
  CDS (1)..(1041)

SEQ ID NO: 62913 - protein, 346 aa, Arabidopsis thaliana; identical to SEQ ID NO: 31262

SEQ ID NO: 62914 - DNA, 1059 bp, Aquifex aeolicus VF5; identical to SEQ ID NO: 31263
  CDS (1)..(1059): transl_table=11

SEQ ID NO: 62915 - protein, 352 aa, Aquifex aeolicus VF5; identical to SEQ ID NO: 31264

SEQ ID NO: 62916 - DNA, 1002 bp, Rickettsia prowazekii str. Madrid E; identical to SEQ ID NO: 31265
  CDS (1)..(1002): transl_table=11

SEQ ID NO: 62917 - protein, 333 aa, Rickettsia prowazekii str. Madrid E; identical to SEQ ID NO: 31266

SEQ ID NO: 62918 - DNA, 1206 bp, Thermotoga maritima MSB8; identical to SEQ ID NO: 31267
  CDS (1)..(1206): transl_table=11

SEQ ID NO: 62919 - protein, 401 aa, Thermotoga maritima MSB8; identical to SEQ ID NO: 31268

SEQ ID NO: 62920 - DNA, 1515 bp, Pseudomonas aeruginosa PAO1; identical to SEQ ID NO: 31269
  CDS (1)..(1515): transl_table=11

SEQ ID NO: 62921 - protein, 504 aa, Pseudomonas aeruginosa PAO1; identical to SEQ ID NO: 31270

SEQ ID NO: 62922 - DNA, 963 bp, Pseudomonas aeruginosa PAO1; identical to SEQ ID NO: 31271
  CDS (1)..(963): transl_table=11

SEQ ID NO: 62923 - protein, 320 aa, Pseudomonas aeruginosa PAO1; identical to SEQ ID NO: 31272

SEQ ID NO: 62924 - DNA, 1548 bp, Pseudomonas aeruginosa PAO1; identical to SEQ ID NO: 31273
  CDS (1)..(1548): transl_table=11

SEQ ID NO: 62925 - protein, 515 aa, Pseudomonas aeruginosa PAO1; identical to SEQ ID NO: 31274

SEQ ID NO: 62926 - DNA, 1527 bp, Neisseria meningitidis MC58; identical to SEQ ID NO: 31275
  CDS (1)..(1527): transl_table=11

SEQ ID NO: 62927 - protein, 508 aa, Neisseria meningitidis MC58; identical to SEQ ID NO: 31276

SEQ ID NO: 62928 - DNA, 1221 bp, Methanothermobacter thermautotrophicus str. Delta H; identical to SEQ ID NO: 31277
  CDS (1)..(1221): transl_table=11

SEQ ID NO: 62929 - protein, 406 aa, Methanothermobacter thermautotrophicus str. Delta H; identical to SEQ ID NO: 31278

SEQ ID NO: 62930 - DNA, 1488 bp, Halobacterium salinarum NRC-1; identical to SEQ ID NO: 31279
  CDS (1)..(1488): transl_table=11

SEQ ID NO: 62931 - protein, 495 aa, Halobacterium salinarum NRC-1; identical to SEQ ID NO: 31280

SEQ ID NO: 62932 - DNA, 1527 bp, Neisseria meningitidis Z2491; identical to SEQ ID NO: 31281
  CDS (1)..(1527): transl_table=11

SEQ ID NO: 62933 - protein, 508 aa, Neisseria meningitidis Z2491; identical to SEQ ID NO: 31282

SEQ ID NO: 62934 - DNA, 1707 bp, Deinococcus radiodurans R1; identical to SEQ ID NO: 31283
  CDS (1)..(1707): transl_table=11

SEQ ID NO: 62935 - protein, 568 aa, Deinococcus radiodurans R1; identical to SEQ ID NO: 31284

SEQ ID NO: 62936 - DNA, 1143 bp, Xylella fastidiosa 9a5c; identical to SEQ ID NO: 31285
  CDS (1)..(1143): transl_table=11

SEQ ID NO: 62937 - protein, 380 aa, Xylella fastidiosa 9a5c; identical to SEQ ID NO: 31286

SEQ ID NO: 62938 - DNA, 1218 bp, Sulfolobus solfataricus P2; identical to SEQ ID NO: 31287
  CDS (1)..(1218): transl_table=11

SEQ ID NO: 62939 - protein, 405 aa, Sulfolobus solfataricus P2; identical to SEQ ID NO: 31288

SEQ ID NO: 62940 - DNA, 1038 bp, Sulfolobus solfataricus P2; identical to SEQ ID NO: 31289
  CDS (1)..(1038): transl_table=11

SEQ ID NO: 62941 - protein, 345 aa, Sulfolobus solfataricus P2; identical to SEQ ID NO: 31290

SEQ ID NO: 62942 - DNA, 1191 bp, Sulfolobus solfataricus P2; identical to SEQ ID NO: 31291
  CDS (1)..(1191): transl_table=11

SEQ ID NO: 62943 - protein, 396 aa, Sulfolobus solfataricus P2; identical to SEQ ID NO: 31292

SEQ ID NO: 62944 - DNA, 1251 bp, Streptococcus pneumoniae TIGR4; identical to SEQ ID NO: 31293
  CDS (1)..(1251): transl_table=11

SEQ ID NO: 62945 - protein, 416 aa, Streptococcus pneumoniae TIGR4; identical to SEQ ID NO: 31294

SEQ ID NO: 62946 - DNA, 1314 bp, Agrobacterium tumefaciens str. C58; identical to SEQ ID NO: 31295
  CDS (1)..(1314): transl_table=11

SEQ ID NO: 62947 - protein, 437 aa, Agrobacterium tumefaciens str. C58; identical to SEQ ID NO: 31296

SEQ ID NO: 62948 - DNA, 915 bp, Agrobacterium tumefaciens str. C58; identical to SEQ ID NO: 31297
  CDS (1)..(915): transl_table=11

SEQ ID NO: 62949 - protein, 304 aa, Agrobacterium tumefaciens str. C58; identical to SEQ ID NO: 31298

SEQ ID NO: 62950 - DNA, 1215 bp, Sulfolobus tokodaii str. 7; identical to SEQ ID NO: 31299
  CDS (1)..(1215): transl_table=11

SEQ ID NO: 62951 - protein, 404 aa, Sulfolobus tokodaii str. 7; identical to SEQ ID NO: 31300

SEQ ID NO: 62952 - DNA, 1188 bp, Sulfolobus tokodaii str. 7; identical to SEQ ID NO: 31301
  CDS (1)..(1188): transl_table=11

SEQ ID NO: 62953 - protein, 395 aa, Sulfolobus tokodaii str. 7; identical to SEQ ID NO: 31302

SEQ ID NO: 62954 - DNA, 1248 bp, Sinorhizobium meliloti 1021; identical to SEQ ID NO: 31303
  CDS (1)..(1248): transl_table=11

SEQ ID NO: 62955 - protein, 415 aa, Sinorhizobium meliloti 1021; identical to SEQ ID NO: 31304

SEQ ID NO: 62956 - DNA, 978 bp, Caulobacter crescentus CB15; identical to SEQ ID NO: 31305
  CDS (1)..(978): transl_table=11

SEQ ID NO: 62957 - protein, 325 aa, Caulobacter crescentus CB15; identical to SEQ ID NO: 31306

SEQ ID NO: 62958 - DNA, 1203 bp, Caulobacter crescentus CB15; identical to SEQ ID NO: 31307
  CDS (1)..(1203): transl_table=11

SEQ ID NO: 62959 - protein, 400 aa, Caulobacter crescentus CB15; identical to SEQ ID NO: 31308

SEQ ID NO: 62960 - DNA, 972 bp, Sinorhizobium meliloti 1021; identical to SEQ ID NO: 31309
  CDS (1)..(972)

SEQ ID NO: 62961 - protein, 323 aa, Sinorhizobium meliloti 1021; identical to SEQ ID NO: 31310

SEQ ID NO: 62962 - DNA, 1005 bp, Sinorhizobium meliloti 1021; identical to SEQ ID NO: 31311
  CDS (1)..(1005): transl_table=11

SEQ ID NO: 62963 - protein, 334 aa, Sinorhizobium meliloti 1021; identical to SEQ ID NO: 31312

SEQ ID NO: 62964 - DNA, 1527 bp, Synechocystis sp. PCC 6803; identical to SEQ ID NO: 31313
  CDS (1)..(1527): transl_table=11

SEQ ID NO: 62965 - protein, 508 aa, Synechocystis sp. PCC 6803; identical to SEQ ID NO: 31314

SEQ ID NO: 62966 - DNA, 1269 bp, Listeria monocytogenes EGD-e; identical to SEQ ID NO: 31315
  CDS (1)..(1269): transl_table=11

SEQ ID NO: 62967 - protein, 422 aa, Listeria monocytogenes EGD-e; identical to SEQ ID NO: 31316

SEQ ID NO: 62968 - DNA, 1269 bp, Listeria innocua Clip11262; identical to SEQ ID NO: 31317
  CDS (1)..(1269): transl_table=11

SEQ ID NO: 62969 - protein, 422 aa, Listeria innocua Clip11262; identical to SEQ ID NO: 31318

SEQ ID NO: 62970 - DNA, 1056 bp, Listeria innocua Clip11262; identical to SEQ ID NO: 31319
  CDS (1)..(1056): transl_table=11

SEQ ID NO: 62971 - protein, 351 aa, Listeria innocua Clip11262; identical to SEQ ID NO: 31320

SEQ ID NO: 62972 - DNA, 954 bp, Caenorhabditis elegans; identical to SEQ ID NO: 31321
  CDS (1)..(954)

SEQ ID NO: 62973 - protein, 317 aa, Caenorhabditis elegans; identical to SEQ ID NO: 31322

SEQ ID NO: 62974 - DNA, 1347 bp, Caenorhabditis elegans; identical to SEQ ID NO: 31323
  CDS (1)..(1347)

SEQ ID NO: 62975 - protein, 448 aa, Caenorhabditis elegans; identical to SEQ ID NO: 31324

SEQ ID NO: 62976 - DNA, 1539 bp, Caenorhabditis elegans; identical to SEQ ID NO: 31325
  CDS (1)..(1539)

SEQ ID NO: 62977 - protein, 512 aa, Caenorhabditis elegans; identical to SEQ ID NO: 31326

SEQ ID NO: 62978 - DNA, 1005 bp, Ralstonia solanacearum GMI1000; identical to SEQ ID NO: 31327
  CDS (1)..(1005): transl_table=11

SEQ ID NO: 62979 - protein, 334 aa, Ralstonia solanacearum GMI1000; identical to SEQ ID NO: 31328

SEQ ID NO: 62980 - DNA, 972 bp, Ralstonia solanacearum GMI1000; identical to SEQ ID NO: 31329
  CDS (1)..(972): transl_table=11

SEQ ID NO: 62981 - protein, 323 aa, Ralstonia solanacearum GMI1000; identical to SEQ ID NO: 31330

SEQ ID NO: 62982 - DNA, 975 bp, Agrobacterium tumefaciens str. C58; identical to SEQ ID NO: 31331
  CDS (1)..(975): transl_table=11

SEQ ID NO: 62983 - protein, 324 aa, Agrobacterium tumefaciens str. C58; identical to SEQ ID NO: 31332

SEQ ID NO: 62984 - DNA, 1011 bp, Agrobacterium tumefaciens str. C58; identical to SEQ ID NO: 31333
  CDS (1)..(1011): transl_table=11

SEQ ID NO: 62985 - protein, 336 aa, Agrobacterium tumefaciens str. C58; identical to SEQ ID NO: 31334

SEQ ID NO: 62986 - DNA, 1212 bp, Pyrobaculum aerophilum str. IM2; identical to SEQ ID NO: 31335
  CDS (1)..(1212): transl_table=11

SEQ ID NO: 62987 - protein, 403 aa, Pyrobaculum aerophilum str. IM2; identical to SEQ ID NO: 31336

SEQ ID NO: 62988 - DNA, 1047 bp, Pyrobaculum aerophilum str. IM2; identical to SEQ ID NO: 31337
  CDS (1)..(1047): transl_table=11

SEQ ID NO: 62989 - protein, 348 aa, Pyrobaculum aerophilum str. IM2; identical to SEQ ID NO: 31338

SEQ ID NO: 62990 - DNA, 1209 bp, Clostridium perfringens str. 13; identical to SEQ ID NO: 31339
  CDS (1)..(1209): transl_table=11

SEQ ID NO: 62991 - protein, 402 aa, Clostridium perfringens str. 13; identical to SEQ ID NO: 31340

SEQ ID NO: 62992 - DNA, 1185 bp, Pyrococcus furiosus DSM 3638; identical to SEQ ID NO: 31341
  CDS (1)..(1185): transl_table=11

SEQ ID NO: 62993 - protein, 394 aa, Pyrococcus furiosus DSM 3638; identical to SEQ ID NO: 31342

SEQ ID NO: 62994 - DNA, 1152 bp, Pyrococcus furiosus DSM 3638; identical to SEQ ID NO: 31343
  CDS (1)..(1152): transl_table=11

SEQ ID NO: 62995 - protein, 383 aa, Pyrococcus furiosus DSM 3638; identical to SEQ ID NO: 31344

SEQ ID NO: 62996 - DNA, 1338 bp, Pyrococcus furiosus DSM 3638; identical to SEQ ID NO: 31345
  CDS (1)..(1338): transl_table=11

SEQ ID NO: 62997 - protein, 445 aa, Pyrococcus furiosus DSM 3638; identical to SEQ ID NO: 31346

SEQ ID NO: 62998 - DNA, 1803 bp, Schizosaccharomyces pombe; identical to SEQ ID NO: 31347
  CDS (1)..(1803)

SEQ ID NO: 62999 - protein, 600 aa, Schizosaccharomyces pombe; identical to SEQ ID NO: 31348

SEQ ID NO: 63000 - DNA, 933 bp, Corynebacterium glutamicum ATCC 13032; identical to SEQ ID NO: 31349
  CDS (1)..(933): transl_table=11

SEQ ID NO: 63001 - protein, 310 aa, Corynebacterium glutamicum ATCC 13032; identical to SEQ ID NO: 31350

SEQ ID NO: 63002 - DNA, 1215 bp, Fusobacterium nucleatum subsp. nucleatum ATCC 25586; identical to SEQ ID NO: 31351
  CDS (1)..(1215): transl_table=11

SEQ ID NO: 63003 - protein, 404 aa, Fusobacterium nucleatum subsp. nucleatum ATCC 25586; identical to SEQ ID NO: 31352

SEQ ID NO: 63004 - DNA, 1212 bp, Methanopyrus kandleri AV19; identical to SEQ ID NO: 31353
  CDS (1)..(1212): transl_table=11

SEQ ID NO: 63005 - protein, 403 aa, Methanopyrus kandleri AV19; identical to SEQ ID NO: 31354

SEQ ID NO: 63006 - DNA, 1056 bp, Thermoanaerobacter tengcongensis MB4; identical to SEQ ID NO: 31355
  CDS (1)..(1056): transl_table=11

SEQ ID NO: 63007 - protein, 351 aa, Thermoanaerobacter tengcongensis MB4; identical to SEQ ID NO: 31356

SEQ ID NO: 63008 - DNA, 1230 bp, Streptomyces coelicolor A3(2); identical to SEQ ID NO: 31357
  CDS (1)..(1230)

SEQ ID NO: 63009 - protein, 409 aa, Streptomyces coelicolor A3(2); identical to SEQ ID NO: 31358

SEQ ID NO: 63010 - DNA, 1218 bp, Methanosarcina mazei Go1; identical to SEQ ID NO: 31359
  CDS (1)..(1218): transl_table=11

SEQ ID NO: 63011 - protein, 405 aa, Methanosarcina mazei Go1; identical to SEQ ID NO: 31360

SEQ ID NO: 63012 - DNA, 960 bp, Xanthomonas campestris pv. campestris str. ATCC 33913; identical to SEQ ID NO: 31361
  CDS (1)..(960): transl_table=11

SEQ ID NO: 63013 - protein, 319 aa, Xanthomonas campestris pv. campestris str. ATCC 33913; identical to SEQ ID NO: 31362

SEQ ID NO: 63014 - DNA, 960 bp, Xanthomonas axonopodis pv. citri str. 306; identical to SEQ ID NO: 31363
  CDS (1)..(960): transl_table=11

SEQ ID NO: 63015 - protein, 319 aa, Xanthomonas axonopodis pv. citri str. 306; identical to SEQ ID NO: 31364

SEQ ID NO: 63016 - DNA, 1119 bp, Xanthomonas axonopodis pv. citri str. 306; identical to SEQ ID NO: 31365
  CDS (1)..(1119): transl_table=11

SEQ ID NO: 63017 - protein, 372 aa, Xanthomonas axonopodis pv. citri str. 306; identical to SEQ ID NO: 31366

SEQ ID NO: 63018 - DNA, 1041 bp, Staphylococcus aureus subsp. aureus MW2; identical to SEQ ID NO: 31367
  CDS (1)..(1041): transl_table=11

SEQ ID NO: 63019 - protein, 346 aa, Staphylococcus aureus subsp. aureus MW2; identical to SEQ ID NO: 31368

SEQ ID NO: 63020 - DNA, 1410 bp, Drosophila melanogaster; identical to SEQ ID NO: 31369
  CDS (1)..(1410)

SEQ ID NO: 63021 - protein, 469 aa, Drosophila melanogaster; identical to SEQ ID NO: 31370

SEQ ID NO: 63022 - DNA, 1263 bp, Bacillus anthracis str. A2012; identical to SEQ ID NO: 31371
  CDS (1)..(1263): transl_table=11

SEQ ID NO: 63023 - protein, 420 aa, Bacillus anthracis str. A2012; identical to SEQ ID NO: 31372
  misc_feature (184)..(184): Xaa can be any naturally occuring amino acid
  misc_feature (201)..(201): Xaa can be any naturally occuring amino acid

SEQ ID NO: 63024 - DNA, 1545 bp, Yersinia pestis KIM; identical to SEQ ID NO: 31373
  CDS (1)..(1545): transl_table=11

SEQ ID NO: 63025 - protein, 514 aa, Yersinia pestis KIM; identical to SEQ ID NO: 31374

SEQ ID NO: 63026 - DNA, 1062 bp, Oceanobacillus iheyensis HTE831; identical to SEQ ID NO: 31375
  CDS (1)..(1062): transl_table=11

SEQ ID NO: 63027 - protein, 353 aa, Oceanobacillus iheyensis HTE831; identical to SEQ ID NO: 31376

SEQ ID NO: 63028 - DNA, 1017 bp, Oceanobacillus iheyensis HTE831; identical to SEQ ID NO: 31377
  CDS (1)..(1017): transl_table=11

SEQ ID NO: 63029 - protein, 338 aa, Oceanobacillus iheyensis HTE831; identical to SEQ ID NO: 31378

SEQ ID NO: 63030 - DNA, 1227 bp, Brucella suis 1330; identical to SEQ ID NO: 31379
  CDS (1)..(1227): transl_table=11

SEQ ID NO: 63031 - protein, 408 aa, Brucella suis 1330; identical to SEQ ID NO: 31380

SEQ ID NO: 63032 - DNA, 1638 bp, Shewanella oneidensis MR-1; identical to SEQ ID NO: 31381
  CDS (1)..(1638): transl_table=11

SEQ ID NO: 63033 - protein, 545 aa, Shewanella oneidensis MR-1; identical to SEQ ID NO: 31382

SEQ ID NO: 63034 - DNA, 1251 bp, Streptococcus mutans UA159; identical to SEQ ID NO: 31383
  CDS (1)..(1251): transl_table=11

SEQ ID NO: 63035 - protein, 416 aa, Streptococcus mutans UA159; identical to SEQ ID NO: 31384

SEQ ID NO: 63036 - DNA, 951 bp, Drosophila melanogaster; identical to SEQ ID NO: 31385
  CDS (1)..(951)

SEQ ID NO: 63037 - protein, 316 aa, Drosophila melanogaster; identical to SEQ ID NO: 31386

SEQ ID NO: 63038 - DNA, 1311 bp, Corynebacterium efficiens YS-314; identical to SEQ ID NO: 31387
  CDS (1)..(1311): transl_table=11

SEQ ID NO: 63039 - protein, 436 aa, Corynebacterium efficiens YS-314; identical to SEQ ID NO: 31388

SEQ ID NO: 63040 - DNA, 918 bp, Pseudomonas putida KT2440; identical to SEQ ID NO: 31389
  CDS (1)..(918): transl_table=11

SEQ ID NO: 63041 - protein, 305 aa, Pseudomonas putida KT2440; identical to SEQ ID NO: 31390

SEQ ID NO: 63042 - DNA, 1053 bp, Pseudomonas putida KT2440; identical to SEQ ID NO: 31391
  CDS (1)..(1053): transl_table=11

SEQ ID NO: 63043 - protein, 350 aa, Pseudomonas putida KT2440; identical to SEQ ID NO: 31392

SEQ ID NO: 63044 - DNA, 1593 bp, Pseudomonas putida KT2440; identical to SEQ ID NO: 31393
  CDS (1)..(1593): transl_table=11

SEQ ID NO: 63045 - protein, 530 aa, Pseudomonas putida KT2440; identical to SEQ ID NO: 31394

SEQ ID NO: 63046 - DNA, 1275 bp, Staphylococcus epidermidis ATCC 12228; identical to SEQ ID NO: 31395
  CDS (1)..(1275): transl_table=11

SEQ ID NO: 63047 - protein, 424 aa, Staphylococcus epidermidis ATCC 12228; identical to SEQ ID NO: 31396

SEQ ID NO: 63048 - DNA, 1245 bp, Bradyrhizobium japonicum USDA 110; identical to SEQ ID NO: 31397
  CDS (1)..(1245)

SEQ ID NO: 63049 - protein, 414 aa, Bradyrhizobium japonicum USDA 110; identical to SEQ ID NO: 31398

SEQ ID NO: 63050 - DNA, 1005 bp, Bradyrhizobium japonicum USDA 110; identical to SEQ ID NO: 31399
  CDS (1)..(1005)

SEQ ID NO: 63051 - protein, 334 aa, Bradyrhizobium japonicum USDA 110; identical to SEQ ID NO: 31400

SEQ ID NO: 63052 - DNA, 1053 bp, Xylella fastidiosa Temecula1; identical to SEQ ID NO: 31401
  CDS (1)..(1053): transl_table=11

SEQ ID NO: 63053 - protein, 350 aa, Xylella fastidiosa Temecula1; identical to SEQ ID NO: 31402

SEQ ID NO: 63054 - DNA, 1218 bp, Clostridium tetani E88; identical to SEQ ID NO: 31403
  CDS (1)..(1218): transl_table=11

SEQ ID NO: 63055 - protein, 405 aa, Clostridium tetani E88; identical to SEQ ID NO: 31404

SEQ ID NO: 63056 - DNA, 1284 bp, Tropheryma whipplei str. Twist; identical to SEQ ID NO: 31405
  CDS (1)..(1284): transl_table=11

SEQ ID NO: 63057 - protein, 427 aa, Tropheryma whipplei str. Twist; identical to SEQ ID NO: 31406

SEQ ID NO: 63058 - DNA, 1284 bp, Tropheryma whipplei TW08/27; identical to SEQ ID NO: 31407
  CDS (1)..(1284): transl_table=11

SEQ ID NO: 63059 - protein, 427 aa, Tropheryma whipplei TW08/27; identical to SEQ ID NO: 31408

SEQ ID NO: 63060 - DNA, 1524 bp, Pseudomonas syringae pv. tomato str. DC3000; identical to SEQ ID NO: 31409
  CDS (1)..(1524): transl_table=11

SEQ ID NO: 63061 - protein, 507 aa, Pseudomonas syringae pv. tomato str. DC3000; identical to SEQ ID NO: 31410

SEQ ID NO: 63062 - DNA, 1548 bp, Vibrio parahaemolyticus RIMD 2210633; identical to SEQ ID NO: 31411
  CDS (1)..(1548): transl_table=11

SEQ ID NO: 63063 - protein, 515 aa, Vibrio parahaemolyticus RIMD 2210633; identical to SEQ ID NO: 31412

SEQ ID NO: 63064 - DNA, 1545 bp, Salmonella enterica subsp. enterica serovar Typhi Ty2; identical to SEQ ID NO: 31413
  CDS (1)..(1545): transl_table=11

SEQ ID NO: 63065 - protein, 514 aa, Salmonella enterica subsp. enterica serovar Typhi Ty2; identical to SEQ ID NO: 31414

SEQ ID NO: 63066 - DNA, 1056 bp, Enterococcus faecalis V583; identical to SEQ ID NO: 31415
  CDS (1)..(1056): transl_table=11

SEQ ID NO: 63067 - protein, 351 aa, Enterococcus faecalis V583; identical to SEQ ID NO: 31416

SEQ ID NO: 63068 - DNA, 1059 bp, Bacillus cereus ATCC 14579; identical to SEQ ID NO: 31417
  CDS (1)..(1059): transl_table=11

SEQ ID NO: 63069 - protein, 352 aa, Bacillus cereus ATCC 14579; identical to SEQ ID NO: 31418

SEQ ID NO: 63070 - DNA, 1002 bp, Bacillus cereus ATCC 14579; identical to SEQ ID NO: 31419
  CDS (1)..(1002): transl_table=11

SEQ ID NO: 63071 - protein, 333 aa, Bacillus cereus ATCC 14579; identical to SEQ ID NO: 31420

SEQ ID NO: 63072 - DNA, 1512 bp, Nitrosomonas europaea ATCC 19718; identical to SEQ ID NO: 31421
  CDS (1)..(1512): transl_table=11

SEQ ID NO: 63073 - protein, 503 aa, Nitrosomonas europaea ATCC 19718; identical to SEQ ID NO: 31422

SEQ ID NO: 63074 - DNA, 1002 bp, Bacillus anthracis str. Ames; identical to SEQ ID NO: 31423
  CDS (1)..(1002): transl_table=11

SEQ ID NO: 63075 - protein, 333 aa, Bacillus anthracis str. Ames; identical to SEQ ID NO: 31424

SEQ ID NO: 63076 - DNA, 1227 bp, Helicobacter hepaticus ATCC 51449; identical to SEQ ID NO: 31425
  CDS (1)..(1227): transl_table=11

SEQ ID NO: 63077 - protein, 408 aa, Helicobacter hepaticus ATCC 51449; identical to SEQ ID NO: 31426

SEQ ID NO: 63078 - DNA, 1248 bp, Rhodopirellula baltica SH 1; identical to SEQ ID NO: 31427
  CDS (1)..(1248): transl_table=11

SEQ ID NO: 63079 - protein, 415 aa, Rhodopirellula baltica SH 1; identical to SEQ ID NO: 31428

SEQ ID NO: 63080 - DNA, 1545 bp, Candidatus Blochmannia floridanus; identical to SEQ ID NO: 31429
  CDS (1)..(1545): transl_table=11

SEQ ID NO: 63081 - protein, 514 aa, Candidatus Blochmannia floridanus; identical to SEQ ID NO: 31430

SEQ ID NO: 63082 - DNA, 1581 bp, Bordetella parapertussis 12822; identical to SEQ ID NO: 31431
  CDS (1)..(1581): transl_table=11

SEQ ID NO: 63083 - protein, 526 aa, Bordetella parapertussis 12822; identical to SEQ ID NO: 31432

SEQ ID NO: 63084 - DNA, 1218 bp, Bordetella parapertussis 12822; identical to SEQ ID NO: 31433
  CDS (1)..(1218): transl_table=11

SEQ ID NO: 63085 - protein, 405 aa, Bordetella parapertussis 12822; identical to SEQ ID NO: 31434

SEQ ID NO: 63086 - DNA, 969 bp, Bordetella parapertussis 12822; identical to SEQ ID NO: 31435
  CDS (1)..(969): transl_table=11

SEQ ID NO: 63087 - protein, 322 aa, Bordetella parapertussis 12822; identical to SEQ ID NO: 31436

SEQ ID NO: 63088 - DNA, 987 bp, Bordetella bronchiseptica RB50; identical to SEQ ID NO: 31437
  CDS (1)..(987): transl_table=11

SEQ ID NO: 63089 - protein, 328 aa, Bordetella bronchiseptica RB50; identical to SEQ ID NO: 31438

SEQ ID NO: 63090 - DNA, 1509 bp, Bordetella bronchiseptica RB50; identical to SEQ ID NO: 31439
  CDS (1)..(1509): transl_table=11

SEQ ID NO: 63091 - protein, 502 aa, Bordetella bronchiseptica RB50; identical to SEQ ID NO: 31440

SEQ ID NO: 63092 - DNA, 1545 bp, Prochlorococcus marinus str. MIT 9313; identical to SEQ ID NO: 31441
  CDS (1)..(1545): transl_table=11

SEQ ID NO: 63093 - protein, 514 aa, Prochlorococcus marinus str. MIT 9313; identical to SEQ ID NO: 31442

SEQ ID NO: 63094 - DNA, 1530 bp, Synechococcus sp. WH 8102; identical to SEQ ID NO: 31443
  CDS (1)..(1530): transl_table=11

SEQ ID NO: 63095 - protein, 509 aa, Synechococcus sp. WH 8102; identical to SEQ ID NO: 31444

SEQ ID NO: 63096 - DNA, 1530 bp, Chromobacterium violaceum ATCC 12472; identical to SEQ ID NO: 31445
  CDS (1)..(1530): transl_table=11

SEQ ID NO: 63097 - protein, 509 aa, Chromobacterium violaceum ATCC 12472; identical to SEQ ID NO: 31446

SEQ ID NO: 63098 - DNA, 966 bp, Chromobacterium violaceum ATCC 12472; identical to SEQ ID NO: 31447
  CDS (1)..(966): transl_table=11

SEQ ID NO: 63099 - protein, 321 aa, Chromobacterium violaceum ATCC 12472; identical to SEQ ID NO: 31448

SEQ ID NO: 63100 - DNA, 1212 bp, Wolinella succinogenes DSM 1740; identical to SEQ ID NO: 31449
  CDS (1)..(1212): transl_table=11

SEQ ID NO: 63101 - protein, 403 aa, Wolinella succinogenes DSM 1740; identical to SEQ ID NO: 31450

SEQ ID NO: 63102 - DNA, 1188 bp, Gloeobacter violaceus PCC 7421; identical to SEQ ID NO: 31451
  CDS (1)..(1188): transl_table=11

SEQ ID NO: 63103 - protein, 395 aa, Gloeobacter violaceus PCC 7421; identical to SEQ ID NO: 31452

SEQ ID NO: 63104 - DNA, 996 bp, Gloeobacter violaceus PCC 7421; identical to SEQ ID NO: 31453
  CDS (1)..(996): transl_table=11

SEQ ID NO: 63105 - protein, 331 aa, Gloeobacter violaceus PCC 7421; identical to SEQ ID NO: 31454

SEQ ID NO: 63106 - DNA, 969 bp, Photorhabdus luminescens subsp. laumondii TTO1; identical to SEQ ID NO: 31455
  CDS (1)..(969): transl_table=11

SEQ ID NO: 63107 - protein, 322 aa, Photorhabdus luminescens subsp. laumondii TTO1; identical to SEQ ID NO: 31456

SEQ ID NO: 63108 - DNA, 1560 bp, Photorhabdus luminescens subsp. laumondii TTO1; identical to SEQ ID NO: 31457
  CDS (1)..(1560): transl_table=11

SEQ ID NO: 63109 - protein, 519 aa, Photorhabdus luminescens subsp. laumondii TTO1; identical to SEQ ID NO: 31458

SEQ ID NO: 63110 - DNA, 1530 bp, Vibrio vulnificus YJ016; identical to SEQ ID NO: 31459
  CDS (1)..(1530): transl_table=11

SEQ ID NO: 63111 - protein, 509 aa, Vibrio vulnificus YJ016; identical to SEQ ID NO: 31460

SEQ ID NO: 63112 - DNA, 1341 bp, Corynebacterium diphtheriae NCTC 13129; identical to SEQ ID NO: 31461
  CDS (1)..(1341): transl_table=11

SEQ ID NO: 63113 - protein, 446 aa, Corynebacterium diphtheriae NCTC 13129; identical to SEQ ID NO: 31462

SEQ ID NO: 63114 - DNA, 996 bp, Rhodopseudomonas palustris CGA009; identical to SEQ ID NO: 31463
  CDS (1)..(996): transl_table=11

SEQ ID NO: 63115 - protein, 331 aa, Rhodopseudomonas palustris CGA009; identical to SEQ ID NO: 31464

SEQ ID NO: 63116 - DNA, 1209 bp, Geobacter sulfurreducens PCA; identical to SEQ ID NO: 31465
  CDS (1)..(1209): transl_table=11

SEQ ID NO: 63117 - protein, 402 aa, Geobacter sulfurreducens PCA; identical to SEQ ID NO: 31466

SEQ ID NO: 63118 - DNA, 1212 bp, Bdellovibrio bacteriovorus HD100; identical to SEQ ID NO: 31467
  CDS (1)..(1212): transl_table=11

SEQ ID NO: 63119 - protein, 403 aa, Bdellovibrio bacteriovorus HD100; identical to SEQ ID NO: 31468

SEQ ID NO: 63120 - DNA, 1227 bp, Mycoplasma mycoides subsp. mycoides SC str. PG1; identical to SEQ ID NO: 31469
  CDS (1)..(1227): transl_table=4

SEQ ID NO: 63121 - protein, 408 aa, Mycoplasma mycoides subsp. mycoides SC str. PG1; identical to SEQ ID NO: 31470

SEQ ID NO: 63122 - DNA, 1683 bp, Eremothecium gossypii; identical to SEQ ID NO: 31471
  CDS (1)..(1683)

SEQ ID NO: 63123 - protein, 560 aa, Eremothecium gossypii; identical to SEQ ID NO: 31472

SEQ ID NO: 63124 - DNA, 990 bp, Yersinia pestis biovar Medievalis str. 91001; identical to SEQ ID NO: 31473
  CDS (1)..(990): transl_table=11

SEQ ID NO: 63125 - protein, 329 aa, Yersinia pestis biovar Medievalis str. 91001; identical to SEQ ID NO: 31474

SEQ ID NO: 63126 - DNA, 1380 bp, Anopheles gambiae str. PEST; identical to SEQ ID NO: 31475
  CDS (1)..(1380)

SEQ ID NO: 63127 - protein, 459 aa, Anopheles gambiae str. PEST; identical to SEQ ID NO: 31476

SEQ ID NO: 63128 - DNA, 1431 bp, Anopheles gambiae str. PEST; identical to SEQ ID NO: 31477
  CDS (1)..(1431)

SEQ ID NO: 63129 - protein, 476 aa, Anopheles gambiae str. PEST; identical to SEQ ID NO: 31478

SEQ ID NO: 63130 - DNA, 1167 bp, Neurospora crassa; identical to SEQ ID NO: 31479
  CDS (1)..(1167)

SEQ ID NO: 63131 - protein, 388 aa, Neurospora crassa; identical to SEQ ID NO: 31480

SEQ ID NO: 63132 - DNA, 1773 bp, Neurospora crassa; identical to SEQ ID NO: 31481
  CDS (1)..(1773)

SEQ ID NO: 63133 - protein, 590 aa, Neurospora crassa; identical to SEQ ID NO: 31482

SEQ ID NO: 63134 - DNA, 1467 bp, Rattus norvegicus; identical to SEQ ID NO: 31483
  CDS (1)..(1467)

SEQ ID NO: 63135 - protein, 488 aa, Rattus norvegicus; identical to SEQ ID NO: 31484

SEQ ID NO: 63136 - DNA, 1212 bp, Magnaporthe grisea 70-15; identical to SEQ ID NO: 31485
  CDS (1)..(1212)

SEQ ID NO: 63137 - protein, 403 aa, Magnaporthe grisea 70-15; identical to SEQ ID NO: 31486

SEQ ID NO: 63138 - DNA, 1857 bp, Magnaporthe grisea 70-15; identical to SEQ ID NO: 31487
  CDS (1)..(1857)

SEQ ID NO: 63139 - protein, 618 aa, Magnaporthe grisea 70-15; identical to SEQ ID NO: 31488

SEQ ID NO: 63140 - DNA, 1035 bp, Magnaporthe grisea 70-15; identical to SEQ ID NO: 31489
  CDS (1)..(1035)

SEQ ID NO: 63141 - protein, 344 aa, Magnaporthe grisea 70-15; identical to SEQ ID NO: 31490

SEQ ID NO: 63142 - DNA, 1746 bp, Gibberella zeae PH-1; identical to SEQ ID NO: 31491
  CDS (1)..(1746)

SEQ ID NO: 63143 - protein, 581 aa, Gibberella zeae PH-1; identical to SEQ ID NO: 31492

SEQ ID NO: 63144 - DNA, 1098 bp, Gibberella zeae PH-1; identical to SEQ ID NO: 31493
  CDS (1)..(1098)

SEQ ID NO: 63145 - protein, 365 aa, Gibberella zeae PH-1; identical to SEQ ID NO: 31494

SEQ ID NO: 63146 - DNA, 1026 bp, Gibberella zeae PH-1; identical to SEQ ID NO: 31495
  CDS (1)..(1026)

SEQ ID NO: 63147 - protein, 341 aa, Gibberella zeae PH-1; identical to SEQ ID NO: 31496

SEQ ID NO: 63148 - DNA, 1197 bp, Gibberella zeae PH-1; identical to SEQ ID NO: 31497
  CDS (1)..(1197)

SEQ ID NO: 63149 - protein, 398 aa, Gibberella zeae PH-1; identical to SEQ ID NO: 31498

SEQ ID NO: 63150 - DNA, 2019 bp, Ustilago maydis 521; identical to SEQ ID NO: 31499
  CDS (1)..(2019)

SEQ ID NO: 63151 - protein, 672 aa, Ustilago maydis 521; identical to SEQ ID NO: 31500

SEQ ID NO: 63152 - DNA, 1131 bp, Ustilago maydis 521; identical to SEQ ID NO: 31501
  CDS (1)..(1131)

SEQ ID NO: 63153 - protein, 376 aa, Ustilago maydis 521; identical to SEQ ID NO: 31502

SEQ ID NO: 63154 - DNA, 1086 bp, Aspergillus nidulans FGSC A4; identical to SEQ ID NO: 31503
  CDS (1)..(1086)

SEQ ID NO: 63155 - protein, 361 aa, Aspergillus nidulans FGSC A4; identical to SEQ ID NO: 31504

SEQ ID NO: 63156 - DNA, 1764 bp, Aspergillus nidulans FGSC A4; identical to SEQ ID NO: 31505
  CDS (1)..(1764)

SEQ ID NO: 63157 - protein, 587 aa, Aspergillus nidulans FGSC A4; identical to SEQ ID NO: 31506

SEQ ID NO: 63158 - DNA, 1278 bp, Aspergillus nidulans FGSC A4; identical to SEQ ID NO: 31507
  CDS (1)..(1278)

SEQ ID NO: 63159 - protein, 425 aa, Aspergillus nidulans FGSC A4; identical to SEQ ID NO: 31508

SEQ ID NO: 63160 - DNA, 2076 bp, Gallus gallus; identical to SEQ ID NO: 31509
  CDS (1)..(2076)

SEQ ID NO: 63161 - protein, 691 aa, Gallus gallus; identical to SEQ ID NO: 31510

SEQ ID NO: 63162 - DNA, 1083 bp, Candida glabrata CBS138; identical to SEQ ID NO: 31511
  CDS (1)..(1083)

SEQ ID NO: 63163 - protein, 360 aa, Candida glabrata CBS138; identical to SEQ ID NO: 31512

SEQ ID NO: 63164 - DNA, 1716 bp, Candida glabrata CBS138; identical to SEQ ID NO: 31513
  CDS (1)..(1716)

SEQ ID NO: 63165 - protein, 571 aa, Candida glabrata CBS138; identical to SEQ ID NO: 31514

SEQ ID NO: 63166 - DNA, 1134 bp, Kluyveromyces lactis NRRL Y-1140; identical to SEQ ID NO: 31515
  CDS (1)..(1134)

SEQ ID NO: 63167 - protein, 377 aa, Kluyveromyces lactis NRRL Y-1140; identical to SEQ ID NO: 31516

SEQ ID NO: 63168 - DNA, 1704 bp, Kluyveromyces lactis NRRL Y-1140; identical to SEQ ID NO: 31517
  CDS (1)..(1704)

SEQ ID NO: 63169 - protein, 567 aa, Kluyveromyces lactis NRRL Y-1140; identical to SEQ ID NO: 31518

SEQ ID NO: 63170 - DNA, 1719 bp, Debaryomyces hansenii CBS767; identical to SEQ ID NO: 31519
  CDS (1)..(1719)

SEQ ID NO: 63171 - protein, 572 aa, Debaryomyces hansenii CBS767; identical to SEQ ID NO: 31520

SEQ ID NO: 63172 - DNA, 1809 bp, Oryza sativa (japonica cultivar-group); identical to SEQ ID NO: 31521
  CDS (1)..(1809)

SEQ ID NO: 63173 - protein, 602 aa, Oryza sativa (japonica cultivar-group); identical to SEQ ID NO: 31522

SEQ ID NO: 63174 - DNA, 1020 bp, Oryza sativa (japonica cultivar-group); identical to SEQ ID NO: 31523
  CDS (1)..(1020)

SEQ ID NO: 63175 - protein, 339 aa, Oryza sativa (japonica cultivar-group) [sequence omitted]

SEQ ID NO: 63176 - DNA, 972 bp, Yarrowia lipolytica CLIB99; identical to SEQ ID NO: 31525
  CDS (1)..(972)

SEQ ID NO: 63177 - protein, 323 aa, Yarrowia lipolytica CLIB99; identical to SEQ ID NO: 31526

SEQ ID NO: 63178 - DNA, 1590 bp, Yarrowia lipolytica CLIB99; identical to SEQ ID NO: 31527
  CDS (1)..(1590)

SEQ ID NO: 63179 - protein, 529 aa, Yarrowia lipolytica CLIB99; identical to SEQ ID NO: 31528

SEQ ID NO: 63180 - DNA, 990 bp, Yarrowia lipolytica CLIB99; identical to SEQ ID NO: 31529
  CDS (1)..(990)

SEQ ID NO: 63181 - protein, 329 aa, Yarrowia lipolytica CLIB99; identical to SEQ ID NO: 31530

SEQ ID NO: 63182 - DNA, 1179 bp, Canis familiaris; identical to SEQ ID NO: 31531
  CDS (1)..(1179)

SEQ ID NO: 63183 - protein, 392 aa, Canis familiaris; identical to SEQ ID NO: 31532

SEQ ID NO: 63184 - DNA, 936 bp, Thermus thermophilus HB27; identical to SEQ ID NO: 31533
  CDS (1)..(936): transl_table=11

SEQ ID NO: 63185 - protein, 311 aa, Thermus thermophilus HB27; identical to SEQ ID NO: 31534

SEQ ID NO: 63186 - DNA, 1269 bp, Listeria monocytogenes str. 4b F2365; identical to SEQ ID NO: 31535
  CDS (1)..(1269): transl_table=11

SEQ ID NO: 63187 - protein, 422 aa, Listeria monocytogenes str. 4b F2365; identical to SEQ ID NO: 31536

SEQ ID NO: 63188 - DNA, 1206 bp, Picrophilus torridus DSM 9790; identical to SEQ ID NO: 31537
  CDS (1)..(1206): transl_table=11

SEQ ID NO: 63189 - protein, 401 aa, Picrophilus torridus DSM 9790; identical to SEQ ID NO: 31538

SEQ ID NO: 63190 - DNA, 1149 bp, Picrophilus torridus DSM 9790; identical to SEQ ID NO: 31539
  CDS (1)..(1149): transl_table=11

SEQ ID NO: 63191 - protein, 382 aa, Picrophilus torridus DSM 9790; identical to SEQ ID NO: 31540

SEQ ID NO: 63192 - DNA, 1266 bp, Bartonella henselae str. Houston-1; identical to SEQ ID NO: 31541
  CDS (1)..(1266): transl_table=11

SEQ ID NO: 63193 - protein, 421 aa, Bartonella henselae str. Houston-1; identical to SEQ ID NO: 31542

SEQ ID NO: 63194 - DNA, 1539 bp, Acinetobacter sp. ADP1; identical to SEQ ID NO: 31543
  CDS (1)..(1539): transl_table=11

SEQ ID NO: 63195 - protein, 512 aa, Acinetobacter sp. ADP1; identical to SEQ ID NO: 31544

SEQ ID NO: 63196 - DNA, 1005 bp, Erwinia carotovora subsp. atroseptica SCRI1043; identical to SEQ ID NO: 31545
  CDS (1)..(1005)

SEQ ID NO: 63197 - protein, 334 aa, Erwinia carotovora subsp. atroseptica SCRI1043; identical to SEQ ID NO: 31546

SEQ ID NO: 63198 - DNA, 975 bp, Erwinia carotovora subsp. atroseptica SCRI1043; identical to SEQ ID NO: 31547
  CDS (1)..(975)

SEQ ID NO: 63199 - protein, 324 aa, Erwinia carotovora subsp. atroseptica SCRI1043; identical to SEQ ID NO: 31548

SEQ ID NO: 63200 - DNA, 1551 bp, Erwinia carotovora subsp. atroseptica SCRI1043; identical to SEQ ID NO: 31549
  CDS (1)..(1551)

SEQ ID NO: 63201 - protein, 516 aa, Erwinia carotovora subsp. atroseptica SCRI1043; identical to SEQ ID NO: 31550

SEQ ID NO: 63202 - DNA, 1251 bp, Leifsonia xyli subsp. xyli str. CTCB07; identical to SEQ ID NO: 31551
  CDS (1)..(1251): transl_table=11

SEQ ID NO: 63203 - protein, 416 aa, Leifsonia xyli subsp. xyli str. CTCB07; identical to SEQ ID NO: 31552

SEQ ID NO: 63204 - DNA, 1506 bp, Desulfotalea psychrophila LSv54; identical to SEQ ID NO: 31553
  CDS (1)..(1506): transl_table=11

SEQ ID NO: 63205 - protein, 501 aa, Desulfotalea psychrophila LSv54; identical to SEQ ID NO: 31554

SEQ ID NO: 63206 - DNA, 1002 bp, Rickettsia typhi str. Wilmington; identical to SEQ ID NO: 31555
  CDS (1)..(1002): transl_table=11

SEQ ID NO: 63207 - protein, 333 aa, Rickettsia typhi str. Wilmington; identical to SEQ ID NO: 31556

SEQ ID NO: 63208 - DNA, 963 bp, Yersinia pseudotuberculosis IP 32953; identical to SEQ ID NO: 31557
  CDS (1)..(963): transl_table=11

SEQ ID NO: 63209 - protein, 320 aa, Yersinia pseudotuberculosis IP 32953; identical to SEQ ID NO: 31558

SEQ ID NO: 63210 - DNA, 1200 bp, Symbiobacterium thermophilum IAM 14863; identical to SEQ ID NO: 31559
  CDS (1)..(1200): transl_table=11

SEQ ID NO: 63211 - protein, 399 aa, Symbiobacterium thermophilum IAM 14863; identical to SEQ ID NO: 31560

SEQ ID NO: 63212 - DNA, 1233 bp, Symbiobacterium thermophilum IAM 14863; identical to SEQ ID NO: 31561
  CDS (1)..(1233): transl_table=11

SEQ ID NO: 63213 - protein, 410 aa, Symbiobacterium thermophilum IAM 14863; identical to SEQ ID NO: 31562

SEQ ID NO: 63214 - DNA, 1263 bp, Bacillus cereus ZK; identical to SEQ ID NO: 31563
  CDS (1)..(1263): transl_table=11

SEQ ID NO: 63215 - protein, 420 aa, Bacillus cereus ZK; identical to SEQ ID NO: 31564

SEQ ID NO: 63216 - DNA, 1539 bp, Mannheimia succiniciproducens MBEL55E; identical to SEQ ID NO: 31565
  CDS (1)..(1539): transl_table=11

SEQ ID NO: 63217 - protein, 512 aa, Mannheimia succiniciproducens MBEL55E; identical to SEQ ID NO: 31566

SEQ ID NO: 63218 - DNA, 1269 bp, Bacillus licheniformis ATCC 14580; identical to SEQ ID NO: 31567
  CDS (1)..(1269): transl_table=11

SEQ ID NO: 63219 - protein, 422 aa, Bacillus licheniformis ATCC 14580; identical to SEQ ID NO: 31568

SEQ ID NO: 63220 - DNA, 1056 bp, Burkholderia mallei ATCC 23344; identical to SEQ ID NO: 31569
  CDS (1)..(1056): transl_table=11

SEQ ID NO: 63221 - protein, 351 aa, Burkholderia mallei ATCC 23344; identical to SEQ ID NO: 31570

SEQ ID NO: 63222 - DNA, 1524 bp, Burkholderia pseudomallei K96243; identical to SEQ ID NO: 31571
  CDS (1)..(1524): transl_table=11

SEQ ID NO: 63223 - protein, 507 aa, Burkholderia pseudomallei K96243; identical to SEQ ID NO: 31572

SEQ ID NO: 63224 - DNA, 984 bp, Burkholderia pseudomallei K96243; identical to SEQ ID NO: 31573
  CDS (1)..(984): transl_table=11

SEQ ID NO: 63225 - protein, 327 aa, Burkholderia pseudomallei K96243; identical to SEQ ID NO: 31574

SEQ ID NO: 63226 - DNA, 1530 bp, Methylococcus capsulatus str. Bath; identical to SEQ ID NO: 31575
  CDS (1)..(1530): transl_table=11

SEQ ID NO: 63227 - protein, 509 aa, Methylococcus capsulatus str. Bath; identical to SEQ ID NO: 31576

SEQ ID NO: 63228 - DNA, 963 bp, Nocardia farcinica IFM 10152; identical to SEQ ID NO: 31577
  CDS (1)..(963): transl_table=11

SEQ ID NO: 63229 - protein, 320 aa, Nocardia farcinica IFM 10152; identical to SEQ ID NO: 31578

SEQ ID NO: 63230 - DNA, 1356 bp, Nocardia farcinica IFM 10152; identical to SEQ ID NO: 31579
  CDS (1)..(1356): transl_table=11

SEQ ID NO: 63231 - protein, 451 aa, Nocardia farcinica IFM 10152; identical to SEQ ID NO: 31580

SEQ ID NO: 63232 - DNA, 936 bp, Nocardia farcinica IFM 10152; identical to SEQ ID NO: 31581
  CDS (1)..(936): transl_table=11

SEQ ID NO: 63233 - protein, 311 aa, Nocardia farcinica IFM 10152; identical to SEQ ID NO: 31582

SEQ ID NO: 63234 - DNA, 1554 bp, Photobacterium profundum SS9; identical to SEQ ID NO: 31583
  CDS (1)..(1554): transl_table=11

SEQ ID NO: 63235 - protein, 517 aa, Photobacterium profundum SS9; identical to SEQ ID NO: 31584

SEQ ID NO: 63236 - DNA, 1260 bp, Haloarcula marismortui ATCC 43049; identical to SEQ ID NO: 31585
  CDS (1)..(1260): transl_table=11

SEQ ID NO: 63237 - protein, 419 aa, Haloarcula marismortui ATCC 43049; identical to SEQ ID NO: 31586

SEQ ID NO: 63238 - DNA, 1263 bp, Haloarcula marismortui ATCC 43049; identical to SEQ ID NO: 31587
  CDS (1)..(1263): transl_table=11

SEQ ID NO: 63239 - protein, 420 aa, Haloarcula marismortui ATCC 43049; identical to SEQ ID NO: 31588

SEQ ID NO: 63240 - DNA, 1029 bp, Haloarcula marismortui ATCC 43049; identical to SEQ ID NO: 31589
  CDS (1)..(1029): transl_table=11

SEQ ID NO: 63241 - protein, 342 aa, Haloarcula marismortui ATCC 43049; identical to SEQ ID NO: 31590

SEQ ID NO: 63242 - DNA, 1212 bp, Haloarcula marismortui ATCC 43049; identical to SEQ ID NO: 31591
  CDS (1)..(1212): transl_table=11

SEQ ID NO: 63243 - protein, 403 aa, Haloarcula marismortui ATCC 43049; identical to SEQ ID NO: 31592

SEQ ID NO: 63244 - DNA, 1251 bp, Streptococcus thermophilus CNRZ1066; identical to SEQ ID NO: 31593
  CDS (1)..(1251): transl_table=11

SEQ ID NO: 63245 - protein, 416 aa, Streptococcus thermophilus CNRZ1066; identical to SEQ ID NO: 31594

SEQ ID NO: 63246 - DNA, 936 bp, Thermus thermophilus HB8; identical to SEQ ID NO: 31595
  CDS (1)..(936): transl_table=11

SEQ ID NO: 63247 - protein, 311 aa, Thermus thermophilus HB8; identical to SEQ ID NO: 31596

SEQ ID NO: 63248 - DNA, 1209 bp, Geobacillus kaustophilus HTA426; identical to SEQ ID NO: 31597
  CDS (1)..(1209): transl_table=11

SEQ ID NO: 63249 - protein, 402 aa, Geobacillus kaustophilus HTA426; identical to SEQ ID NO: 31598

SEQ ID NO: 63250 - DNA, 1272 bp, Geobacillus kaustophilus HTA426; identical to SEQ ID NO: 31599
  CDS (1)..(1272): transl_table=11

SEQ ID NO: 63251 - protein, 423 aa, Geobacillus kaustophilus HTA426; identical to SEQ ID NO: 31600

SEQ ID NO: 63252 - DNA, 960 bp, Idiomarina loihiensis L2TR; identical to SEQ ID NO: 31601
  CDS (1)..(960): transl_table=11

SEQ ID NO: 63253 - protein, 319 aa, Idiomarina loihiensis L2TR; identical to SEQ ID NO: 31602

SEQ ID NO: 63254 - DNA, 1521 bp, Azoarcus sp. EbN1; identical to SEQ ID NO: 31603
  CDS (1)..(1521): transl_table=11

SEQ ID NO: 63255 - protein, 506 aa, Azoarcus sp. EbN1; identical to SEQ ID NO: 31604

SEQ ID NO: 63256 - DNA, 1242 bp, Azoarcus sp. EbN1; identical to SEQ ID NO: 31605
  CDS (1)..(1242): transl_table=11

SEQ ID NO: 63257 - protein, 413 aa, Azoarcus sp. EbN1; identical to SEQ ID NO: 31606

SEQ ID NO: 63258 - DNA, 1239 bp, Zymomonas mobilis subsp. mobilis ZM4; identical to SEQ ID NO: 31607
  CDS (1)..(1239): transl_table=11

SEQ ID NO: 63259 - protein, 412 aa, Zymomonas mobilis subsp. mobilis ZM4; identical to SEQ ID NO: 31608

SEQ ID NO: 63260 - DNA, 954 bp, Silicibacter pomeroyi DSS-3; identical to SEQ ID NO: 31609
  CDS (1)..(954): transl_table=11

SEQ ID NO: 63261 - protein, 317 aa, Silicibacter pomeroyi DSS-3; identical to SEQ ID NO: 31610

SEQ ID NO: 63262 - DNA, 975 bp, Silicibacter pomeroyi DSS-3; identical to SEQ ID NO: 31611
  CDS (1)..(975): transl_table=11

SEQ ID NO: 63263 - protein, 324 aa, Silicibacter pomeroyi DSS-3; identical to SEQ ID NO: 31612

SEQ ID NO: 63264 - DNA, 1227 bp, Silicibacter pomeroyi DSS-3; identical to SEQ ID NO: 31613
  CDS (1)..(1227): transl_table=11

SEQ ID NO: 63265 - protein, 408 aa, Silicibacter pomeroyi DSS-3; identical to SEQ ID NO: 31614

SEQ ID NO: 63266 - DNA, 1008 bp, Silicibacter pomeroyi DSS-3; identical to SEQ ID NO: 31615
  CDS (1)..(1008): transl_table=11

SEQ ID NO: 63267 - protein, 335 aa, Silicibacter pomeroyi DSS-3; identical to SEQ ID NO: 31616

SEQ ID NO: 63268 - DNA, 921 bp, Silicibacter pomeroyi DSS-3; identical to SEQ ID NO: 31617
  CDS (1)..(921): transl_table=11

SEQ ID NO: 63269 - protein, 306 aa, Silicibacter pomeroyi DSS-3; identical to SEQ ID NO: 31618

SEQ ID NO: 63270 - DNA, 969 bp, Bacillus clausii KSM-K16; identical to SEQ ID NO: 31619
  CDS (1)..(969): transl_table=11

SEQ ID NO: 63271 - protein, 322 aa, Bacillus clausii KSM-K16; identical to SEQ ID NO: 31620

SEQ ID NO: 63272 - DNA, 1245 bp, Bacillus clausii KSM-K16; identical to SEQ ID NO: 31621
  CDS (1)..(1245): transl_table=11

SEQ ID NO: 63273 - protein, 414 aa, Bacillus clausii KSM-K16; identical to SEQ ID NO: 31622

SEQ ID NO: 63274 - DNA, 1071 bp, Bacillus clausii KSM-K16; identical to SEQ ID NO: 31623
  CDS (1)..(1071): transl_table=11

SEQ ID NO: 63275 - protein, 356 aa, Bacillus clausii KSM-K16; identical to SEQ ID NO: 31624

SEQ ID NO: 63276 - DNA, 978 bp, Rhodobacter sphaeroides 2.4.1; identical to SEQ ID NO: 31625
  CDS (1)..(978)

SEQ ID NO: 63277 - protein, 325 aa, Rhodobacter sphaeroides 2.4.1; identical to SEQ ID NO: 31626

SEQ ID NO: 63278 - DNA, 1053 bp, Xylella fastidiosa Dixon; identical to SEQ ID NO: 31627
  CDS (1)..(1053)

SEQ ID NO: 63279 - protein, 350 aa, Xylella fastidiosa Dixon; identical to SEQ ID NO: 31628

SEQ ID NO: 63280 - DNA, 1266 bp, Leuconostoc mesenteroides subsp. mesenteroides ATCC 8293; identical to SEQ ID NO: 31629
  CDS (1)..(1266)

SEQ ID NO: 63281 - protein, 421 aa, Leuconostoc mesenteroides subsp. mesenteroides ATCC 8293; identical to SEQ ID NO: 31630

SEQ ID NO: 63282 - DNA, 1515 bp, Azotobacter vinelandii; identical to SEQ ID NO: 31631
  CDS (1)..(1515)

SEQ ID NO: 63283 - protein, 504 aa, Azotobacter vinelandii; identical to SEQ ID NO: 31632

SEQ ID NO: 63284 - DNA, 1110 bp, Desulfitobacterium hafniense DCB-2; identical to SEQ ID NO: 31633
  CDS (1)..(1110)

SEQ ID NO: 63285 - protein, 369 aa, Desulfitobacterium hafniense DCB-2; identical to SEQ ID NO: 31634

SEQ ID NO: 63286 - DNA, 975 bp, Nostoc punctiforme PCC 73102; identical to SEQ ID NO: 31635
  CDS (1)..(975)

SEQ ID NO: 63287 - protein, 324 aa, Nostoc punctiforme PCC 73102; identical to SEQ ID NO: 31636

SEQ ID NO: 63288 - DNA, 1338 bp, Nostoc punctiforme PCC 73102; identical to SEQ ID NO: 31637
  CDS (1)..(1338)

SEQ ID NO: 63289 - protein, 445 aa, Nostoc punctiforme PCC 73102; identical to SEQ ID NO: 31638

SEQ ID NO: 63290 - DNA, 1266 bp, Bifidobacterium longum DJO10A; identical to SEQ ID NO: 31639
  CDS (1)..(1266)

SEQ ID NO: 63291 - protein, 421 aa, Bifidobacterium longum DJO10A; identical to SEQ ID NO: 31640

SEQ ID NO: 63292 - DNA, 1548 bp, Haemophilus somnus 2336; identical to SEQ ID NO: 31641
  CDS (1)..(1548)

SEQ ID NO: 63293 - protein, 515 aa, Haemophilus somnus 2336; identical to SEQ ID NO: 31642

SEQ ID NO: 63294 - DNA, 1527 bp, Actinobacillus pleuropneumoniae serovar 1 str. 4074; identical to SEQ ID NO: 31643
  CDS (1)..(1527)

SEQ ID NO: 63295 - protein, 508 aa, Actinobacillus pleuropneumoniae serovar 1 str. 4074; identical to SEQ ID NO: 31644

SEQ ID NO: 63296 - DNA, 846 bp, Pseudomonas aeruginosa UCBPP-PA14; identical to SEQ ID NO: 31645
  CDS (1)..(846)

SEQ ID NO: 63297 - protein, 281 aa, Pseudomonas aeruginosa UCBPP-PA14; identical to SEQ ID NO: 31646

SEQ ID NO: 63298 - DNA, 1515 bp, Pseudomonas aeruginosa UCBPP-PA14; identical to SEQ ID NO: 31647
  CDS (1)..(1515)

SEQ ID NO: 63299 - protein, 504 aa, Pseudomonas aeruginosa UCBPP-PA14; identical to SEQ ID NO: 31648

SEQ ID NO: 63300 - DNA, 981 bp, Psychrobacter sp. 273-4; identical to SEQ ID NO: 31649
  CDS (1)..(981)

SEQ ID NO: 63301 - protein, 326 aa, Psychrobacter sp. 273-4; identical to SEQ ID NO: 31650

SEQ ID NO: 63302 - DNA, 1554 bp, Psychrobacter sp. 273-4; identical to SEQ ID NO: 31651
  CDS (1)..(1554)

SEQ ID NO: 63303 - protein, 517 aa, Psychrobacter sp. 273-4; identical to SEQ ID NO: 31652

SEQ ID NO: 63304 - DNA, 1533 bp, Dechloromonas aromatica RCB; identical to SEQ ID NO: 31653
  CDS (1)..(1533)

SEQ ID NO: 63305 - protein, 510 aa, Dechloromonas aromatica RCB; identical to SEQ ID NO: 31654

SEQ ID NO: 63306 - DNA, 1542 bp, Haemophilus influenzae R2866; identical to SEQ ID NO: 31655
  CDS (1)..(1542)

SEQ ID NO: 63307 - protein, 513 aa, Haemophilus influenzae R2866; identical to SEQ ID NO: 31656

SEQ ID NO: 63308 - DNA, 1512 bp, Anabaena variabilis ATCC 29413; identical to SEQ ID NO: 31657
  CDS (1)..(1512)

SEQ ID NO: 63309 - protein, 503 aa, Anabaena variabilis ATCC 29413; identical to SEQ ID NO: 31658

SEQ ID NO: 63310 - DNA, 969 bp, Ralstonia eutropha JMP134; identical to SEQ ID NO: 31659
  CDS (1)..(969)

SEQ ID NO: 63311 - protein, 322 aa, Ralstonia eutropha JMP134; identical to SEQ ID NO: 31660

SEQ ID NO: 63312 - DNA, 1512 bp, Methylobacillus flagellatus KT; identical to SEQ ID NO: 31661
  CDS (1)..(1512)

SEQ ID NO: 63313 - protein, 503 aa, Methylobacillus flagellatus KT; identical to SEQ ID NO: 31662

SEQ ID NO: 63314 - DNA, 948 bp, Mesorhizobium sp. BNC1; identical to SEQ ID NO: 31663
  CDS (1)..(948)

SEQ ID NO: 63315 - protein, 315 aa, Mesorhizobium sp. BNC1; identical to SEQ ID NO: 31664

SEQ ID NO: 63316 - DNA, 975 bp, Mesorhizobium sp. BNC1; identical to SEQ ID NO: 31665
  CDS (1)..(975)

SEQ ID NO: 63317 - protein, 324 aa, Mesorhizobium sp. BNC1; identical to SEQ ID NO: 31666

SEQ ID NO: 63318 - DNA, 1560 bp, Ralstonia eutropha JMP134; identical to SEQ ID NO: 31667
  CDS (1)..(1560)

SEQ ID NO: 63319 - protein, 519 aa, Ralstonia eutropha JMP134; identical to SEQ ID NO: 31668

SEQ ID NO: 63320 - DNA, 990 bp, Anabaena variabilis ATCC 29413; identical to SEQ ID NO: 31669
  CDS (1)..(990)

SEQ ID NO: 63321 - protein, 329 aa, Anabaena variabilis ATCC 29413; identical to SEQ ID NO: 31670

SEQ ID NO: 63322 - DNA, 1524 bp, Burkholderia cepacia R18194; identical to SEQ ID NO: 31671
  CDS (1)..(1524)

SEQ ID NO: 63323 - protein, 507 aa, Burkholderia cepacia R18194; identical to SEQ ID NO: 31672

SEQ ID NO: 63324 - DNA, 921 bp, Burkholderia cepacia R18194; identical to SEQ ID NO: 31673
  CDS (1)..(921)

SEQ ID NO: 63325 - protein, 306 aa, Burkholderia cepacia R18194; identical to SEQ ID NO: 31674

SEQ ID NO: 63326 - DNA, 1044 bp, Burkholderia cepacia R1808; identical to SEQ ID NO: 31675
  misc_feature (977)..(977): n is a, c, g, or t
  CDS (1)..(1044)

SEQ ID NO: 63327 - protein, 347 aa, Burkholderia cepacia R1808; identical to SEQ ID NO: 31676
  misc_feature (326)..(326): Xaa can be any naturally occuring amino acid

SEQ ID NO: 63328 - DNA, 921 bp, Burkholderia cepacia R1808; identical to SEQ ID NO: 31677
  CDS (1)..(921)

SEQ ID NO: 63329 - protein, 306 aa, Burkholderia cepacia R1808; identical to SEQ ID NO: 31678

SEQ ID NO: 63330 - DNA, 978 bp, Burkholderia cepacia R1808; identical to SEQ ID NO: 31679
  CDS (1)..(978)

SEQ ID NO: 63331 - protein, 325 aa, Burkholderia cepacia R1808; identical to SEQ ID NO: 31680

SEQ ID NO: 63332 - DNA, 1056 bp, Listeria monocytogenes str. 1/2a F6854; identical to SEQ ID NO: 31681
  CDS (1)..(1056): transl_table=11

SEQ ID NO: 63333 - protein, 351 aa, Listeria monocytogenes str. 1/2a F6854; identical to SEQ ID NO: 31682

SEQ ID NO: 63334 - DNA, 1581 bp, Rubrivivax gelatinosus PM1; identical to SEQ ID NO: 31683
  CDS (1)..(1581)

SEQ ID NO: 63335 - protein, 526 aa, Rubrivivax gelatinosus PM1; identical to SEQ ID NO: 31684

SEQ ID NO: 63336 - DNA, 1239 bp, Rubrivivax gelatinosus PM1; identical to SEQ ID NO: 31685
  CDS (1)..(1239)

SEQ ID NO: 63337 - protein, 412 aa, Rubrivivax gelatinosus PM1; identical to SEQ ID NO: 31686

SEQ ID NO: 63338 - DNA, 1515 bp, Pseudomonas fluorescens PfO-1; identical to SEQ ID NO: 31687
  CDS (1)..(1515)

SEQ ID NO: 63339 - protein, 504 aa, Pseudomonas fluorescens PfO-1; identical to SEQ ID NO: 31688

SEQ ID NO: 63340 - DNA, 957 bp, Pseudomonas fluorescens PfO-1; identical to SEQ ID NO: 31689
  CDS (1)..(957)

SEQ ID NO: 63341 - protein, 318 aa, Pseudomonas fluorescens PfO-1; identical to SEQ ID NO: 31690

SEQ ID NO: 63342 - DNA, 918 bp, Pseudomonas fluorescens PfO-1; identical to SEQ ID NO: 31691
  CDS (1)..(918)

SEQ ID NO: 63343 - protein, 305 aa, Pseudomonas fluorescens PfO-1; identical to SEQ ID NO: 31692

SEQ ID NO: 63344 - DNA, 993 bp, Rhodospirillum rubrum; identical to SEQ ID NO: 31693
  CDS (1)..(993)

SEQ ID NO: 63345 - protein, 330 aa, Rhodospirillum rubrum; identical to SEQ ID NO: 31694

SEQ ID NO: 63346 - DNA, 1269 bp, Rhodospirillum rubrum; identical to SEQ ID NO: 31695
  CDS (1)..(1269)

SEQ ID NO: 63347 - protein, 422 aa, Rhodospirillum rubrum; identical to SEQ ID NO: 31696

SEQ ID NO: 63348 - DNA, 1536 bp, Ralstonia metallidurans CH34; identical to SEQ ID NO: 31697
  CDS (1)..(1536)

SEQ ID NO: 63349 - protein, 511 aa, Ralstonia metallidurans CH34; identical to SEQ ID NO: 31698

SEQ ID NO: 63350 - DNA, 969 bp, Ralstonia metallidurans CH34; identical to SEQ ID NO: 31699
  CDS (1)..(969)

SEQ ID NO: 63351 - protein, 322 aa, Ralstonia metallidurans CH34; identical to SEQ ID NO: 31700

SEQ ID NO: 63352 - DNA, 966 bp, Burkholderia fungorum LB400; identical to SEQ ID NO: 31701
  CDS (1)..(966)

SEQ ID NO: 63353 - protein, 321 aa, Burkholderia fungorum LB400; identical to SEQ ID NO: 31702

SEQ ID NO: 63354 - DNA, 1035 bp, Burkholderia fungorum LB400; identical to SEQ ID NO: 31703
  CDS (1)..(1035)

SEQ ID NO: 63355 - protein, 344 aa, Burkholderia fungorum LB400; identical to SEQ ID NO: 31704

SEQ ID NO: 63356 - DNA, 1512 bp, Magnetococcus sp. MC-1; identical to SEQ ID NO: 31705
  CDS (1)..(1512)

SEQ ID NO: 63357 - protein, 503 aa, Magnetococcus sp. MC-1; identical to SEQ ID NO: 31706

SEQ ID NO: 63358 - DNA, 933 bp, Thermobifida fusca; identical to SEQ ID NO: 31707
  CDS (1)..(933)

SEQ ID NO: 63359 - protein, 310 aa, Thermobifida fusca; identical to SEQ ID NO: 31708

SEQ ID NO: 63360 - DNA, 1266 bp, Novosphingobium aromaticivorans DSM 12444; identical to SEQ ID NO: 31709
  CDS (1)..(1266)

SEQ ID NO: 63361 - protein, 421 aa, Novosphingobium aromaticivorans DSM 12444; identical to SEQ ID NO: 31710

SEQ ID NO: 63362 - DNA, 1206 bp, Ferroplasma acidarmanus; identical to SEQ ID NO: 31711
  CDS (1)..(1206)

SEQ ID NO: 63363 - protein, 401 aa, Ferroplasma acidarmanus; identical to SEQ ID NO: 31712

SEQ ID NO: 63364 - DNA, 1254 bp, Cytophaga hutchinsonii; identical to SEQ ID NO: 31713
  CDS (1)..(1254)

SEQ ID NO: 63365 - protein, 417 aa, Cytophaga hutchinsonii; identical to SEQ ID NO: 31714

SEQ ID NO: 63366 - DNA, 1512 bp, Microbulbifer degradans 2-40; identical to SEQ ID NO: 31715
  CDS (1)..(1512)

SEQ ID NO: 63367 - protein, 503 aa, Microbulbifer degradans 2-40; identical to SEQ ID NO: 31716

SEQ ID NO: 63368 - DNA, 927 bp, Haemophilus influenzae 86-028NP; identical to SEQ ID NO: 31717
  CDS (1)..(927)

SEQ ID NO: 63369 - protein, 308 aa, Haemophilus influenzae 86-028NP; identical to SEQ ID NO: 31718

SEQ ID NO: 63370 - DNA, 1056 bp, Pediococcus pentosaceus ATCC 25745; identical to SEQ ID NO: 31719
  CDS (1)..(1056)

SEQ ID NO: 63371 - protein, 351 aa, Pediococcus pentosaceus ATCC 25745; identical to SEQ ID NO: 31720

SEQ ID NO: 63372 - DNA, 1245 bp, Moorella thermoacetica ATCC 39073; identical to SEQ ID NO: 31721
  CDS (1)..(1245)

SEQ ID NO: 63373 - protein, 414 aa, Moorella thermoacetica ATCC 39073; identical to SEQ ID NO: 31722

SEQ ID NO: 63374 - DNA, 1518 bp, Thiobacillus denitrificans ATCC 25259; identical to SEQ ID NO: 31723
  CDS (1)..(1518)

SEQ ID NO: 63375 - protein, 505 aa, Thiobacillus denitrificans ATCC 25259; identical to SEQ ID NO: 31724

SEQ ID NO: 63376 - DNA, 903 bp, Silicibacter sp. TM1040; identical to SEQ ID NO: 31725
  CDS (1)..(903)

SEQ ID NO: 63377 - protein, 300 aa, Silicibacter sp. TM1040; identical to SEQ ID NO: 31726

SEQ ID NO: 63378 - DNA, 966 bp, Silicibacter sp. TM1040; identical to SEQ ID NO: 31727
  CDS (1)..(966)

SEQ ID NO: 63379 - protein, 321 aa, Silicibacter sp. TM1040; identical to SEQ ID NO: 31728

SEQ ID NO: 63380 - DNA, 1284 bp, Silicibacter sp. TM1040; identical to SEQ ID NO: 31729
  CDS (1)..(1284)

SEQ ID NO: 63381 - protein, 427 aa, Silicibacter sp. TM1040; identical to SEQ ID NO: 31730

SEQ ID NO: 63382 - DNA, 1002 bp, Rickettsia akari str. Hartford; identical to SEQ ID NO: 31731
  CDS (1)..(1002)

SEQ ID NO: 63383 - protein, 333 aa, Rickettsia akari str. Hartford; identical to SEQ ID NO: 31732

SEQ ID NO: 63384 - DNA, 1236 bp, Chloroflexus aurantiacus; identical to SEQ ID NO: 31733
  CDS (1)..(1236)

SEQ ID NO: 63385 - protein, 411 aa, Chloroflexus aurantiacus; identical to SEQ ID NO: 31734

SEQ ID NO: 63386 - DNA, 993 bp, Chloroflexus aurantiacus; identical to SEQ ID NO: 31735
  CDS (1)..(993)

SEQ ID NO: 63387 - protein, 330 aa, Chloroflexus aurantiacus; identical to SEQ ID NO: 31736

SEQ ID NO: 63388 - DNA, 1518 bp, Chloroflexus aurantiacus; identical to SEQ ID NO: 31737
  CDS (1)..(1518)

SEQ ID NO: 63389 - protein, 505 aa, Chloroflexus aurantiacus; identical to SEQ ID NO: 31738

SEQ ID NO: 63390 - DNA, 975 bp, Polaromonas sp. JS666; identical to SEQ ID NO: 31739
  CDS (1)..(975)

SEQ ID NO: 63391 - protein, 324 aa, Polaromonas sp. JS666; identical to SEQ ID NO: 31740

SEQ ID NO: 63392 - DNA, 1647 bp, Polaromonas sp. JS666; identical to SEQ ID NO: 31741
  CDS (1)..(1647)

SEQ ID NO: 63393 - protein, 548 aa, Polaromonas sp. JS666; identical to SEQ ID NO: 31742

SEQ ID NO: 63394 - DNA, 1203 bp, Polaromonas sp. JS666; identical to SEQ ID NO: 31743
  CDS (1)..(1203)

SEQ ID NO: 63395 - protein, 400 aa, Polaromonas sp. JS666; identical to SEQ ID NO: 31744

SEQ ID NO: 63396 - DNA, 1008 bp, Polaromonas sp. JS666; identical to SEQ ID NO: 31745
  CDS (1)..(1008)

SEQ ID NO: 63397 - protein, 335 aa, Polaromonas sp. JS666; identical to SEQ ID NO: 31746

SEQ ID NO: 63398 - DNA, 942 bp, Polaromonas sp. JS666; identical to SEQ ID NO: 31747
  CDS (1)..(942)

SEQ ID NO: 63399 - protein, 313 aa, Polaromonas sp. JS666; identical to SEQ ID NO: 31748

SEQ ID NO: 63400 - DNA, 1212 bp, Campylobacter lari RM2100; identical to SEQ ID NO: 31749
  CDS (1)..(1212): transl_table=11

SEQ ID NO: 63401 - protein, 403 aa, Campylobacter lari RM2100; identical to SEQ ID NO: 31750

SEQ ID NO: 63402 - DNA, 1038 bp, Leuconostoc mesenteroides; identical to SEQ ID NO: 31751
  CDS (1)..(1038): transl_table=11

SEQ ID NO: 63403 - protein, 345 aa, Leuconostoc mesenteroides; identical to SEQ ID NO: 31752

SEQ ID NO: 63404 - DNA, 1500 bp, Caenorhabditis elegans; identical to SEQ ID NO: 31753
  CDS (1)..(1500)

SEQ ID NO: 63405 - protein, 499 aa, Caenorhabditis elegans; identical to SEQ ID NO: 31754

SEQ ID NO: 63406 - DNA, 1137 bp, Sorghum bicolor; identical to SEQ ID NO: 31755
  CDS (1)..(1137)

SEQ ID NO: 63407 - protein, 378 aa, Sorghum bicolor; identical to SEQ ID NO: 31756

SEQ ID NO: 63408 - DNA, 1002 bp, Saccharopolyspora spinosa; identical to SEQ ID NO: 31757
  CDS (1)..(1002): transl_table=11

SEQ ID NO: 63409 - protein, 333 aa, Saccharopolyspora spinosa; identical to SEQ ID NO: 31758

SEQ ID NO: 63410 - DNA, 978 bp, Xenopus laevis; identical to SEQ ID NO: 31759
  CDS (1)..(978)

SEQ ID NO: 63411 - protein, 325 aa, Xenopus laevis; identical to SEQ ID NO: 31760

SEQ ID NO: 63412 - DNA, 1536 bp, uncultured bacterium 311; identical to SEQ ID NO: 31761
  CDS (1)..(1536): transl_table=11

SEQ ID NO: 63413 - protein, 511 aa, uncultured bacterium 311; identical to SEQ ID NO: 31762

SEQ ID NO: 63414 - DNA, 972 bp, Rhizobium sp; identical to SEQ ID NO: 31763
  CDS (1)..(972): transl_table=11

SEQ ID NO: 63415 - protein, 323 aa, Rhizobium sp; identical to SEQ ID NO: 31764

SEQ ID NO: 63416 - DNA, 969 bp, Acinetobacter baumannii; identical to SEQ ID NO: 31765
  CDS (1)..(969): transl_table=11

SEQ ID NO: 63417 - protein, 322 aa, Acinetobacter baumannii; identical to SEQ ID NO: 31766

SEQ ID NO: 63418 - DNA, 3522 bp, Dictyostelium discoideum; identical to SEQ ID NO: 31767
  CDS (1)..(3522)

SEQ ID NO: 63419 - protein, 1173 aa, Dictyostelium discoideum; identical to SEQ ID NO: 31768

SEQ ID NO: 63420 - DNA, 1053 bp, Dictyostelium discoideum; identical to SEQ ID NO: 31769
  CDS (1)..(1053)

SEQ ID NO: 63421 - protein, 350 aa, Dictyostelium discoideum; identical to SEQ ID NO: 31770

SEQ ID NO: 63422 - DNA, 1740 bp, Giardia lamblia; identical to SEQ ID NO: 31771
  CDS (1)..(1740)

SEQ ID NO: 63423 - protein, 579 aa, Giardia lamblia; identical to SEQ ID NO: 31772

SEQ ID NO: 63424 - DNA, 1848 bp, Podospora anserina; identical to SEQ ID NO: 31773
  CDS (1)..(1848)

SEQ ID NO: 63425 - protein, 615 aa, Podospora anserina; identical to SEQ ID NO: 31774

SEQ ID NO: 63426 - DNA, 981 bp, Burkholderia pickettii; identical to SEQ ID NO: 31775
  CDS (1)..(981): transl_table=11

SEQ ID NO: 63427 - protein, 326 aa, Burkholderia pickettii; identical to SEQ ID NO: 31776

SEQ ID NO: 63428 - DNA, 1779 bp, Arabidopsis thaliana; identical to SEQ ID NO: 31777
  CDS (1)..(1779)

SEQ ID NO: 63429 - protein, 592 aa, Arabidopsis thaliana; identical to SEQ ID NO: 31778

SEQ ID NO: 63430 - DNA, 1080 bp, Mus musculus; identical to SEQ ID NO: 31779
  CDS (1)..(1080)

SEQ ID NO: 63431 - protein, 359 aa, Mus musculus; identical to SEQ ID NO: 31780

SEQ ID NO: 63432 - DNA, 1809 bp, Oryza sativa; identical to SEQ ID NO: 31781
  CDS (1)..(1809)

SEQ ID NO: 63433 - protein, 602 aa, Oryza sativa; identical to SEQ ID NO: 31782

SEQ ID NO: 63434 - DNA, 942 bp, Mus musculus; identical to SEQ ID NO: 31783
  CDS (1)..(942)

SEQ ID NO: 63435 - protein, 313 aa, Mus musculus; identical to SEQ ID NO: 31784

SEQ ID NO: 63436 - DNA, 1806 bp, Nicotiana attenuata; identical to SEQ ID NO: 31785
  CDS (1)..(1806)

SEQ ID NO: 63437 - protein, 601 aa, Nicotiana attenuata; identical to SEQ ID NO: 31786

SEQ ID NO: 63438 - DNA, 1542 bp, Gamma; identical to SEQ ID NO: 31787
  misc_feature (1488)..(1488): n is a, c, g, or t
  CDS (1)..(1542): transl_table=11

SEQ ID NO: 63439 - protein, 513 aa, Gamma; identical to SEQ ID NO: 31788
  misc_feature (460)..(460): Xaa can be any naturally occuring amino acid

SEQ ID NO: 63440 - DNA, 1113 bp, Bacillus halodurans; identical to SEQ ID NO: 31789
  CDS (1)..(1113): transl_table=11

SEQ ID NO: 63441 - protein, 370 aa, Bacillus halodurans; identical to SEQ ID NO: 31790

SEQ ID NO: 63442 - DNA, 1263 bp, Bacillus cereus; identical to SEQ ID NO: 31791
  CDS (1)..(1263): transl_table=11

SEQ ID NO: 63443 - protein, 420 aa, Bacillus cereus; identical to SEQ ID NO: 31792

SEQ ID NO: 63444 - DNA, 987 bp, Homo sapiens; identical to SEQ ID NO: 31793
  CDS (1)..(987)

SEQ ID NO: 63445 - protein, 328 aa, Homo sapiens; identical to SEQ ID NO: 31794

SEQ ID NO: 63446 - DNA, 984 bp, Mus musculus; identical to SEQ ID NO: 31795
  CDS (1)..(984)

SEQ ID NO: 63447 - protein, 327 aa, Mus musculus; identical to SEQ ID NO: 31796

SEQ ID NO: 63448 - DNA, 1023 bp, Homo sapiens; identical to SEQ ID NO: 31797
  CDS (1)..(1023)

SEQ ID NO: 63449 - protein, 340 aa, Homo sapiens; identical to SEQ ID NO: 31798

SEQ ID NO: 63450 - DNA, 1020 bp, Mus musculus; identical to SEQ ID NO: 31799
  CDS (1)..(1020)

SEQ ID NO: 63451 - protein, 339 aa, Mus musculus; identical to SEQ ID NO: 31800

SEQ ID NO: 63452 - DNA, 1083 bp, Saccharomyces cerevisiae; identical to SEQ ID NO: 31801
  CDS (1)..(1083)

SEQ ID NO: 63453 - protein, 360 aa, Saccharomyces cerevisiae; identical to SEQ ID NO: 31802

SEQ ID NO: 63454 - DNA, 1269 bp, Bacillus subtilis; identical to SEQ ID NO: 31803
  CDS (1)..(1269): transl_table=11

SEQ ID NO: 63455 - protein, 422 aa, Bacillus subtilis; identical to SEQ ID NO: 31804

SEQ ID NO: 63456 - DNA, 1773 bp, Cicer arietinum; identical to SEQ ID NO: 31805
  CDS (1)..(1773)

SEQ ID NO: 63457 - protein, 590 aa, Cicer arietinum; identical to SEQ ID NO: 31806

SEQ ID NO: 63458 - DNA, 1311 bp, Corynebacterium glutamicum; identical to SEQ ID NO: 31807
  CDS (1)..(1311): transl_table=11

SEQ ID NO: 63459 - protein, 436 aa, Corynebacterium glutamicum; identical to SEQ ID NO: 31808

SEQ ID NO: 63460 - DNA, 1545 bp, Escherichia coli; identical to SEQ ID NO: 31809
  CDS (1)..(1545): transl_table=11

SEQ ID NO: 63461 - protein, 514 aa, Escherichia coli [sequence omitted]

SEQ ID NO: 63462 - DNA, 1251 bp, Lactococcus lactis; identical to SEQ ID NO: 31811
  CDS (1)..(1251): transl_table=11

SEQ ID NO: 63463 - protein, 416 aa, Lactococcus lactis; identical to SEQ ID NO: 31812

SEQ ID NO: 63464 - DNA, 1788 bp, Lycopersicon esculentum; identical to SEQ ID NO: 31813
  CDS (1)..(1788)

SEQ ID NO: 63465 - protein, 595 aa, Lycopersicon esculentum; identical to SEQ ID NO: 31814

SEQ ID NO: 63466 - DNA, 1290 bp, Mycobacterium bovis; identical to SEQ ID NO: 31815
  CDS (1)..(1290): transl_table=11

SEQ ID NO: 63467 - protein, 429 aa, Mycobacterium bovis; identical to SEQ ID NO: 31816

SEQ ID NO: 63468 - DNA, 1284 bp, Mycobacterium leprae; identical to SEQ ID NO: 31817
  CDS (1)..(1284): transl_table=11

SEQ ID NO: 63469 - protein, 427 aa, Mycobacterium leprae; identical to SEQ ID NO: 31818

SEQ ID NO: 63470 - DNA, 1542 bp, Pasteurella multocida; identical to SEQ ID NO: 31819
  CDS (1)..(1542): transl_table=11

SEQ ID NO: 63471 - protein, 513 aa, Pasteurella multocida; identical to SEQ ID NO: 31820

SEQ ID NO: 63472 - DNA, 1545 bp, Salmonella typhimurium; identical to SEQ ID NO: 31821
  CDS (1)..(1545): transl_table=11

SEQ ID NO: 63473 - protein, 514 aa, Salmonella typhimurium; identical to SEQ ID NO: 31822

SEQ ID NO: 63474 - DNA, 990 bp, Salmonella typhimurium; identical to SEQ ID NO: 31823
  CDS (1)..(990): transl_table=11

SEQ ID NO: 63475 - protein, 329 aa, Salmonella typhimurium; identical to SEQ ID NO: 31824

SEQ ID NO: 63476 - DNA, 1653 bp, Arxula adeninivorans; identical to SEQ ID NO: 31825
  CDS (1)..(1653)

SEQ ID NO: 63477 - protein, 550 aa, Arxula adeninivorans; identical to SEQ ID NO: 31826

SEQ ID NO: 63478 - DNA, 1731 bp, Saccharomyces cerevisiae; identical to SEQ ID NO: 31827
  CDS (1)..(1731)

SEQ ID NO: 63479 - protein, 576 aa, Saccharomyces cerevisiae; identical to SEQ ID NO: 31828

SEQ ID NO: 63480 - DNA, 1149 bp, Synechocystis sp; identical to SEQ ID NO: 31829
  CDS (1)..(1149)

SEQ ID NO: 63481 - protein, 382 aa, Synechocystis sp; identical to SEQ ID NO: 31830

SEQ ID NO: 63482 - DNA, 999 bp, Rhizobium sp; identical to SEQ ID NO: 31831
  CDS (1)..(999): transl_table=11

SEQ ID NO: 63483 - protein, 332 aa, Rhizobium sp; identical to SEQ ID NO: 31832

SEQ ID NO: 63484 - DNA, 972 bp, Schizosaccharomyces pombe; identical to SEQ ID NO: 31833
  CDS (1)..(972)

SEQ ID NO: 63485 - protein, 323 aa, Schizosaccharomyces pombe; identical to SEQ ID NO: 31834

SEQ ID NO: 63486 - DNA, 981 bp, Saccharomyces cerevisiae; identical to SEQ ID NO: 31835
  CDS (1)..(981)

SEQ ID NO: 63487 - protein, 326 aa, Saccharomyces cerevisiae; identical to SEQ ID NO: 31836

SEQ ID NO: 63488 - DNA, 24 bp, Artificial sequence
  Primer sequence
atgcatattacatacgatctgccg

SEQ ID NO: 63489 - DNA, 23 bp, Artificial sequence
  Primer sequence
ttaagcgtcaacgaaaccggtga

SEQ ID NO: 63490 - protein, 516 aa, Artificial sequence; identical to SEQ ID NO: 31839
  Consensus
  Variant (3)..(13): Xaa in position 3 to 13 is any amino acid
  Variant (14)..(96): Xaa in position 14 to 96 is any or no amino acid
  Variant (98)..(98): Xaa in position 98 is any amino acid
  Variant (100)..(101): Xaa in position 100 to 101 is any amino acid
  Variant (103)..(106): Xaa in position 103 to 106 is any amino acid
  Variant (107)..(121): Xaa in position 107 to 121 is any or no amino acid
  Variant (124)..(124): Xaa in position 124 is any amino acid
  Variant (127)..(138): Xaa in position 127 to 138 is any amino acid
  Variant (139)..(178): Xaa in position 139 to 178 is any or no amino acid
  Variant (180)..(180): Xaa in position 180 is any amino acid
  Variant (184)..(185): Xaa in position 184 to 185 is any amino acid
  Variant (186)..(189): Xaa in position 186 to 189 is any or no amino acid
  Variant (191)..(204): Xaa in position 191 to 204 is any amino acid
  Variant (206)..(211): Xaa in position 206 to 211 is any amino acid
  Variant (213)..(219): Xaa in position 213 to 219 is any amino acid
  Variant (221)..(257): Xaa in position 221 to 257 is any amino acid
  Variant (258)..(270): Xaa in position 258 to 270 is any or no amino acid
  Variant (273)..(273): Xaa in position 273 is any amino acid
  Variant (275)..(277): Xaa in position 275 to 277 is any amino acid
  Variant (279)..(291): Xaa in position 279 to 291 is any amino acid
  Variant (292)..(340): Xaa in position 292 to 340 is any or no amino acid
  Variant (346)..(347): Xaa in position 346 to 347 is any amino acid
  Variant (349)..(394): Xaa in position 349 to 394 is any amino acid
  Variant (395)..(440): Xaa in position 395 to 440 is any or no amino acid
  Variant (442)..(461): Xaa in position 442 to 461 is any amino acid
  Variant (463)..(469): Xaa in position 463 to 469 is any amino acid
  Variant (471)..(484): Xaa in position 471 to 484 is any amino acid
  Variant (485)..(513): Xaa in position 485 to 513 is any or no amino acid
  Variant (515)..(515): Xaa in position 515 is any amino acid

SEQ ID NO: 63491 - protein, 224 aa, Artificial sequence; identical to SEQ ID NO: 31840
  Consensus
  Variant (1)..(1): Xaa in position 1 is Val, Ile, Leu, Phe or Met
  Variant (2)..(3): Xaa in position 2 to 3 is any amino acid
  Variant (5)..(5): Xaa in position 5 is any amino acid
  Variant (6)..(6): Xaa in position 6 is Glu or Asp
  Variant (7)..(8): Xaa in position 7 to 8 is any amino acid
  Variant (9)..(9): Xaa in position 9 is Gln, Asn, Leu, Thr or Ser
  Variant (10)..(12): Xaa in position 10 to 12 is any amino acid
  Variant (13)..(13): Xaa in position 13 is Ser, Ala or Thr
  Variant (14)..(14): Xaa in position 14 is Phe or Tyr
  Variant (15)..(15): Xaa in position 15 is Lys or Arg
  Variant (16)..(16): Xaa in position 16 is any amino acid
  Variant (18)..(18): Xaa in position 18 is Gly or Leu
  Variant (19)..(35): Xaa in position 19 to 35 is any amino acid
  Variant (36)..(54): Xaa in position 36 to 54 is any or no amino acid
  Variant (55)..(55): Xaa in position 55 is Ser or Thr
  Variant (56)..(56): Xaa in position 56 is any amino acid
  Variant (58)..(58): Xaa in position 58 is Asn or Gly
  Variant (59)..(59): Xaa in position 59 is any amino acid
  Variant (60)..(60): Xaa in position 60 is Ala, Gly or Ser
  Variant (61)..(61): Xaa in position 61 is any amino acid
  Variant (62)..(62): Xaa in position 62 is any or no amino acid
  Variant (63)..(63): Xaa in position 63 is Gly, Ala, Leu, Ser or Cys
  Variant (64)..(64): Xaa in position 64 is any amino acid
  Variant (65)..(65): Xaa in position 65 is Ala or Ser
  Variant (66)..(67): Xaa in position 66 to 67 is any amino acid
  Variant (68)..(68): Xaa in position 68 is Ala, Cys, Gly or Ser
  Variant (69)..(76): Xaa in position 69 to 76 is any amino acid
  Variant (77)..(77): Xaa in position 77 is Ile, Val, Leu or Thr
  Variant (78)..(78): Xaa in position 78 is Val, Phe, Ile, Tyr, Leu, Cys or Ala
  Variant (79)..(79): Xaa in position 79 is Met, Val, Pro, Leu, Ile or Ala
  Variant (80)..(80): Xaa in position 80 is Pro, Ser, Thr, Glu, Lys or Asp
  Variant (81)..(82): Xaa in position 81 to 82 is any amino acid
  Variant (83)..(83): Xaa in position 83 is Thr, Ala, Val, Ile, Lys, Ser or Asn
  Variant (84)..(86): Xaa in position 84 to 86 is any amino acid
  Variant (87)..(87): Xaa in position 87 is Lys, Ile, Val, Thr, Ala or Met
  Variant (88)..(94): Xaa in position 88 to 94 is any amino acid
  Variant (95)..(95): Xaa in position 95 is any or no amino acid
  Variant (96)..(96): Xaa in position 96 is Gly or Ser
  Variant (97)..(97): Xaa in position 97 is Ala, Gly, Lys or Ser
  Variant (98)..(123): Xaa in position 98 to 123 is any amino acid
  Variant (124)..(135): Xaa in position 124 to 135 is any or no amino acid
  Variant (136)..(136): Xaa in position 136 is Ile, Val, Leu or Phe
  Variant (137)..(144): Xaa in position 137 to 144 is any amino acid
  Variant (145)..(145): Xaa in position 145 is Ile, Met, Leu, Val, Trp, Ala or Gln
  Variant (146)..(146): Xaa in position 146 is any amino acid
  Variant (148)..(148): Xaa in position 148 is any amino acid
  Variant (149)..(149): Xaa in position 149 is Gly, Ala, Lys, Ser, Arg or Thr
  Variant (150)..(150): Xaa in position 150 is Thr or Ser
  Variant (151)..(153): Xaa in position 151 to 153 is any amino acid
  Variant (154)..(154): Xaa in position 154 is Glu or Asp
  Variant (155)..(155): Xaa in position 155 is Ile, Leu, Met, Val, Ala, Phe or Trp
  Variant (156)..(162): Xaa in position 156 to 162 is any amino acid
  Variant (163)..(211): Xaa in position 163 to 211 is any or no amino acid
  Variant (212)..(212): Xaa in position 212 is Val, Ile or Leu
  Variant (213)..(214): Xaa in position 213 to 214 is any amino acid
  Variant (215)..(215): Xaa in position 215 is Pro, Ala, Ser, Cys, Gly, Gln or Asn
  Variant (216)..(216): Xaa in position 216 is Val, Ile, Leu, Met, Thr, Cys or Ala
  Variant (217)..(217): Xaa in position 217 is Gly or Ser
  Variant (218)..(218): Xaa in position 218 is any amino acid
  Variant (219)..(219): Xaa in position 219 is Gly or Ala
  Variant (220)..(220): Xaa in position 220 is Gly or Ser
  Variant (221)..(223): Xaa in position 221 to 223 is any amino acid
  Variant (224)..(224): Xaa in position 224 is Gly, Ala or Ser

SEQ ID NO: 63492 - DNA, 2376 bp, Saccharomyces cerevisiae; identical to SEQ ID NO: 35553
  CDS (1)..(2376)

SEQ ID NO: 63493 - protein, 791 aa, Saccharomyces cerevisiae; identical to SEQ ID NO: 35554

SEQ ID NO: 63494 - DNA, 717 bp, Danio rerio; identical to SEQ ID NO: 35555
  CDS (1)..(717)

SEQ ID NO: 63495 - protein, 238 aa, Danio rerio; identical to SEQ ID NO: 35556

SEQ ID NO: 63496 - DNA, 1506 bp, Caenorhabditis elegans; identical to SEQ ID NO: 35557
  CDS (1)..(1506)

SEQ ID NO: 63497 - protein, 501 aa, Caenorhabditis elegans; identical to SEQ ID NO: 35558

SEQ ID NO: 63498 - DNA, 684 bp, Caenorhabditis elegans; identical to SEQ ID NO: 35559
  CDS (1)..(684)

SEQ ID NO: 63499 - protein, 227 aa, Caenorhabditis elegans; identical to SEQ ID NO: 35560

SEQ ID NO: 63500 - DNA, 720 bp, Homo sapiens; identical to SEQ ID NO: 35561
  CDS (1)..(720)

SEQ ID NO: 63501 - protein, 239 aa, Homo sapiens; identical to SEQ ID NO: 35562

SEQ ID NO: 63502 - DNA, 1272 bp, Leptospira interrogans serovar Lai str. 56601; identical to SEQ ID NO: 35563
  CDS (1)..(1272): transl_table=11

SEQ ID NO: 63503 - protein, 423 aa, Leptospira interrogans serovar Lai str. 56601; identical to SEQ ID NO: 35564

SEQ ID NO: 63504 - DNA, 1497 bp, Leptospira interrogans serovar Lai str. 56601; identical to SEQ ID NO: 35565
  CDS (1)..(1497): transl_table=11

SEQ ID NO: 63505 - protein, 498 aa, Leptospira interrogans serovar Lai str. 56601; identical to SEQ ID NO: 35566

SEQ ID NO: 63506 - DNA, 1287 bp, Leptospira interrogans serovar Lai str. 56601; identical to SEQ ID NO: 35567
  CDS (1)..(1287): transl_table=11

SEQ ID NO: 63507 - protein, 428 aa, Leptospira interrogans serovar Lai str. 56601; identical to SEQ ID NO: 35568

SEQ ID NO: 63508 - DNA, 870 bp, Leptospira interrogans serovar Lai str. 56601; identical to SEQ ID NO: 35569
  CDS (1)..(870): transl_table=11

SEQ ID NO: 63509 - protein, 289 aa, Leptospira interrogans serovar Lai str. 56601; identical to SEQ ID NO: 35570

SEQ ID NO: 63510 - DNA, 1281 bp, Leptospira interrogans serovar Lai str. 56601; identical to SEQ ID NO: 35571
  CDS (1)..(1281): transl_table=11

SEQ ID NO: 63511 - protein, 426 aa, Leptospira interrogans serovar Lai str. 56601; identical to SEQ ID NO: 35572

SEQ ID NO: 63512 - DNA, 1227 bp, Leptospira interrogans serovar Lai str. 56601; identical to SEQ ID NO: 35573
  CDS (1)..(1227): transl_table=11

SEQ ID NO: 63513 - protein, 408 aa, Leptospira interrogans serovar Lai str. 56601; identical to SEQ ID NO: 35574

SEQ ID NO: 63514 - DNA, 1134 bp, Leptospira interrogans serovar Lai str. 56601; identical to SEQ ID NO: 35575
  CDS (1)..(1134): transl_table=11

SEQ ID NO: 63515 - protein, 377 aa, Leptospira interrogans serovar Lai str. 56601; identical to SEQ ID NO: 35576

SEQ ID NO: 63516 - DNA, 936 bp, Leptospira interrogans serovar Lai str. 56601; identical to SEQ ID NO: 35577
  CDS (1)..(936): transl_table=11

SEQ ID NO: 63517 - protein, 311 aa, Leptospira interrogans serovar Lai str. 56601; identical to SEQ ID NO: 35578

SEQ ID NO: 63518 - DNA, 990 bp, Leptospira interrogans serovar Lai str. 56601; identical to SEQ ID NO: 35579
  CDS (1)..(990): transl_table=11

SEQ ID NO: 63519 - protein, 329 aa, Leptospira interrogans serovar Lai str. 56601; identical to SEQ ID NO: 35580

SEQ ID NO: 63520 - DNA, 1458 bp, Caenorhabditis elegans; identical to SEQ ID NO: 35581
  CDS (1)..(1458)

SEQ ID NO: 63521 - protein, 485 aa, Caenorhabditis elegans; identical to SEQ ID NO: 35582

SEQ ID NO: 63522 - DNA, 2160 bp, Eremothecium gossypii; identical to SEQ ID NO: 35583
  CDS (1)..(2160)

SEQ ID NO: 63523 - protein, 719 aa, Eremothecium gossypii; identical to SEQ ID NO: 35584

SEQ ID NO: 63524 - DNA, 3123 bp, Magnaporthe grisea 70-15; identical to SEQ ID NO: 35585
  CDS (1)..(3123)

SEQ ID NO: 63525 - protein, 1040 aa, Magnaporthe grisea 70-15; identical to SEQ ID NO: 35586

SEQ ID NO: 63526 - DNA, 2940 bp, Gibberella zeae PH-1; identical to SEQ ID NO: 35587
  CDS (1)..(2940)

SEQ ID NO: 63527 - protein, 979 aa, Gibberella zeae PH-1; identical to SEQ ID NO: 35588

SEQ ID NO: 63528 - DNA, 2943 bp, Aspergillus nidulans FGSC A4; identical to SEQ ID NO: 35589
  CDS (1)..(2943)

SEQ ID NO: 63529 - protein, 980 aa, Aspergillus nidulans FGSC A4; identical to SEQ ID NO: 35590

SEQ ID NO: 63530 - DNA, 2607 bp, Candida glabrata CBS138; identical to SEQ ID NO: 35591
  CDS (1)..(2607)

SEQ ID NO: 63531 - protein, 868 aa, Candida glabrata CBS138; identical to SEQ ID NO: 35592

SEQ ID NO: 63532 - DNA, 2379 bp, Kluyveromyces lactis NRRL Y-1140; identical to SEQ ID NO: 35593
  CDS (1)..(2379)

SEQ ID NO: 63533 - protein, 792 aa, Kluyveromyces lactis NRRL Y-1140; identical to SEQ ID NO: 35594

SEQ ID NO: 63534 - DNA, 2301 bp, Yarrowia lipolytica CLIB99; identical to SEQ ID NO: 35595
  CDS (1)..(2301)

SEQ ID NO: 63535 - protein, 766 aa, Yarrowia lipolytica CLIB99; identical to SEQ ID NO: 35596

SEQ ID NO: 63536 - DNA, 2466 bp, Candida albicans SC5314; identical to SEQ ID NO: 35597
  CDS (1)..(2466): transl_table=12

SEQ ID NO: 63537 - protein, 821 aa, Candida albicans SC5314; identical to SEQ ID NO: 35598

SEQ ID NO: 63538 - DNA, 1137 bp, Leptospira interrogans serovar Copenhageni str. Fiocruz L1-130; identical to SEQ ID NO: 35599
  CDS (1)..(1137): transl_table=11

SEQ ID NO: 63539 - protein, 378 aa, Leptospira interrogans serovar Copenhageni str. Fiocruz L1-130; identical to SEQ ID NO: 35600

SEQ ID NO: 63540 - DNA, 1209 bp, Leptospira interrogans serovar Copenhageni str. Fiocruz L1-130; identical to SEQ ID NO: 35601
  CDS (1)..(1209): transl_table=11

SEQ ID NO: 63541 - protein, 402 aa, Leptospira interrogans serovar Copenhageni str. Fiocruz L1-130; identical to SEQ ID NO: 35602

SEQ ID NO: 63542 - DNA, 1566 bp, Leptospira interrogans serovar Copenhageni str. Fiocruz L1-130; identical to SEQ ID NO: 35603
  CDS (1)..(1566): transl_table=11

SEQ ID NO: 63543 - protein, 521 aa, Leptospira interrogans serovar Copenhageni str. Fiocruz L1-130; identical to SEQ ID NO: 35604

SEQ ID NO: 63544 - DNA, 1134 bp, Leptospira interrogans serovar Copenhageni str. Fiocruz L1-130; identical to SEQ ID NO: 35605
  CDS (1)..(1134): transl_table=11

SEQ ID NO: 63545 - protein, 377 aa, Leptospira interrogans serovar Copenhageni str. Fiocruz L1-130; identical to SEQ ID NO: 35606

SEQ ID NO: 63546 - DNA, 1281 bp, Leptospira interrogans serovar Copenhageni str. Fiocruz L1-130; identical to SEQ ID NO: 35607
  CDS (1)..(1281): transl_table=11

SEQ ID NO: 63547 - protein, 426 aa, Leptospira interrogans serovar Copenhageni str. Fiocruz L1-130; identical to SEQ ID NO: 35608

SEQ ID NO: 63548 - DNA, 1719 bp, Leptospira interrogans serovar Copenhageni str. Fiocruz L1-130; identical to SEQ ID NO: 35609
  CDS (1)..(1719): transl_table=11

SEQ ID NO: 63549 - protein, 572 aa, Leptospira interrogans serovar Copenhageni str. Fiocruz L1-130; identical to SEQ ID NO: 35610

SEQ ID NO: 63550 - DNA, 1272 bp, Leptospira interrogans serovar Copenhageni str. Fiocruz L1-130; identical to SEQ ID NO: 35611
  CDS (1)..(1272): transl_table=11

SEQ ID NO: 63551 - protein, 423 aa, Leptospira interrogans serovar Copenhageni str. Fiocruz L1-130; identical to SEQ ID NO: 35612

SEQ ID NO: 63552 - DNA, 819 bp, Leptospira interrogans serovar Copenhageni str. Fiocruz L1-130; identical to SEQ ID NO: 35613
  CDS (1)..(819): transl_table=11

SEQ ID NO: 63553 - protein, 272 aa, Leptospira interrogans serovar Copenhageni str. Fiocruz L1-130; identical to SEQ ID NO: 35614

SEQ ID NO: 63554 - DNA, 1320 bp, Caenorhabditis briggsae; identical to SEQ ID NO: 35615
  CDS (1)..(1320)

SEQ ID NO: 63555 - protein, 439 aa, Caenorhabditis briggsae; identical to SEQ ID NO: 35616

SEQ ID NO: 63556 - DNA, 720 bp, Homo sapiens; identical to SEQ ID NO: 35617
  CDS (1)..(720)

SEQ ID NO: 63557 - protein, 239 aa, Homo sapiens; identical to SEQ ID NO: 35618

SEQ ID NO: 63558 - DNA, 720 bp, Homo sapiens; identical to SEQ ID NO: 35619
  CDS (1)..(720)

SEQ ID NO: 63559 - protein, 239 aa, Homo sapiens; identical to SEQ ID NO: 35620

SEQ ID NO: 63560 - DNA, 24 bp, Artificial sequence
  Primer sequence
atggtagcgacatcttcaaagagg

SEQ ID NO: 63561 - DNA, 23 bp, Artificial sequence
  Primer sequence
ttactccggagagttggcgctta

SEQ ID NO: 63562 - protein, 380 aa, Artificial sequence; identical to SEQ ID NO: 35623
  Consensus
  Variant (2)..(9): Xaa in position 2 to 9 is any amino acid
  Variant (10)..(11): Xaa in position 10 to 11 is any or no amino acid
  Variant (13)..(13): Xaa in position 13 is any amino acid
  Variant (15)..(18): Xaa in position 15 to 18 is any amino acid
  Variant (20)..(21): Xaa in position 20 to 21 is any amino acid
  Variant (24)..(24): Xaa in position 24 is any amino acid
  Variant (27)..(28): Xaa in position 27 to 28 is any amino acid
  Variant (30)..(31): Xaa in position 30 to 31 is any amino acid
  Variant (32)..(33): Xaa in position 32 to 33 is any or no amino acid
  Variant (35)..(36): Xaa in position 35 to 36 is any amino acid
  Variant (38)..(38): Xaa in position 38 is any amino acid
  Variant (40)..(41): Xaa in position 40 to 41 is any amino acid
  Variant (43)..(45): Xaa in position 43 to 45 is any or no amino acid
  Variant (47)..(52): Xaa in position 47 to 52 is any amino acid
  Variant (53)..(53): Xaa in position 53 is any or no amino acid
  Variant (55)..(59): Xaa in position 55 to 59 is any amino acid
  Variant (61)..(62): Xaa in position 61 to 62 is any amino acid
  Variant (64)..(64): Xaa in position 64 is any amino acid
  Variant (66)..(67): Xaa in position 66 to 67 is any amino acid
  Variant (69)..(75): Xaa in position 69 to 75 is any amino acid
  Variant (76)..(90): Xaa in position 76 to 90 is any or no amino acid
  Variant (93)..(94): Xaa in position 93 to 94 is any amino acid
  Variant (96)..(97): Xaa in position 96 to 97 is any amino acid
  Variant (99)..(105): Xaa in position 99 to 105 is any amino acid
  Variant (106)..(128): Xaa in position 106 to 128 is any or no amino acid
  Variant (130)..(137): Xaa in position 130 to 137 is any amino acid
  Variant (139)..(143): Xaa in position 139 to 143 is any amino acid
  Variant (145)..(151): Xaa in position 145 to 151 is any amino acid
  Variant (153)..(166): Xaa in position 153 to 166 is any amino acid
  Variant (167)..(214): Xaa in position 167 to 214 is any or no amino acid
  Variant (216)..(217): Xaa in position 216 to 217 is any amino acid
  Variant (219)..(219): Xaa in position 219 is any amino acid
  Variant (221)..(221): Xaa in position 221 is any amino acid
  Variant (222)..(222): Xaa in position 222 is any or no amino acid
  Variant (224)..(228): Xaa in position 224 to 228 is any amino acid
  Variant (229)..(265): Xaa in position 229 to 265 is any or no amino acid
  Variant (267)..(268): Xaa in position 267 to 268 is any amino acid
  Variant (270)..(271): Xaa in position 270 to 271 is any amino acid
  Variant (273)..(274): Xaa in position 273 to 274 is any amino acid
  Variant (276)..(296): Xaa in position 276 to 296 is any amino acid
  Variant (297)..(311): Xaa in position 297 to 311 is any or no amino acid
  Variant (313)..(314): Xaa in position 313 to 314 is any amino acid
  Variant (316)..(337): Xaa in position 316 to 337 is any amino acid
  Variant (338)..(364): Xaa in position 338 to 364 is any or no amino acid
  Variant (366)..(378): Xaa in position 366 to 378 is any amino acid
  Variant (379)..(379): Xaa in position 379 is any or no amino acid

SEQ ID NO: 63563 - protein, 46 aa, Artificial sequence; identical to SEQ ID NO: 35624
  Consensus
  Variant (2)..(4): Xaa in position 2 to 4 is any or no amino acid
  Variant (6)..(13): Xaa in position 6 to 13 is any amino acid
  Variant (14)..(14): Xaa in position 14 is any or no amino acid
  Variant (16)..(17): Xaa in position 16 to 17 is any amino acid
  Variant (18)..(18): Xaa in position 18 is Phe, Ile, Leu or Val
  Variant (19)..(19): Xaa in position 19 is any amino acid
  Variant (20)..(20): Xaa in position 20 is Ile, Leu or Val
  Variant (21)..(22): Xaa in position 21 to 22 is any amino acid
  Variant (24)..(24): Xaa in position 24 is any amino acid
  Variant (25)..(25): Xaa in position 25 is Phe, Ile or Leu
  Variant (26)..(27): Xaa in position 26 to 27 is any amino acid
  Variant (28)..(28): Xaa in position 28 is Phe, Ile, Leu or Val
  Variant (29)..(29): Xaa in position 29 is Pro or Ser
  Variant (30)..(31): Xaa in position 30 to 31 is any amino acid
  Variant (32)..(32): Xaa in position 32 is Ile, Leu or Val
  Variant (33)..(37): Xaa in position 33 to 37 is any amino acid
  Variant (39)..(45): Xaa in position 39 to 45 is any amino acid
  Variant (46)..(46): Xaa in position 46 is Asn or Ser

SEQ ID NO: 63564 - DNA, 612 bp, Escherichia coli; identical to SEQ ID NO: 15395
  CDS (1)..(612)

SEQ ID NO: 63565 - protein, 203 aa, Escherichia coli; identical to SEQ ID NO: 15396

SEQ ID NO: 63566 - DNA, 558 bp, Mesorhizobium loti MAFF303099; identical to SEQ ID NO: 15397
  CDS (1)..(558): transl_table=11

SEQ ID NO: 63567 - protein, 185 aa, Mesorhizobium loti MAFF303099; identical to SEQ ID NO: 15398

SEQ ID NO: 63568 - DNA, 591 bp, Mesorhizobium loti MAFF303099; identical to SEQ ID NO: 15399
  CDS (1)..(591): transl_table=11

SEQ ID NO: 63569 - protein, 196 aa, Mesorhizobium loti MAFF303099; identical to SEQ ID NO: 15400

SEQ ID NO: 63570 - DNA, 558 bp, Mesorhizobium loti MAFF303099; identical to SEQ ID NO: 15401
  CDS (1)..(558): transl_table=11

SEQ ID NO: 63571 - protein, 185 aa, Mesorhizobium loti MAFF303099; identical to SEQ ID NO: 15402

SEQ ID NO: 63572 - DNA, 579 bp, Vibrio cholerae O1 biovar eltor str. N16961; identical to SEQ ID NO: 15403
  CDS (1)..(579): transl_table=11

SEQ ID NO: 63573 - protein, 192 aa, Vibrio cholerae O1 biovar eltor str. N16961; identical to SEQ ID NO: 15404

SEQ ID NO: 63574 - DNA, 561 bp, Bacillus halodurans C-125; identical to SEQ ID NO: 15405
  CDS (1)..(561): transl_table=11

SEQ ID NO: 63575 - protein, 186 aa, Bacillus halodurans C-125; identical to SEQ ID NO: 15406

SEQ ID NO: 63576 - DNA, 612 bp, Pasteurella multocida subsp. multocida str. Pm70; identical to SEQ ID NO: 15407
  CDS (1)..(612): transl_table=11

SEQ ID NO: 63577 - protein, 203 aa, Pasteurella multocida subsp. multocida str. Pm70; identical to SEQ ID NO: 15408

SEQ ID NO: 63578 - DNA, 771 bp, Lactococcus lactis subsp. lactis Il1403; identical to SEQ ID NO: 15409
  CDS (1)..(771): transl_table=11

SEQ ID NO: 63579 - protein, 256 aa, Lactococcus lactis subsp. lactis Il1403; identical to SEQ ID NO: 15410

SEQ ID NO: 63580 - DNA, 612 bp, Lactococcus lactis subsp. lactis Il1403; identical to SEQ ID NO: 15411
  CDS (1)..(612): transl_table=11

SEQ ID NO: 63581 - protein, 203 aa, Lactococcus lactis subsp. lactis Il1403; identical to SEQ ID NO: 15412

SEQ ID NO: 63582 - DNA, 603 bp, Lactococcus lactis subsp. lactis Il1403; identical to SEQ ID NO: 15413
  CDS (1)..(603): transl_table=11

SEQ ID NO: 63583 - protein, 200 aa, Lactococcus lactis subsp. lactis Il1403; identical to SEQ ID NO: 15414

SEQ ID NO: 63584 - DNA, 612 bp, Lactococcus lactis subsp. lactis Il1403; identical to SEQ ID NO: 15415
  CDS (1)..(612): transl_table=11

SEQ ID NO: 63585 - protein, 203 aa, Lactococcus lactis subsp. lactis Il1403; identical to SEQ ID NO: 15416

SEQ ID NO: 63586 - DNA, 462 bp, Lactococcus lactis subsp. lactis Il1403; identical to SEQ ID NO: 15417
  CDS (1)..(462): transl_table=11

SEQ ID NO: 63587 - protein, 153 aa, Lactococcus lactis subsp. lactis Il1403; identical to SEQ ID NO: 15418

SEQ ID NO: 63588 - DNA, 567 bp, Streptococcus pyogenes M1 GAS; identical to SEQ ID NO: 15419
  CDS (1)..(567): transl_table=11

SEQ ID NO: 63589 - protein, 188 aa, Streptococcus pyogenes M1 GAS; identical to SEQ ID NO: 15420

SEQ ID NO: 63590 - DNA, 513 bp, Neisseria meningitidis Z2491; identical to SEQ ID NO: 15421
  CDS (1)..(513): transl_table=11

SEQ ID NO: 63591 - protein, 170 aa, Neisseria meningitidis Z2491; identical to SEQ ID NO: 15422

SEQ ID NO: 63592 - DNA, 549 bp, Escherichia coli O157:H7; identical to SEQ ID NO: 15423
  CDS (1)..(549): transl_table=11

SEQ ID NO: 63593 - protein, 182 aa, Escherichia coli O157:H7; identical to SEQ ID NO: 15424

SEQ ID NO: 63594 - DNA, 558 bp, Streptococcus pneumoniae TIGR4; identical to SEQ ID NO: 15425
  CDS (1)..(558): transl_table=11

SEQ ID NO: 63595 - protein, 185 aa, Streptococcus pneumoniae TIGR4; identical to SEQ ID NO: 15426

SEQ ID NO: 63596 - DNA, 561 bp, Clostridium acetobutylicum ATCC 824; identical to SEQ ID NO: 15427
  CDS (1)..(561): transl_table=11

SEQ ID NO: 63597 - protein, 186 aa, Clostridium acetobutylicum ATCC 824; identical to SEQ ID NO: 15428

SEQ ID NO: 63598 - DNA, 615 bp, Clostridium acetobutylicum ATCC 824; identical to SEQ ID NO: 15429
  CDS (1)..(615): transl_table=11

SEQ ID NO: 63599 - protein, 204 aa, Clostridium acetobutylicum ATCC 824; identical to SEQ ID NO: 15430

SEQ ID NO: 63600 - DNA, 600 bp, Staphylococcus aureus subsp. aureus Mu50; identical to SEQ ID NO: 15431
  CDS (1)..(600): transl_table=11

SEQ ID NO: 63601 - protein, 199 aa, Staphylococcus aureus subsp. aureus Mu50; identical to SEQ ID NO: 15432

SEQ ID NO: 63602 - DNA, 552 bp, Escherichia coli K12; identical to SEQ ID NO: 15433
  CDS (1)..(552): transl_table=11

SEQ ID NO: 63603 - protein, 183 aa, Escherichia coli K12; identical to SEQ ID NO: 15434

SEQ ID NO: 63604 - DNA, 615 bp, Sinorhizobium meliloti 1021; identical to SEQ ID NO: 15435
  CDS (1)..(615): transl_table=11

SEQ ID NO: 63605 - protein, 204 aa, Sinorhizobium meliloti 1021; identical to SEQ ID NO: 15436

SEQ ID NO: 63606 - DNA, 552 bp, Salmonella typhimurium LT2; identical to SEQ ID NO: 15437
  CDS (1)..(552): transl_table=11

SEQ ID NO: 63607 - protein, 183 aa, Salmonella typhimurium LT2; identical to SEQ ID NO: 15438

SEQ ID NO: 63608 - DNA, 564 bp, Listeria monocytogenes EGD-e; identical to SEQ ID NO: 15439
  CDS (1)..(564): transl_table=11

SEQ ID NO: 63609 - protein, 187 aa, Listeria monocytogenes EGD-e; identical to SEQ ID NO: 15440

SEQ ID NO: 63610 - DNA, 570 bp, Listeria innocua Clip11262; identical to SEQ ID NO: 15441
  CDS (1)..(570): transl_table=11

SEQ ID NO: 63611 - protein, 189 aa, Listeria innocua Clip11262; identical to SEQ ID NO: 15442

SEQ ID NO: 63612 - DNA, 564 bp, Listeria innocua Clip11262; identical to SEQ ID NO: 15443
  CDS (1)..(564): transl_table=11

SEQ ID NO: 63613 - protein, 187 aa, Listeria innocua Clip11262; identical to SEQ ID NO: 15444

SEQ ID NO: 63614 - DNA, 579 bp, Nostoc sp. PCC 7120; identical to SEQ ID NO: 15445
  CDS (1)..(579): transl_table=11

SEQ ID NO: 63615 - protein, 192 aa, Nostoc sp. PCC 7120; identical to SEQ ID NO: 15446

SEQ ID NO: 63616 - DNA, 828 bp, Nostoc sp. PCC 7120; identical to SEQ ID NO: 15447
  CDS (1)..(828): transl_table=11

SEQ ID NO: 63617 - protein, 275 aa, Nostoc sp. PCC 7120; identical to SEQ ID NO: 15448

SEQ ID NO: 63618 - DNA, 513 bp, Ralstonia solanacearum GMI1000; identical to SEQ ID NO: 15449
  CDS (1)..(513): transl_table=11

SEQ ID NO: 63619 - protein, 170 aa, Ralstonia solanacearum GMI1000; identical to SEQ ID NO: 15450

SEQ ID NO: 63620 - DNA, 618 bp, Agrobacterium tumefaciens str. C58; identical to SEQ ID NO: 15451
  CDS (1)..(618): transl_table=11

SEQ ID NO: 63621 - protein, 205 aa, Agrobacterium tumefaciens str. C58; identical to SEQ ID NO: 15452

SEQ ID NO: 63622 - DNA, 561 bp, Agrobacterium tumefaciens str. C58; identical to SEQ ID NO: 15453
  CDS (1)..(561): transl_table=11

SEQ ID NO: 63623 - protein, 186 aa, Agrobacterium tumefaciens str. C58; identical to SEQ ID NO: 15454

SEQ ID NO: 63624 - DNA, 633 bp, Agrobacterium tumefaciens str. C58; identical to SEQ ID NO: 15455
  CDS (1)..(633): transl_table=11

SEQ ID NO: 63625 - protein, 210 aa, Agrobacterium tumefaciens str. C58; identical to SEQ ID NO: 15456

SEQ ID NO: 63626 - DNA, 687 bp, Brucella melitensis 16M; identical to SEQ ID NO: 15457
  CDS (1)..(687): transl_table=11

SEQ ID NO: 63627 - protein, 228 aa, Brucella melitensis 16M; identical to SEQ ID NO: 15458

SEQ ID NO: 63628 - DNA, 681 bp, Pyrobaculum aerophilum str. IM2; identical to SEQ ID NO: 15459
  CDS (1)..(681): transl_table=11

SEQ ID NO: 63629 - protein, 226 aa, Pyrobaculum aerophilum str. IM2; identical to SEQ ID NO: 15460

SEQ ID NO: 63630 - DNA, 585 bp, Clostridium perfringens str. 13; identical to SEQ ID NO: 15461
  CDS (1)..(585): transl_table=11

SEQ ID NO: 63631 - protein, 194 aa, Clostridium perfringens str. 13; identical to SEQ ID NO: 15462

SEQ ID NO: 63632 - DNA, 501 bp, Pyrococcus furiosus DSM 3638; identical to SEQ ID NO: 15463
  CDS (1)..(501): transl_table=11

SEQ ID NO: 63633 - protein, 166 aa, Pyrococcus furiosus DSM 3638; identical to SEQ ID NO: 15464

SEQ ID NO: 63634 - DNA, 687 bp, Corynebacterium glutamicum ATCC 13032; identical to SEQ ID NO: 15465
  CDS (1)..(687): transl_table=11

SEQ ID NO: 63635 - protein, 228 aa, Corynebacterium glutamicum ATCC 13032; identical to SEQ ID NO: 15466

SEQ ID NO: 63636 - DNA, 576 bp, Methanosarcina acetivorans C2A; identical to SEQ ID NO: 15467
  CDS (1)..(576): transl_table=11

SEQ ID NO: 63637 - protein, 191 aa, Methanosarcina acetivorans C2A; identical to SEQ ID NO: 15468

SEQ ID NO: 63638 - DNA, 600 bp, Methanosarcina acetivorans C2A; identical to SEQ ID NO: 15469
  CDS (1)..(600): transl_table=11

SEQ ID NO: 63639 - protein, 199 aa, Methanosarcina acetivorans C2A; identical to SEQ ID NO: 15470

SEQ ID NO: 63640 - DNA, 525 bp, Methanosarcina acetivorans C2A; identical to SEQ ID NO: 15471
  CDS (1)..(525): transl_table=11

SEQ ID NO: 63641 - protein, 174 aa, Methanosarcina acetivorans C2A; identical to SEQ ID NO: 15472

SEQ ID NO: 63642 - DNA, 555 bp, Methanosarcina acetivorans C2A; identical to SEQ ID NO: 15473
  CDS (1)..(555): transl_table=11

SEQ ID NO: 63643 - protein, 184 aa, Methanosarcina acetivorans C2A; identical to SEQ ID NO: 15474

SEQ ID NO: 63644 - DNA, 663 bp, Thermoanaerobacter tengcongensis MB4; identical to SEQ ID NO: 15475
  CDS (1)..(663): transl_table=11

SEQ ID NO: 63645 - protein, 220 aa, Thermoanaerobacter tengcongensis MB4; identical to SEQ ID NO: 15476

SEQ ID NO: 63646 - DNA, 528 bp, Streptomyces coelicolor A3(2); identical to SEQ ID NO: 15477
  CDS (1)..(528)

SEQ ID NO: 63647 - protein, 175 aa, Streptomyces coelicolor A3(2); identical to SEQ ID NO: 15478

SEQ ID NO: 63648 - DNA, 804 bp, Streptomyces coelicolor A3(2); identical to SEQ ID NO: 15479
  CDS (1)..(804)

SEQ ID NO: 63649 - protein, 267 aa, Streptomyces coelicolor A3(2); identical to SEQ ID NO: 15480

SEQ ID NO: 63650 - DNA, 582 bp, Streptomyces coelicolor A3(2); identical to SEQ ID NO: 15481
  CDS (1)..(582)

SEQ ID NO: 63651 - protein, 193 aa, Streptomyces coelicolor A3(2); identical to SEQ ID NO: 15482

SEQ ID NO: 63652 - DNA, 564 bp, Methanosarcina mazei Go1; identical to SEQ ID NO: 15483
  CDS (1)..(564): transl_table=11

SEQ ID NO: 63653 - protein, 187 aa, Methanosarcina mazei Go1; identical to SEQ ID NO: 15484

SEQ ID NO: 63654 - DNA, 702 bp, Methanosarcina mazei Go1; identical to SEQ ID NO: 15485
  CDS (1)..(702): transl_table=11

SEQ ID NO: 63655 - protein, 233 aa, Methanosarcina mazei Go1; identical to SEQ ID NO: 15486

SEQ ID NO: 63656 - DNA, 579 bp, Xanthomonas campestris pv. campestris str. ATCC 33913; identical to SEQ ID NO: 15487
  CDS (1)..(579): transl_table=11

SEQ ID NO: 63657 - protein, 192 aa, Xanthomonas campestris pv. campestris str. ATCC 33913; identical to SEQ ID NO: 15488

SEQ ID NO: 63658 - DNA, 579 bp, Xanthomonas axonopodis pv. citri str. 306; identical to SEQ ID NO: 15489
  CDS (1)..(579): transl_table=11

SEQ ID NO: 63659 - protein, 192 aa, Xanthomonas axonopodis pv. citri str. 306; identical to SEQ ID NO: 15490

SEQ ID NO: 63660 - DNA, 639 bp, Streptococcus agalactiae 2603V/R; identical to SEQ ID NO: 15491
  CDS (1)..(639): transl_table=11

SEQ ID NO: 63661 - protein, 212 aa, Streptococcus agalactiae 2603V/R; identical to SEQ ID NO: 15492

SEQ ID NO: 63662 - DNA, 549 bp, Streptococcus agalactiae 2603V/R; identical to SEQ ID NO: 15493
  CDS (1)..(549): transl_table=11

SEQ ID NO: 63663 - protein, 182 aa, Streptococcus agalactiae 2603V/R; identical to SEQ ID NO: 15494

SEQ ID NO: 63664 - DNA, 540 bp, Oceanobacillus iheyensis HTE831; identical to SEQ ID NO: 15495
  CDS (1)..(540): transl_table=11

SEQ ID NO: 63665 - protein, 179 aa, Oceanobacillus iheyensis HTE831; identical to SEQ ID NO: 15496

SEQ ID NO: 63666 - DNA, 675 bp, Bifidobacterium longum NCC2705; identical to SEQ ID NO: 15497
  CDS (1)..(675): transl_table=11

SEQ ID NO: 63667 - protein, 224 aa, Bifidobacterium longum NCC2705; identical to SEQ ID NO: 15498

SEQ ID NO: 63668 - DNA, 678 bp, Bifidobacterium longum NCC2705; identical to SEQ ID NO: 15499
  CDS (1)..(678): transl_table=11

SEQ ID NO: 63669 - protein, 225 aa, Bifidobacterium longum NCC2705; identical to SEQ ID NO: 15500

SEQ ID NO: 63670 - DNA, 597 bp, Leptospira interrogans serovar Lai str. 56601; identical to SEQ ID NO: 15501
  CDS (1)..(597): transl_table=11

SEQ ID NO: 63671 - protein, 198 aa, Leptospira interrogans serovar Lai str. 56601; identical to SEQ ID NO: 15502

SEQ ID NO: 63672 - DNA, 579 bp, Shewanella oneidensis MR-1; identical to SEQ ID NO: 15503
  CDS (1)..(579): transl_table=11

SEQ ID NO: 63673 - protein, 192 aa, Shewanella oneidensis MR-1; identical to SEQ ID NO: 15504

SEQ ID NO: 63674 - DNA, 630 bp, Shewanella oneidensis MR-1; identical to SEQ ID NO: 15505
  CDS (1)..(630): transl_table=11

SEQ ID NO: 63675 - protein, 209 aa, Shewanella oneidensis MR-1; identical to SEQ ID NO: 15506

SEQ ID NO: 63676 - DNA, 699 bp, Streptococcus mutans UA159; identical to SEQ ID NO: 15507
  CDS (1)..(699): transl_table=11

SEQ ID NO: 63677 - protein, 232 aa, Streptococcus mutans UA159; identical to SEQ ID NO: 15508

SEQ ID NO: 63678 - DNA, 648 bp, Streptomyces coelicolor A3(2); identical to SEQ ID NO: 15509
  CDS (1)..(648)

SEQ ID NO: 63679 - protein, 215 aa, Streptomyces coelicolor A3(2); identical to SEQ ID NO: 15510

SEQ ID NO: 63680 - DNA, 567 bp, Pseudomonas putida KT2440; identical to SEQ ID NO: 15511
  CDS (1)..(567): transl_table=11

SEQ ID NO: 63681 - protein, 188 aa, Pseudomonas putida KT2440; identical to SEQ ID NO: 15512

SEQ ID NO: 63682 - DNA, 552 bp, Escherichia coli CFT073; identical to SEQ ID NO: 15513
  CDS (1)..(552): transl_table=11

SEQ ID NO: 63683 - protein, 183 aa, Escherichia coli CFT073; identical to SEQ ID NO: 15514

SEQ ID NO: 63684 - DNA, 549 bp, Escherichia coli CFT073; identical to SEQ ID NO: 15515
  CDS (1)..(549): transl_table=11

SEQ ID NO: 63685 - protein, 182 aa, Escherichia coli CFT073; identical to SEQ ID NO: 15516

SEQ ID NO: 63686 - DNA, 588 bp, Mycoplasma penetrans HF-2; identical to SEQ ID NO: 15517
  CDS (1)..(588): transl_table=4

SEQ ID NO: 63687 - protein, 195 aa, Mycoplasma penetrans HF-2; identical to SEQ ID NO: 15518

SEQ ID NO: 63688 - DNA, 771 bp, Vibrio vulnificus CMCP6; identical to SEQ ID NO: 15519
  CDS (1)..(771): transl_table=11

SEQ ID NO: 63689 - protein, 256 aa, Vibrio vulnificus CMCP6; identical to SEQ ID NO: 15520

SEQ ID NO: 63690 - DNA, 594 bp, Vibrio vulnificus CMCP6; identical to SEQ ID NO: 15521
  CDS (1)..(594): transl_table=11

SEQ ID NO: 63691 - protein, 197 aa, Vibrio vulnificus CMCP6; identical to SEQ ID NO: 15522

SEQ ID NO: 63692 - DNA, 549 bp, Vibrio vulnificus CMCP6; identical to SEQ ID NO: 15523
  CDS (1)..(549): transl_table=11

SEQ ID NO: 63693 - protein, 182 aa, Vibrio vulnificus CMCP6; identical to SEQ ID NO: 15524

SEQ ID NO: 63694 - DNA, 621 bp, Bradyrhizobium japonicum USDA 110; identical to SEQ ID NO: 15525
  CDS (1)..(621)

SEQ ID NO: 63695 - protein, 206 aa, Bradyrhizobium japonicum USDA 110; identical to SEQ ID NO: 15526

SEQ ID NO: 63696 - DNA, 564 bp, Clostridium tetani E88; identical to SEQ ID NO: 15527
  CDS (1)..(564): transl_table=11

SEQ ID NO: 63697 - protein, 187 aa, Clostridium tetani E88; identical to SEQ ID NO: 15528

SEQ ID NO: 63698 - DNA, 618 bp, Lactobacillus plantarum WCFS1; identical to SEQ ID NO: 15529
  CDS (1)..(618): transl_table=11

SEQ ID NO: 63699 - protein, 205 aa, Lactobacillus plantarum WCFS1; identical to SEQ ID NO: 15530

SEQ ID NO: 63700 - DNA, 609 bp, Lactobacillus plantarum WCFS1; identical to SEQ ID NO: 15531
  CDS (1)..(609): transl_table=11

SEQ ID NO: 63701 - protein, 202 aa, Lactobacillus plantarum WCFS1; identical to SEQ ID NO: 15532

SEQ ID NO: 63702 - DNA, 555 bp, Lactobacillus plantarum WCFS1; identical to SEQ ID NO: 15533
  CDS (1)..(555): transl_table=11

SEQ ID NO: 63703 - protein, 184 aa, Lactobacillus plantarum WCFS1; identical to SEQ ID NO: 15534

SEQ ID NO: 63704 - DNA, 603 bp, Lactobacillus plantarum WCFS1; identical to SEQ ID NO: 15535
  CDS (1)..(603): transl_table=11

SEQ ID NO: 63705 - protein, 200 aa, Lactobacillus plantarum WCFS1; identical to SEQ ID NO: 15536

SEQ ID NO: 63706 - DNA, 621 bp, Lactobacillus plantarum WCFS1; identical to SEQ ID NO: 15537
  CDS (1)..(621): transl_table=11

SEQ ID NO: 63707 - protein, 206 aa, Lactobacillus plantarum WCFS1; identical to SEQ ID NO: 15538

SEQ ID NO: 63708 - DNA, 570 bp, Lactobacillus plantarum WCFS1; identical to SEQ ID NO: 15539
  CDS (1)..(570): transl_table=11

SEQ ID NO: 63709 - protein, 189 aa, Lactobacillus plantarum WCFS1; identical to SEQ ID NO: 15540

SEQ ID NO: 63710 - DNA, 561 bp, Lactobacillus plantarum WCFS1; identical to SEQ ID NO: 15541
  CDS (1)..(561): transl_table=11

SEQ ID NO: 63711 - protein, 186 aa, Lactobacillus plantarum WCFS1; identical to SEQ ID NO: 15542

SEQ ID NO: 63712 - DNA, 555 bp, Vibrio parahaemolyticus RIMD 2210633; identical to SEQ ID NO: 15543
  CDS (1)..(555): transl_table=11

SEQ ID NO: 63713 - protein, 184 aa, Vibrio parahaemolyticus RIMD 2210633; identical to SEQ ID NO: 15544

SEQ ID NO: 63714 - DNA, 549 bp, Vibrio parahaemolyticus RIMD 2210633; identical to SEQ ID NO: 15545
  CDS (1)..(549): transl_table=11

SEQ ID NO: 63715 - protein, 182 aa, Vibrio parahaemolyticus RIMD 2210633; identical to SEQ ID NO: 15546

SEQ ID NO: 63716 - DNA, 552 bp, Salmonella enterica subsp. enterica serovar Typhi Ty2; identical to SEQ ID NO: 15547
  CDS (1)..(552): transl_table=11

SEQ ID NO: 63717 - protein, 183 aa, Salmonella enterica subsp. enterica serovar Typhi Ty2; identical to SEQ ID NO: 15548

SEQ ID NO: 63718 - DNA, 759 bp, Bacteroides thetaiotaomicron VPI-5482; identical to SEQ ID NO: 15549
  CDS (1)..(759): transl_table=11

SEQ ID NO: 63719 - protein, 252 aa, Bacteroides thetaiotaomicron VPI-5482; identical to SEQ ID NO: 15550

SEQ ID NO: 63720 - DNA, 624 bp, Bacteroides thetaiotaomicron VPI-5482; identical to SEQ ID NO: 15551
  CDS (1)..(624): transl_table=11

SEQ ID NO: 63721 - protein, 207 aa, Bacteroides thetaiotaomicron VPI-5482; identical to SEQ ID NO: 15552

SEQ ID NO: 63722 - DNA, 564 bp, Bacteroides thetaiotaomicron VPI-5482; identical to SEQ ID NO: 15553
  CDS (1)..(564): transl_table=11

SEQ ID NO: 63723 - protein, 187 aa, Bacteroides thetaiotaomicron VPI-5482; identical to SEQ ID NO: 15554

SEQ ID NO: 63724 - DNA, 606 bp, Bacteroides thetaiotaomicron VPI-5482; identical to SEQ ID NO: 15555
  CDS (1)..(606): transl_table=11

SEQ ID NO: 63725 - protein, 201 aa, Bacteroides thetaiotaomicron VPI-5482; identical to SEQ ID NO: 15556

SEQ ID NO: 63726 - DNA, 552 bp, Bacteroides thetaiotaomicron VPI-5482; identical to SEQ ID NO: 15557
  CDS (1)..(552): transl_table=11

SEQ ID NO: 63727 - protein, 183 aa, Bacteroides thetaiotaomicron VPI-5482; identical to SEQ ID NO: 15558

SEQ ID NO: 63728 - DNA, 846 bp, Enterococcus faecalis V583; identical to SEQ ID NO: 15559
  CDS (1)..(846): transl_table=11

SEQ ID NO: 63729 - protein, 281 aa, Enterococcus faecalis V583; identical to SEQ ID NO: 15560

SEQ ID NO: 63730 - DNA, 639 bp, Enterococcus faecalis V583; identical to SEQ ID NO: 15561
  CDS (1)..(639): transl_table=11

SEQ ID NO: 63731 - protein, 212 aa, Enterococcus faecalis V583; identical to SEQ ID NO: 15562

SEQ ID NO: 63732 - DNA, 582 bp, Enterococcus faecalis V583; identical to SEQ ID NO: 15563
  CDS (1)..(582): transl_table=11

SEQ ID NO: 63733 - protein, 193 aa, Enterococcus faecalis V583; identical to SEQ ID NO: 15564

SEQ ID NO: 63734 - DNA, 723 bp, Bacillus cereus ATCC 14579; identical to SEQ ID NO: 15565
  CDS (1)..(723): transl_table=11

SEQ ID NO: 63735 - protein, 240 aa, Bacillus cereus ATCC 14579; identical to SEQ ID NO: 15566

SEQ ID NO: 63736 - DNA, 561 bp, Bacillus cereus ATCC 14579; identical to SEQ ID NO: 15567
  CDS (1)..(561): transl_table=11

SEQ ID NO: 63737 - protein, 186 aa, Bacillus cereus ATCC 14579; identical to SEQ ID NO: 15568

SEQ ID NO: 63738 - DNA, 666 bp, Bacillus anthracis str. Ames; identical to SEQ ID NO: 15569
  CDS (1)..(666): transl_table=11

SEQ ID NO: 63739 - protein, 221 aa, Bacillus anthracis str. Ames; identical to SEQ ID NO: 15570

SEQ ID NO: 63740 - DNA, 564 bp, Bacillus anthracis str. Ames; identical to SEQ ID NO: 15571
  CDS (1)..(564): transl_table=11

SEQ ID NO: 63741 - protein, 187 aa, Bacillus anthracis str. Ames; identical to SEQ ID NO: 15572

SEQ ID NO: 63742 - DNA, 723 bp, Bacillus anthracis str. Ames; identical to SEQ ID NO: 15573
  CDS (1)..(723): transl_table=11

SEQ ID NO: 63743 - protein, 240 aa, Bacillus anthracis str. Ames; identical to SEQ ID NO: 15574

SEQ ID NO: 63744 - DNA, 618 bp, Helicobacter hepaticus ATCC 51449; identical to SEQ ID NO: 15575
  CDS (1)..(618): transl_table=11

SEQ ID NO: 63745 - protein, 205 aa, Helicobacter hepaticus ATCC 51449; identical to SEQ ID NO: 15576

SEQ ID NO: 63746 - DNA, 555 bp, Rhodopirellula baltica SH 1; identical to SEQ ID NO: 15577
  CDS (1)..(555): transl_table=11

SEQ ID NO: 63747 - protein, 184 aa, Rhodopirellula baltica SH 1; identical to SEQ ID NO: 15578

SEQ ID NO: 63748 - DNA, 522 bp, Chromobacterium violaceum ATCC 12472; identical to SEQ ID NO: 15579
  CDS (1)..(522): transl_table=11

SEQ ID NO: 63749 - protein, 173 aa, Chromobacterium violaceum ATCC 12472; identical to SEQ ID NO: 15580

SEQ ID NO: 63750 - DNA, 561 bp, Gloeobacter violaceus PCC 7421; identical to SEQ ID NO: 15581
  CDS (1)..(561): transl_table=11

SEQ ID NO: 63751 - protein, 186 aa, Gloeobacter violaceus PCC 7421; identical to SEQ ID NO: 15582

SEQ ID NO: 63752 - DNA, 771 bp, Vibrio vulnificus YJ016; identical to SEQ ID NO: 15583
  CDS (1)..(771): transl_table=11

SEQ ID NO: 63753 - protein, 256 aa, Vibrio vulnificus YJ016; identical to SEQ ID NO: 15584

SEQ ID NO: 63754 - DNA, 558 bp, Vibrio vulnificus YJ016; identical to SEQ ID NO: 15585
  CDS (1)..(558): transl_table=11

SEQ ID NO: 63755 - protein, 185 aa, Vibrio vulnificus YJ016; identical to SEQ ID NO: 15586

SEQ ID NO: 63756 - DNA, 657 bp, Vibrio vulnificus YJ016; identical to SEQ ID NO: 15587
  CDS (1)..(657): transl_table=11

SEQ ID NO: 63757 - protein, 218 aa, Vibrio vulnificus YJ016; identical to SEQ ID NO: 15588

SEQ ID NO: 63758 - DNA, 621 bp, Vibrio vulnificus YJ016; identical to SEQ ID NO: 15589
  CDS (1)..(621): transl_table=11

SEQ ID NO: 63759 - protein, 206 aa, Vibrio vulnificus YJ016; identical to SEQ ID NO: 15590

SEQ ID NO: 63760 - DNA, 570 bp, Corynebacterium diphtheriae NCTC 13129; identical to SEQ ID NO: 15591
  CDS (1)..(570): transl_table=11

SEQ ID NO: 63761 - protein, 189 aa, Corynebacterium diphtheriae NCTC 13129; identical to SEQ ID NO: 15592

SEQ ID NO: 63762 - DNA, 573 bp, Rhodopseudomonas palustris CGA009; identical to SEQ ID NO: 15593
  CDS (1)..(573): transl_table=11

SEQ ID NO: 63763 - protein, 190 aa, Rhodopseudomonas palustris CGA009; identical to SEQ ID NO: 15594

SEQ ID NO: 63764 - DNA, 615 bp, Lactobacillus johnsonii NCC 533; identical to SEQ ID NO: 15595
  CDS (1)..(615): transl_table=11

SEQ ID NO: 63765 - protein, 204 aa, Lactobacillus johnsonii NCC 533; identical to SEQ ID NO: 15596

SEQ ID NO: 63766 - DNA, 564 bp, Bacillus cereus ATCC 10987; identical to SEQ ID NO: 15597
  CDS (1)..(564): transl_table=11

SEQ ID NO: 63767 - protein, 187 aa, Bacillus cereus ATCC 10987; identical to SEQ ID NO: 15598

SEQ ID NO: 63768 - DNA, 2154 bp, Neurospora crassa; identical to SEQ ID NO: 15599
  CDS (1)..(2154)

SEQ ID NO: 63769 - protein, 717 aa, Neurospora crassa; identical to SEQ ID NO: 15600

SEQ ID NO: 63770 - DNA, 660 bp, Magnaporthe grisea 70-15; identical to SEQ ID NO: 15601
  CDS (1)..(660)

SEQ ID NO: 63771 - protein, 219 aa, Magnaporthe grisea 70-15; identical to SEQ ID NO: 15602

SEQ ID NO: 63772 - DNA, 699 bp, Gibberella zeae PH-1; identical to SEQ ID NO: 15603
  CDS (1)..(699)

SEQ ID NO: 63773 - protein, 232 aa, Gibberella zeae PH-1; identical to SEQ ID NO: 15604

SEQ ID NO: 63774 - DNA, 699 bp, Gibberella zeae PH-1; identical to SEQ ID NO: 15605
  CDS (1)..(699)

SEQ ID NO: 63775 - protein, 232 aa, Gibberella zeae PH-1; identical to SEQ ID NO: 15606

SEQ ID NO: 63776 - DNA, 690 bp, Ustilago maydis 521; identical to SEQ ID NO: 15607
  CDS (1)..(690)

SEQ ID NO: 63777 - protein, 229 aa, Ustilago maydis 521; identical to SEQ ID NO: 15608

SEQ ID NO: 63778 - DNA, 702 bp, Aspergillus nidulans FGSC A4; identical to SEQ ID NO: 15609
  CDS (1)..(702)

SEQ ID NO: 63779 - protein, 233 aa, Aspergillus nidulans FGSC A4; identical to SEQ ID NO: 15610

SEQ ID NO: 63780 - DNA, 618 bp, Aspergillus nidulans FGSC A4; identical to SEQ ID NO: 15611
  CDS (1)..(618)

SEQ ID NO: 63781 - protein, 205 aa, Aspergillus nidulans FGSC A4; identical to SEQ ID NO: 15612

SEQ ID NO: 63782 - DNA, 573 bp, Candida glabrata CBS138; identical to SEQ ID NO: 15613
  CDS (1)..(573)

SEQ ID NO: 63783 - protein, 190 aa, Candida glabrata CBS138; identical to SEQ ID NO: 15614

SEQ ID NO: 63784 - DNA, 570 bp, Kluyveromyces lactis NRRL Y-1140; identical to SEQ ID NO: 15615
  CDS (1)..(570)

SEQ ID NO: 63785 - protein, 189 aa, Kluyveromyces lactis NRRL Y-1140; identical to SEQ ID NO: 15616

SEQ ID NO: 63786 - DNA, 693 bp, Debaryomyces hansenii CBS767; identical to SEQ ID NO: 15617
  CDS (1)..(693)

SEQ ID NO: 63787 - protein, 230 aa, Debaryomyces hansenii CBS767; identical to SEQ ID NO: 15618

SEQ ID NO: 63788 - DNA, 690 bp, Debaryomyces hansenii CBS767; identical to SEQ ID NO: 15619
  CDS (1)..(690)

SEQ ID NO: 63789 - protein, 229 aa, Debaryomyces hansenii CBS767; identical to SEQ ID NO: 15620

SEQ ID NO: 63790 - DNA, 666 bp, Yarrowia lipolytica CLIB99; identical to SEQ ID NO: 15621
  CDS (1)..(666)

SEQ ID NO: 63791 - protein, 221 aa, Yarrowia lipolytica CLIB99; identical to SEQ ID NO: 15622

SEQ ID NO: 63792 - DNA, 840 bp, Yarrowia lipolytica CLIB99; identical to SEQ ID NO: 15623
  CDS (1)..(840)

SEQ ID NO: 63793 - protein, 279 aa, Yarrowia lipolytica CLIB99; identical to SEQ ID NO: 15624

SEQ ID NO: 63794 - DNA, 642 bp, Cryptococcus neoformans var. neoformans JEC21; identical to SEQ ID NO: 15625
  CDS (1)..(642)

SEQ ID NO: 63795 - protein, 213 aa, Cryptococcus neoformans var. neoformans JEC21; identical to SEQ ID NO: 15626

SEQ ID NO: 63796 - DNA, 546 bp, Dictyostelium discoideum; identical to SEQ ID NO: 15627
  CDS (1)..(546)

SEQ ID NO: 63797 - protein, 181 aa, Dictyostelium discoideum; identical to SEQ ID NO: 15628

SEQ ID NO: 63798 - DNA, 576 bp, Dictyostelium discoideum; identical to SEQ ID NO: 15629
  CDS (1)..(576)

SEQ ID NO: 63799 - protein, 191 aa, Dictyostelium discoideum; identical to SEQ ID NO: 15630

SEQ ID NO: 63800 - DNA, 591 bp, Dictyostelium discoideum; identical to SEQ ID NO: 15631
  CDS (1)..(591)

SEQ ID NO: 63801 - protein, 196 aa, Dictyostelium discoideum; identical to SEQ ID NO: 15632

SEQ ID NO: 63802 - DNA, 573 bp, Dictyostelium discoideum; identical to SEQ ID NO: 15633
  CDS (1)..(573)

SEQ ID NO: 63803 - protein, 190 aa, Dictyostelium discoideum; identical to SEQ ID NO: 15634

SEQ ID NO: 63804 - DNA, 459 bp, Entamoeba histolytica HM-1:IMSS; identical to SEQ ID NO: 15635
  CDS (1)..(459)

SEQ ID NO: 63805 - protein, 152 aa, Entamoeba histolytica HM-1:IMSS; identical to SEQ ID NO: 15636

SEQ ID NO: 63806 - DNA, 609 bp, Entamoeba histolytica HM-1:IMSS; identical to SEQ ID NO: 15637
  CDS (1)..(609)

SEQ ID NO: 63807 - protein, 202 aa, Entamoeba histolytica HM-1:IMSS; identical to SEQ ID NO: 15638

SEQ ID NO: 63808 - DNA, 609 bp, Entamoeba histolytica HM-1:IMSS; identical to SEQ ID NO: 15639
  CDS (1)..(609)

SEQ ID NO: 63809 - protein, 202 aa, Entamoeba histolytica HM-1:IMSS; identical to SEQ ID NO: 15640

SEQ ID NO: 63810 - DNA, 549 bp, Entamoeba histolytica HM-1:IMSS; identical to SEQ ID NO: 15641
  CDS (1)..(549)

SEQ ID NO: 63811 - protein, 182 aa, Entamoeba histolytica HM-1:IMSS; identical to SEQ ID NO: 15642

SEQ ID NO: 63812 - DNA, 612 bp, Entamoeba histolytica HM-1:IMSS; identical to SEQ ID NO: 15643
  CDS (1)..(612)

SEQ ID NO: 63813 - protein, 203 aa, Entamoeba histolytica HM-1:IMSS; identical to SEQ ID NO: 15644

SEQ ID NO: 63814 - DNA, 615 bp, Entamoeba histolytica HM-1:IMSS; identical to SEQ ID NO: 15645
  CDS (1)..(615)

SEQ ID NO: 63815 - protein, 204 aa, Entamoeba histolytica HM-1:IMSS; identical to SEQ ID NO: 15646

SEQ ID NO: 63816 - DNA, 924 bp, Candida albicans SC5314; identical to SEQ ID NO: 15647
  CDS (1)..(924): transl_table=12

SEQ ID NO: 63817 - protein, 307 aa, Candida albicans SC5314; identical to SEQ ID NO: 15648

SEQ ID NO: 63818 - DNA, 888 bp, Thermus thermophilus HB27; identical to SEQ ID NO: 15649
  CDS (1)..(888): transl_table=11

SEQ ID NO: 63819 - protein, 295 aa, Thermus thermophilus HB27; identical to SEQ ID NO: 15650

SEQ ID NO: 63820 - DNA, 594 bp, Desulfovibrio vulgaris subsp. vulgaris str. Hildenborough; identical to SEQ ID NO: 15651
  CDS (1)..(594): transl_table=11

SEQ ID NO: 63821 - protein, 197 aa, Desulfovibrio vulgaris subsp. vulgaris str. Hildenborough; identical to SEQ ID NO: 15652

SEQ ID NO: 63822 - DNA, 570 bp, Listeria monocytogenes str. 4b F2365; identical to SEQ ID NO: 15653
  CDS (1)..(570): transl_table=11

SEQ ID NO: 63823 - protein, 189 aa, Listeria monocytogenes str. 4b F2365; identical to SEQ ID NO: 15654

SEQ ID NO: 63824 - DNA, 564 bp, Listeria monocytogenes str. 4b F2365; identical to SEQ ID NO: 15655
  CDS (1)..(564): transl_table=11

SEQ ID NO: 63825 - protein, 187 aa, Listeria monocytogenes str. 4b F2365; identical to SEQ ID NO: 15656

SEQ ID NO: 63826 - DNA, 564 bp, Bacillus thuringiensis serovar konkukian str. 97-27; identical to SEQ ID NO: 15657
  CDS (1)..(564): transl_table=11

SEQ ID NO: 63827 - protein, 187 aa, Bacillus thuringiensis serovar konkukian str. 97-27; identical to SEQ ID NO: 15658

SEQ ID NO: 63828 - DNA, 486 bp, Staphylococcus aureus subsp. aureus MRSA252; identical to SEQ ID NO: 15659
  CDS (1)..(486): transl_table=11

SEQ ID NO: 63829 - protein, 161 aa, Staphylococcus aureus subsp. aureus MRSA252; identical to SEQ ID NO: 15660

SEQ ID NO: 63830 - DNA, 600 bp, Staphylococcus aureus subsp. aureus MRSA252; identical to SEQ ID NO: 15661
  CDS (1)..(600): transl_table=11

SEQ ID NO: 63831 - protein, 199 aa, Staphylococcus aureus subsp. aureus MRSA252; identical to SEQ ID NO: 15662

SEQ ID NO: 63832 - DNA, 627 bp, Erwinia carotovora subsp. atroseptica SCRI1043; identical to SEQ ID NO: 15663
  CDS (1)..(627)

SEQ ID NO: 63833 - protein, 208 aa, Erwinia carotovora subsp. atroseptica SCRI1043; identical to SEQ ID NO: 15664

SEQ ID NO: 63834 - DNA, 573 bp, Propionibacterium acnes KPA171202; identical to SEQ ID NO: 15665
  CDS (1)..(573): transl_table=11

SEQ ID NO: 63835 - protein, 190 aa, Propionibacterium acnes KPA171202; identical to SEQ ID NO: 15666

SEQ ID NO: 63836 - DNA, 510 bp, Desulfotalea psychrophila LSv54; identical to SEQ ID NO: 15667
  CDS (1)..(510): transl_table=11

SEQ ID NO: 63837 - protein, 169 aa, Desulfotalea psychrophila LSv54; identical to SEQ ID NO: 15668

SEQ ID NO: 63838 - DNA, 579 bp, Bacillus licheniformis ATCC 14580; identical to SEQ ID NO: 15669
  CDS (1)..(579): transl_table=11

SEQ ID NO: 63839 - protein, 192 aa, Bacillus licheniformis ATCC 14580; identical to SEQ ID NO: 15670

SEQ ID NO: 63840 - DNA, 564 bp, Bacillus cereus E33L; identical to SEQ ID NO: 15671
  CDS (1)..(564): transl_table=11

SEQ ID NO: 63841 - protein, 187 aa, Bacillus cereus E33L; identical to SEQ ID NO: 15672

SEQ ID NO: 63842 - DNA, 603 bp, Mannheimia succiniciproducens MBEL55E; identical to SEQ ID NO: 15673
  CDS (1)..(603): transl_table=11

SEQ ID NO: 63843 - protein, 200 aa, Mannheimia succiniciproducens MBEL55E; identical to SEQ ID NO: 15674

SEQ ID NO: 63844 - DNA, 597 bp, Mannheimia succiniciproducens MBEL55E; identical to SEQ ID NO: 15675
  CDS (1)..(597): transl_table=11

SEQ ID NO: 63845 - protein, 198 aa, Mannheimia succiniciproducens MBEL55E; identical to SEQ ID NO: 15676

SEQ ID NO: 63846 - DNA, 606 bp, Bacteroides fragilis YCH46; identical to SEQ ID NO: 15677
  CDS (1)..(606): transl_table=11

SEQ ID NO: 63847 - protein, 201 aa, Bacteroides fragilis YCH46; identical to SEQ ID NO: 15678

SEQ ID NO: 63848 - DNA, 630 bp, Bacteroides fragilis YCH46; identical to SEQ ID NO: 15679
  CDS (1)..(630): transl_table=11

SEQ ID NO: 63849 - protein, 209 aa, Bacteroides fragilis YCH46; identical to SEQ ID NO: 15680

SEQ ID NO: 63850 - DNA, 627 bp, Bacteroides fragilis YCH46; identical to SEQ ID NO: 15681
  CDS (1)..(627): transl_table=11

SEQ ID NO: 63851 - protein, 208 aa, Bacteroides fragilis YCH46; identical to SEQ ID NO: 15682

SEQ ID NO: 63852 - DNA, 591 bp, Methylococcus capsulatus str. Bath; identical to SEQ ID NO: 15683
  CDS (1)..(591): transl_table=11

SEQ ID NO: 63853 - protein, 196 aa, Methylococcus capsulatus str. Bath; identical to SEQ ID NO: 15684

SEQ ID NO: 63854 - DNA, 648 bp, Photobacterium profundum SS9; identical to SEQ ID NO: 15685
  CDS (1)..(648): transl_table=11

SEQ ID NO: 63855 - protein, 215 aa, Photobacterium profundum SS9; identical to SEQ ID NO: 15686

SEQ ID NO: 63856 - DNA, 549 bp, Photobacterium profundum SS9; identical to SEQ ID NO: 15687
  CDS (1)..(549): transl_table=11

SEQ ID NO: 63857 - protein, 182 aa, Photobacterium profundum SS9; identical to SEQ ID NO: 15688

SEQ ID NO: 63858 - DNA, 564 bp, Photobacterium profundum SS9; identical to SEQ ID NO: 15689
  CDS (1)..(564): transl_table=11

SEQ ID NO: 63859 - protein, 187 aa, Photobacterium profundum SS9; identical to SEQ ID NO: 15690

SEQ ID NO: 63860 - DNA, 561 bp, Haloarcula marismortui ATCC 43049; identical to SEQ ID NO: 15691
  CDS (1)..(561): transl_table=11

SEQ ID NO: 63861 - protein, 186 aa, Haloarcula marismortui ATCC 43049; identical to SEQ ID NO: 15692

SEQ ID NO: 63862 - DNA, 675 bp, Geobacillus kaustophilus HTA426; identical to SEQ ID NO: 15693
  CDS (1)..(675): transl_table=11

SEQ ID NO: 63863 - protein, 224 aa, Geobacillus kaustophilus HTA426; identical to SEQ ID NO: 15694

SEQ ID NO: 63864 - DNA, 558 bp, Geobacillus kaustophilus HTA426; identical to SEQ ID NO: 15695
  CDS (1)..(558): transl_table=11

SEQ ID NO: 63865 - protein, 185 aa, Geobacillus kaustophilus HTA426; identical to SEQ ID NO: 15696

SEQ ID NO: 63866 - DNA, 552 bp, Azoarcus sp. EbN1; identical to SEQ ID NO: 15697
  CDS (1)..(552): transl_table=11

SEQ ID NO: 63867 - protein, 183 aa, Azoarcus sp. EbN1; identical to SEQ ID NO: 15698

SEQ ID NO: 63868 - DNA, 600 bp, Zymomonas mobilis subsp. mobilis ZM4; identical to SEQ ID NO: 15699
  CDS (1)..(600): transl_table=11

SEQ ID NO: 63869 - protein, 199 aa, Zymomonas mobilis subsp. mobilis ZM4; identical to SEQ ID NO: 15700

SEQ ID NO: 63870 - DNA, 693 bp, Dehalococcoides ethenogenes 195; identical to SEQ ID NO: 15701
  CDS (1)..(693): transl_table=11

SEQ ID NO: 63871 - protein, 230 aa, Dehalococcoides ethenogenes 195; identical to SEQ ID NO: 15702

SEQ ID NO: 63872 - DNA, 486 bp, Staphylococcus aureus subsp. aureus COL; identical to SEQ ID NO: 15703
  CDS (1)..(486): transl_table=11

SEQ ID NO: 63873 - protein, 161 aa, Staphylococcus aureus subsp. aureus COL; identical to SEQ ID NO: 15704

SEQ ID NO: 63874 - DNA, 600 bp, Staphylococcus aureus subsp. aureus COL; identical to SEQ ID NO: 15705
  CDS (1)..(600): transl_table=11

SEQ ID NO: 63875 - protein, 199 aa, Staphylococcus aureus subsp. aureus COL; identical to SEQ ID NO: 15706

SEQ ID NO: 63876 - DNA, 615 bp, Lactobacillus acidophilus NCFM; identical to SEQ ID NO: 15707
  CDS (1)..(615): transl_table=11

SEQ ID NO: 63877 - protein, 204 aa, Lactobacillus acidophilus NCFM; identical to SEQ ID NO: 15708

SEQ ID NO: 63878 - DNA, 600 bp, Vibrio fischeri ES114; identical to SEQ ID NO: 15709
  CDS (1)..(600): transl_table=11

SEQ ID NO: 63879 - protein, 199 aa, Vibrio fischeri ES114; identical to SEQ ID NO: 15710

SEQ ID NO: 63880 - DNA, 546 bp, Vibrio fischeri ES114; identical to SEQ ID NO: 15711
  CDS (1)..(546): transl_table=11

SEQ ID NO: 63881 - protein, 181 aa, Vibrio fischeri ES114; identical to SEQ ID NO: 15712

SEQ ID NO: 63882 - DNA, 552 bp, Vibrio fischeri ES114; identical to SEQ ID NO: 15713
  CDS (1)..(552): transl_table=11

SEQ ID NO: 63883 - protein, 183 aa, Vibrio fischeri ES114; identical to SEQ ID NO: 15714

SEQ ID NO: 63884 - DNA, 756 bp, Vibrio fischeri ES114; identical to SEQ ID NO: 15715
  CDS (1)..(756): transl_table=11

SEQ ID NO: 63885 - protein, 251 aa, Vibrio fischeri ES114; identical to SEQ ID NO: 15716

SEQ ID NO: 63886 - DNA, 522 bp, Bacteroides fragilis NCTC 9343; identical to SEQ ID NO: 15717
  CDS (1)..(522): transl_table=11

SEQ ID NO: 63887 - protein, 173 aa, Bacteroides fragilis NCTC 9343; identical to SEQ ID NO: 15718

SEQ ID NO: 63888 - DNA, 600 bp, Bacteroides fragilis NCTC 9343; identical to SEQ ID NO: 15719
  CDS (1)..(600): transl_table=11

SEQ ID NO: 63889 - protein, 199 aa, Bacteroides fragilis NCTC 9343; identical to SEQ ID NO: 15720

SEQ ID NO: 63890 - DNA, 630 bp, Bacteroides fragilis NCTC 9343; identical to SEQ ID NO: 15721
  CDS (1)..(630): transl_table=11

SEQ ID NO: 63891 - protein, 209 aa, Bacteroides fragilis NCTC 9343; identical to SEQ ID NO: 15722

SEQ ID NO: 63892 - DNA, 624 bp, Bacteroides fragilis NCTC 9343; identical to SEQ ID NO: 15723
  CDS (1)..(624): transl_table=11

SEQ ID NO: 63893 - protein, 207 aa, Bacteroides fragilis NCTC 9343; identical to SEQ ID NO: 15724

SEQ ID NO: 63894 - DNA, 552 bp, Bacteroides fragilis NCTC 9343; identical to SEQ ID NO: 15725
  CDS (1)..(552): transl_table=11

SEQ ID NO: 63895 - protein, 183 aa, Bacteroides fragilis NCTC 9343; identical to SEQ ID NO: 15726

SEQ ID NO: 63896 - DNA, 588 bp, Bacteroides fragilis NCTC 9343; identical to SEQ ID NO: 15727
  CDS (1)..(588): transl_table=11

SEQ ID NO: 63897 - protein, 195 aa, Bacteroides fragilis NCTC 9343; identical to SEQ ID NO: 15728

SEQ ID NO: 63898 - DNA, 690 bp, Brucella abortus biovar 1 str. 9-941; identical to SEQ ID NO: 15729
  CDS (1)..(690): transl_table=11

SEQ ID NO: 63899 - protein, 229 aa, Brucella abortus biovar 1 str. 9-941; identical to SEQ ID NO: 15730

SEQ ID NO: 63900 - DNA, 690 bp, Chloroflexus aurantiacus; identical to SEQ ID NO: 15731
  CDS (1)..(690)

SEQ ID NO: 63901 - protein, 229 aa, Chloroflexus aurantiacus; identical to SEQ ID NO: 15732

SEQ ID NO: 63902 - DNA, 564 bp, Chloroflexus aurantiacus; identical to SEQ ID NO: 15733
  CDS (1)..(564)

SEQ ID NO: 63903 - protein, 187 aa, Chloroflexus aurantiacus; identical to SEQ ID NO: 15734

SEQ ID NO: 63904 - DNA, 615 bp, Lactobacillus gasseri; identical to SEQ ID NO: 15735
  CDS (1)..(615)

SEQ ID NO: 63905 - protein, 204 aa, Lactobacillus gasseri; identical to SEQ ID NO: 15736

SEQ ID NO: 63906 - DNA, 606 bp, Magnetospirillum magnetotacticum MS-1; identical to SEQ ID NO: 15737
  CDS (1)..(606)

SEQ ID NO: 63907 - protein, 201 aa, Magnetospirillum magnetotacticum MS-1; identical to SEQ ID NO: 15738

SEQ ID NO: 63908 - DNA, 702 bp, Leuconostoc mesenteroides subsp. mesenteroides ATCC 8293; identical to SEQ ID NO: 15739
  CDS (1)..(702)

SEQ ID NO: 63909 - protein, 233 aa, Leuconostoc mesenteroides subsp. mesenteroides ATCC 8293; identical to SEQ ID NO: 15740

SEQ ID NO: 63910 - DNA, 561 bp, Nostoc punctiforme PCC 73102; identical to SEQ ID NO: 15741
  CDS (1)..(561)

SEQ ID NO: 63911 - protein, 186 aa, Nostoc punctiforme PCC 73102; identical to SEQ ID NO: 15742

SEQ ID NO: 63912 - DNA, 594 bp, Nostoc punctiforme PCC 73102; identical to SEQ ID NO: 15743
  CDS (1)..(594)

SEQ ID NO: 63913 - protein, 197 aa, Nostoc punctiforme PCC 73102; identical to SEQ ID NO: 15744

SEQ ID NO: 63914 - DNA, 702 bp, Nostoc punctiforme PCC 73102; identical to SEQ ID NO: 15745
  CDS (1)..(702)

SEQ ID NO: 63915 - protein, 233 aa, Nostoc punctiforme PCC 73102; identical to SEQ ID NO: 15746

SEQ ID NO: 63916 - DNA, 675 bp, Bifidobacterium longum DJO10A; identical to SEQ ID NO: 15747
  CDS (1)..(675)

SEQ ID NO: 63917 - protein, 224 aa, Bifidobacterium longum DJO10A; identical to SEQ ID NO: 15748

SEQ ID NO: 63918 - DNA, 633 bp, Bifidobacterium longum DJO10A; identical to SEQ ID NO: 15749
  CDS (1)..(633)

SEQ ID NO: 63919 - protein, 210 aa, Bifidobacterium longum DJO10A; identical to SEQ ID NO: 15750

SEQ ID NO: 63920 - DNA, 609 bp, Desulfovibrio desulfuricans G20; identical to SEQ ID NO: 15751
  CDS (1)..(609)

SEQ ID NO: 63921 - protein, 202 aa, Desulfovibrio desulfuricans G20; identical to SEQ ID NO: 15752

SEQ ID NO: 63922 - DNA, 558 bp, Desulfovibrio desulfuricans G20; identical to SEQ ID NO: 15753
  CDS (1)..(558)

SEQ ID NO: 63923 - protein, 185 aa, Desulfovibrio desulfuricans G20; identical to SEQ ID NO: 15754

SEQ ID NO: 63924 - DNA, 576 bp, Anabaena variabilis ATCC 29413; identical to SEQ ID NO: 15755
  CDS (1)..(576)

SEQ ID NO: 63925 - protein, 191 aa, Anabaena variabilis ATCC 29413; identical to SEQ ID NO: 15756

SEQ ID NO: 63926 - DNA, 561 bp, Anabaena variabilis ATCC 29413; identical to SEQ ID NO: 15757
  CDS (1)..(561)

SEQ ID NO: 63927 - protein, 186 aa, Anabaena variabilis ATCC 29413; identical to SEQ ID NO: 15758

SEQ ID NO: 63928 - DNA, 576 bp, Actinobacillus pleuropneumoniae serovar 1 str. 4074; identical to SEQ ID NO: 15759
  CDS (1)..(576)

SEQ ID NO: 63929 - protein, 191 aa, Actinobacillus pleuropneumoniae serovar 1 str. 4074; identical to SEQ ID NO: 15760

SEQ ID NO: 63930 - DNA, 501 bp, Burkholderia cepacia R18194; identical to SEQ ID NO: 15761
  CDS (1)..(501)

SEQ ID NO: 63931 - protein, 166 aa, Burkholderia cepacia R18194; identical to SEQ ID NO: 15762

SEQ ID NO: 63932 - DNA, 609 bp, Burkholderia cepacia R18194; identical to SEQ ID NO: 15763
  CDS (1)..(609)

SEQ ID NO: 63933 - protein, 202 aa, Burkholderia cepacia R18194; identical to SEQ ID NO: 15764

SEQ ID NO: 63934 - DNA, 528 bp, Listeria monocytogenes str. 4b H7858; identical to SEQ ID NO: 15765
  CDS (1)..(528): transl_table=11

SEQ ID NO: 63935 - protein, 175 aa, Listeria monocytogenes str. 4b H7858; identical to SEQ ID NO: 15766

SEQ ID NO: 63936 - DNA, 570 bp, Listeria monocytogenes str. 4b H7858; identical to SEQ ID NO: 15767
  CDS (1)..(570): transl_table=11

SEQ ID NO: 63937 - protein, 189 aa, Listeria monocytogenes str. 4b H7858; identical to SEQ ID NO: 15768

SEQ ID NO: 63938 - DNA, 564 bp, Bacillus cereus G9241; identical to SEQ ID NO: 15769
  CDS (1)..(564): transl_table=11

SEQ ID NO: 63939 - protein, 187 aa, Bacillus cereus G9241; identical to SEQ ID NO: 15770

SEQ ID NO: 63940 - DNA, 558 bp, Bacillus cereus G9241; identical to SEQ ID NO: 15771
  CDS (1)..(558): transl_table=11

SEQ ID NO: 63941 - protein, 185 aa, Bacillus cereus G9241; identical to SEQ ID NO: 15772

SEQ ID NO: 63942 - DNA, 588 bp, Burkholderia fungorum LB400; identical to SEQ ID NO: 15773
  CDS (1)..(588)

SEQ ID NO: 63943 - protein, 195 aa, Burkholderia fungorum LB400; identical to SEQ ID NO: 15774

SEQ ID NO: 63944 - DNA, 555 bp, Thermobifida fusca; identical to SEQ ID NO: 15775
  CDS (1)..(555)

SEQ ID NO: 63945 - protein, 184 aa, Thermobifida fusca; identical to SEQ ID NO: 15776

SEQ ID NO: 63946 - DNA, 513 bp, Cytophaga hutchinsonii; identical to SEQ ID NO: 15777
  CDS (1)..(513)

SEQ ID NO: 63947 - protein, 170 aa, Cytophaga hutchinsonii; identical to SEQ ID NO: 15778

SEQ ID NO: 63948 - DNA, 654 bp, Cytophaga hutchinsonii; identical to SEQ ID NO: 15779
  CDS (1)..(654)

SEQ ID NO: 63949 - protein, 217 aa, Cytophaga hutchinsonii; identical to SEQ ID NO: 15780

SEQ ID NO: 63950 - DNA, 744 bp, Microbulbifer degradans 2-40; identical to SEQ ID NO: 15781
  CDS (1)..(744)

SEQ ID NO: 63951 - protein, 247 aa, Microbulbifer degradans 2-40; identical to SEQ ID NO: 15782

SEQ ID NO: 63952 - DNA, 549 bp, Microbulbifer degradans 2-40; identical to SEQ ID NO: 15783
  CDS (1)..(549)

SEQ ID NO: 63953 - protein, 182 aa, Microbulbifer degradans 2-40; identical to SEQ ID NO: 15784

SEQ ID NO: 63954 - DNA, 417 bp, Oenococcus oeni PSU-1; identical to SEQ ID NO: 15785
  CDS (1)..(417)

SEQ ID NO: 63955 - protein, 138 aa, Oenococcus oeni PSU-1; identical to SEQ ID NO: 15786

SEQ ID NO: 63956 - DNA, 567 bp, Pediococcus pentosaceus ATCC 25745; identical to SEQ ID NO: 15787
  CDS (1)..(567)

SEQ ID NO: 63957 - protein, 188 aa, Pediococcus pentosaceus ATCC 25745; identical to SEQ ID NO: 15788

SEQ ID NO: 63958 - DNA, 555 bp, Pediococcus pentosaceus ATCC 25745; identical to SEQ ID NO: 15789
  CDS (1)..(555)

SEQ ID NO: 63959 - protein, 184 aa, Pediococcus pentosaceus ATCC 25745; identical to SEQ ID NO: 15790

SEQ ID NO: 63960 - DNA, 552 bp, Pediococcus pentosaceus ATCC 25745; identical to SEQ ID NO: 15791
  CDS (1)..(552)

SEQ ID NO: 63961 - protein, 183 aa, Pediococcus pentosaceus ATCC 25745; identical to SEQ ID NO: 15792

SEQ ID NO: 63962 - DNA, 465 bp, Streptococcus suis 89/1591; identical to SEQ ID NO: 15793
  CDS (1)..(465)

SEQ ID NO: 63963 - protein, 154 aa, Streptococcus suis 89/1591; identical to SEQ ID NO: 15794

SEQ ID NO: 63964 - DNA, 606 bp, Desulfovibrio desulfuricans G20; identical to SEQ ID NO: 15795
  CDS (1)..(606)

SEQ ID NO: 63965 - protein, 201 aa, Desulfovibrio desulfuricans G20; identical to SEQ ID NO: 15796

SEQ ID NO: 63966 - DNA, 543 bp, Chloroflexus aurantiacus; identical to SEQ ID NO: 15797
  CDS (1)..(543)

SEQ ID NO: 63967 - protein, 180 aa, Chloroflexus aurantiacus; identical to SEQ ID NO: 15798

SEQ ID NO: 63968 - DNA, 186 bp, Brevibacterium linens BL2; identical to SEQ ID NO: 15799
  CDS (1)..(186)

SEQ ID NO: 63969 - protein, 61 aa, Brevibacterium linens BL2; identical to SEQ ID NO: 15800

SEQ ID NO: 63970 - DNA, 612 bp, Lactococcus lactis subsp. cremoris SK11; identical to SEQ ID NO: 15801
  CDS (1)..(612)

SEQ ID NO: 63971 - protein, 203 aa, Lactococcus lactis subsp. cremoris SK11; identical to SEQ ID NO: 15802

SEQ ID NO: 63972 - DNA, 588 bp, Lactococcus lactis subsp. cremoris SK11; identical to SEQ ID NO: 15803
  CDS (1)..(588)

SEQ ID NO: 63973 - protein, 195 aa, Lactococcus lactis subsp. cremoris SK11; identical to SEQ ID NO: 15804

SEQ ID NO: 63974 - DNA, 597 bp, Lactobacillus casei ATCC 334; identical to SEQ ID NO: 15805
  CDS (1)..(597)

SEQ ID NO: 63975 - protein, 198 aa, Lactobacillus casei ATCC 334; identical to SEQ ID NO: 15806

SEQ ID NO: 63976 - DNA, 705 bp, Lactobacillus casei ATCC 334; identical to SEQ ID NO: 15807
  CDS (1)..(705)

SEQ ID NO: 63977 - protein, 234 aa, Lactobacillus casei ATCC 334; identical to SEQ ID NO: 15808

SEQ ID NO: 63978 - DNA, 591 bp, Lactobacillus delbrueckii subsp. bulgaricus ATCC BAA-365; identical to SEQ ID NO: 15809
  CDS (1)..(591)

SEQ ID NO: 63979 - protein, 196 aa, Lactobacillus delbrueckii subsp. bulgaricus ATCC BAA-365; identical to SEQ ID NO: 15810

SEQ ID NO: 63980 - DNA, 609 bp, Bacillus anthracis str. A2012; identical to SEQ ID NO: 15811
  CDS (1)..(609): Xaa of translated CDS can stand for any naturally occuring amino acid which can be translated from respective CDS-codon

SEQ ID NO: 63981 - protein, 202 aa, Bacillus anthracis str. A2012; identical to SEQ ID NO: 15812
  misc_feature (136)..(136): Xaa can be any naturally occuring amino acid

SEQ ID NO: 63982 - DNA, 534 bp, Anaeromyxobacter dehalogenans 2CP-C; identical to SEQ ID NO: 15813
  CDS (1)..(534): transl_table=11

SEQ ID NO: 63983 - protein, 177 aa, Anaeromyxobacter dehalogenans 2CP-C; identical to SEQ ID NO: 15814

SEQ ID NO: 63984 - DNA, 663 bp, Streptococcus pneumoniae TIGR4; identical to SEQ ID NO: 15815
  CDS (1)..(663)

SEQ ID NO: 63985 - protein, 220 aa, Streptococcus pneumoniae TIGR4; identical to SEQ ID NO: 15816

SEQ ID NO: 63986 - DNA, 558 bp, Burkholderia vietnamiensis G4; identical to SEQ ID NO: 15817
  CDS (1)..(558): transl_table=11

SEQ ID NO: 63987 - protein, 185 aa, Burkholderia vietnamiensis G4; identical to SEQ ID NO: 15818

SEQ ID NO: 63988 - DNA, 576 bp, Crocosphaera watsonii WH 8501; identical to SEQ ID NO: 15819
  CDS (1)..(576): transl_table=11

SEQ ID NO: 63989 - protein, 191 aa, Crocosphaera watsonii WH 8501; identical to SEQ ID NO: 15820

SEQ ID NO: 63990 - DNA, 555 bp, Chlorobium phaeobacteroides DSM 266; identical to SEQ ID NO: 15821
  CDS (1)..(555): transl_table=11

SEQ ID NO: 63991 - protein, 184 aa, Chlorobium phaeobacteroides DSM 266; identical to SEQ ID NO: 15822

SEQ ID NO: 63992 - DNA, 618 bp, Chlorobium phaeobacteroides BS1; identical to SEQ ID NO: 15823
  CDS (1)..(618): transl_table=11

SEQ ID NO: 63993 - protein, 205 aa, Chlorobium phaeobacteroides BS1; identical to SEQ ID NO: 15824

SEQ ID NO: 63994 - DNA, 576 bp, Exiguobacterium sp. 255-15; identical to SEQ ID NO: 15825
  CDS (1)..(576): transl_table=11

SEQ ID NO: 63995 - protein, 191 aa, Exiguobacterium sp. 255-15; identical to SEQ ID NO: 15826

SEQ ID NO: 63996 - DNA, 552 bp, Exiguobacterium sp. 255-15; identical to SEQ ID NO: 15827
  CDS (1)..(552): transl_table=11

SEQ ID NO: 63997 - protein, 183 aa, Exiguobacterium sp. 255-15; identical to SEQ ID NO: 15828

SEQ ID NO: 63998 - DNA, 702 bp, Exiguobacterium sp. 255-15; identical to SEQ ID NO: 15829
  CDS (1)..(702): transl_table=11

SEQ ID NO: 63999 - protein, 233 aa, Exiguobacterium sp. 255-15; identical to SEQ ID NO: 15830

SEQ ID NO: 64000 - DNA, 642 bp, Methanosarcina barkeri str. fusaro; identical to SEQ ID NO: 15831
  CDS (1)..(642): transl_table=11

SEQ ID NO: 64001 - protein, 213 aa, Methanosarcina barkeri str. fusaro; identical to SEQ ID NO: 15832

SEQ ID NO: 64002 - DNA, 600 bp, Methanosarcina barkeri str. fusaro; identical to SEQ ID NO: 15833
  CDS (1)..(600): transl_table=11

SEQ ID NO: 64003 - protein, 199 aa, Methanosarcina barkeri str. fusaro; identical to SEQ ID NO: 15834

SEQ ID NO: 64004 - DNA, 549 bp, Methanosarcina barkeri str. fusaro; identical to SEQ ID NO: 15835
  CDS (1)..(549): transl_table=11

SEQ ID NO: 64005 - protein, 182 aa, Methanosarcina barkeri str. fusaro; identical to SEQ ID NO: 15836

SEQ ID NO: 64006 - DNA, 609 bp, Methanosarcina barkeri str. fusaro; identical to SEQ ID NO: 15837
  CDS (1)..(609): transl_table=11

SEQ ID NO: 64007 - protein, 202 aa, Methanosarcina barkeri str. fusaro; identical to SEQ ID NO: 15838

SEQ ID NO: 64008 - DNA, 531 bp, Desulfuromonas acetoxidans DSM 684; identical to SEQ ID NO: 15839
  CDS (1)..(531): transl_table=11

SEQ ID NO: 64009 - protein, 176 aa, Desulfuromonas acetoxidans DSM 684; identical to SEQ ID NO: 15840

SEQ ID NO: 64010 - DNA, 555 bp, Jannaschia sp. CCS1; identical to SEQ ID NO: 15841
  CDS (1)..(555): transl_table=11

SEQ ID NO: 64011 - protein, 184 aa, Jannaschia sp. CCS1; identical to SEQ ID NO: 15842

SEQ ID NO: 64012 - DNA, 630 bp, Frankia sp. EAN1pec; identical to SEQ ID NO: 15843
  CDS (1)..(630): transl_table=11

SEQ ID NO: 64013 - protein, 209 aa, Frankia sp. EAN1pec; identical to SEQ ID NO: 15844

SEQ ID NO: 64014 - DNA, 555 bp, Shewanella baltica OS155; identical to SEQ ID NO: 15845
  CDS (1)..(555): transl_table=11

SEQ ID NO: 64015 - protein, 184 aa, Shewanella baltica OS155; identical to SEQ ID NO: 15846

SEQ ID NO: 64016 - DNA, 585 bp, Shewanella baltica OS155; identical to SEQ ID NO: 15847
  CDS (1)..(585): transl_table=11

SEQ ID NO: 64017 - protein, 194 aa, Shewanella baltica OS155; identical to SEQ ID NO: 15848

SEQ ID NO: 64018 - DNA, 726 bp, Ralstonia metallidurans CH34; identical to SEQ ID NO: 15849
  CDS (1)..(726): transl_table=11

SEQ ID NO: 64019 - protein, 241 aa, Ralstonia metallidurans CH34; identical to SEQ ID NO: 15850

SEQ ID NO: 64020 - DNA, 549 bp, Paracoccus denitrificans PD1222; identical to SEQ ID NO: 15851
  CDS (1)..(549): transl_table=11

SEQ ID NO: 64021 - protein, 182 aa, Paracoccus denitrificans PD1222; identical to SEQ ID NO: 15852

SEQ ID NO: 64022 - DNA, 615 bp, Shewanella frigidimarina NCIMB 400; identical to SEQ ID NO: 15853
  CDS (1)..(615): transl_table=11

SEQ ID NO: 64023 - protein, 204 aa, Shewanella frigidimarina NCIMB 400; identical to SEQ ID NO: 15854

SEQ ID NO: 64024 - DNA, 777 bp, Escherichia coli; identical to SEQ ID NO: 15855
  CDS (1)..(777): transl_table=11

SEQ ID NO: 64025 - protein, 258 aa, Escherichia coli; identical to SEQ ID NO: 15856

SEQ ID NO: 64026 - DNA, 651 bp, Pseudomonas fluorescens; identical to SEQ ID NO: 15857
  CDS (1)..(651): transl_table=11

SEQ ID NO: 64027 - protein, 216 aa, Pseudomonas fluorescens; identical to SEQ ID NO: 15858

SEQ ID NO: 64028 - DNA, 579 bp, Staphylococcus haemolyticus; identical to SEQ ID NO: 15859
  CDS (1)..(579): transl_table=11

SEQ ID NO: 64029 - protein, 192 aa, Staphylococcus haemolyticus; identical to SEQ ID NO: 15860

SEQ ID NO: 64030 - DNA, 648 bp, Aspergillus fumigatus Af293; identical to SEQ ID NO: 15861
  CDS (1)..(648)

SEQ ID NO: 64031 - protein, 215 aa, Aspergillus fumigatus Af293; identical to SEQ ID NO: 15862

SEQ ID NO: 64032 - DNA, 747 bp, Aspergillus fumigatus Af293; identical to SEQ ID NO: 15863
  CDS (1)..(747)

SEQ ID NO: 64033 - protein, 248 aa, Aspergillus fumigatus Af293; identical to SEQ ID NO: 15864

SEQ ID NO: 64034 - DNA, 687 bp, Aspergillus fumigatus Af293; identical to SEQ ID NO: 15865
  CDS (1)..(687)

SEQ ID NO: 64035 - protein, 228 aa, Aspergillus fumigatus Af293; identical to SEQ ID NO: 15866

SEQ ID NO: 64036 - DNA, 603 bp, Lactobacillus crispatus; identical to SEQ ID NO: 15867
  CDS (1)..(603): transl_table=11

SEQ ID NO: 64037 - protein, 200 aa, Lactobacillus crispatus; identical to SEQ ID NO: 15868

SEQ ID NO: 64038 - DNA, 642 bp, Cryptococcus neoformans var; identical to SEQ ID NO: 15869
  CDS (1)..(642)

SEQ ID NO: 64039 - protein, 213 aa, Cryptococcus neoformans var; identical to SEQ ID NO: 15870

SEQ ID NO: 64040 - DNA, 513 bp, Klebsiella pneumoniae; identical to SEQ ID NO: 15871
  CDS (1)..(513): transl_table=11

SEQ ID NO: 64041 - protein, 170 aa, Klebsiella pneumoniae; identical to SEQ ID NO: 15872

SEQ ID NO: 64042 - DNA, 555 bp, Vibrio cholerae non; identical to SEQ ID NO: 15873
  CDS (1)..(555): transl_table=11

SEQ ID NO: 64043 - protein, 184 aa, Vibrio cholerae non; identical to SEQ ID NO: 15874

SEQ ID NO: 64044 - DNA, 645 bp, Rhizobium etli; identical to SEQ ID NO: 15875
  CDS (1)..(645): transl_table=11

SEQ ID NO: 64045 - protein, 214 aa, Rhizobium etli; identical to SEQ ID NO: 15876

SEQ ID NO: 64046 - DNA, 558 bp, Bacillus stearothermophilus; identical to SEQ ID NO: 15877
  CDS (1)..(558): transl_table=11

SEQ ID NO: 64047 - protein, 185 aa, Bacillus stearothermophilus; identical to SEQ ID NO: 15878

SEQ ID NO: 64048 - DNA, 594 bp, Rhizobium leguminosarum bv; identical to SEQ ID NO: 15879
  CDS (1)..(594): transl_table=11

SEQ ID NO: 64049 - protein, 197 aa, Rhizobium leguminosarum bv; identical to SEQ ID NO: 15880

SEQ ID NO: 64050 - DNA, 573 bp, Dictyostelium discoideum; identical to SEQ ID NO: 15881
  CDS (1)..(573)

SEQ ID NO: 64051 - protein, 190 aa, Dictyostelium discoideum; identical to SEQ ID NO: 15882

SEQ ID NO: 64052 - DNA, 657 bp, Physcomitrella patens; identical to SEQ ID NO: 15883
  CDS (1)..(657)

SEQ ID NO: 64053 - protein, 218 aa, Physcomitrella patens; identical to SEQ ID NO: 15884

SEQ ID NO: 64054 - DNA, 636 bp, Aeromonas hydrophila; identical to SEQ ID NO: 15885
  CDS (1)..(636): transl_table=11

SEQ ID NO: 64055 - protein, 211 aa, Aeromonas hydrophila; identical to SEQ ID NO: 15886

SEQ ID NO: 64056 - DNA, 600 bp, Aeromonas hydrophila; identical to SEQ ID NO: 15887
  CDS (1)..(600): transl_table=11

SEQ ID NO: 64057 - protein, 199 aa, Aeromonas hydrophila; identical to SEQ ID NO: 15888

SEQ ID NO: 64058 - DNA, 678 bp, Corynebacterium glutamicum; identical to SEQ ID NO: 15889
  CDS (1)..(678): transl_table=11

SEQ ID NO: 64059 - protein, 225 aa, Corynebacterium glutamicum; identical to SEQ ID NO: 15890

SEQ ID NO: 64060 - DNA, 624 bp, Lactococcus lactis; identical to SEQ ID NO: 15891
  CDS (1)..(624): transl_table=11

SEQ ID NO: 64061 - protein, 207 aa, Lactococcus lactis; identical to SEQ ID NO: 15892

SEQ ID NO: 64062 - DNA, 621 bp, Candida albicans; identical to SEQ ID NO: 15893
  CDS (1)..(621): transl_table=12

SEQ ID NO: 64063 - protein, 206 aa, Candida albicans; identical to SEQ ID NO: 15894

SEQ ID NO: 64064 - DNA, 519 bp, Staphylococcus aureus; identical to SEQ ID NO: 15895
  CDS (1)..(519): transl_table=11

SEQ ID NO: 64065 - protein, 172 aa, Staphylococcus aureus; identical to SEQ ID NO: 15896

SEQ ID NO: 64066 - DNA, 555 bp, Bacillus subtilis; identical to SEQ ID NO: 15897
  CDS (1)..(555): transl_table=11

SEQ ID NO: 64067 - protein, 184 aa, Bacillus subtilis; identical to SEQ ID NO: 15898

SEQ ID NO: 64068 - DNA, 552 bp, Escherichia coli; identical to SEQ ID NO: 15433
  CDS (1)..(552)

SEQ ID NO: 64069 - protein, 183 aa, Escherichia coli; identical to SEQ ID NO: 15434

SEQ ID NO: 64070 - DNA, 573 bp, Rhizobium leguminosarum bv; identical to SEQ ID NO: 15901
  CDS (1)..(573): transl_table=11

SEQ ID NO: 64071 - protein, 190 aa, Rhizobium leguminosarum bv; identical to SEQ ID NO: 15902

SEQ ID NO: 64072 - DNA, 552 bp, Rhizobium meliloti; identical to SEQ ID NO: 15903
  CDS (1)..(552): transl_table=11

SEQ ID NO: 64073 - protein, 183 aa, Rhizobium meliloti; identical to SEQ ID NO: 15904

SEQ ID NO: 64074 - DNA, 624 bp, Lactococcus lactis subsp; identical to SEQ ID NO: 15905
  CDS (1)..(624): transl_table=11

SEQ ID NO: 64075 - protein, 207 aa, Lactococcus lactis subsp; identical to SEQ ID NO: 15906

SEQ ID NO: 64076 - DNA, 645 bp, Methanococcus jannaschii; identical to SEQ ID NO: 15907
  CDS (1)..(645): transl_table=11

SEQ ID NO: 64077 - protein, 214 aa, Methanococcus jannaschii; identical to SEQ ID NO: 15908

SEQ ID NO: 64078 - DNA, 624 bp, Schizosaccharomyces pombe; identical to SEQ ID NO: 15909
  CDS (1)..(624)

SEQ ID NO: 64079 - protein, 207 aa, Schizosaccharomyces pombe; identical to SEQ ID NO: 15910

SEQ ID NO: 64080 - DNA, 591 bp, Saccharomyces cerevisiae; identical to SEQ ID NO: 15911
  CDS (1)..(591)

SEQ ID NO: 64081 - protein, 196 aa, Saccharomyces cerevisiae; identical to SEQ ID NO: 15912

SEQ ID NO: 64082 - DNA, 25 bp, Artificial sequence
  Primer sequence
atgaacatgccaatgaccgaaagaa

SEQ ID NO: 64083 - DNA, 28 bp, Artificial sequence
  Primer sequence
ttaaactgacgattcaactttataatct

SEQ ID NO: 64084 - protein, 204 aa, Artificial sequence; identical to SEQ ID NO: 15915
  Consensus
  Variant (2)..(4): Xaa in position 2 to 4 is any amino acid
  Variant (5)..(9): Xaa in position 5 to 9 is any or no amino acid
  Variant (11)..(26): Xaa in position 11 to 26 is any or no amino acid
  Variant (28)..(28): Xaa in position 28 is any amino acid
  Variant (31)..(41): Xaa in position 31 to 41 is any amino acid
  Variant (42)..(92): Xaa in position 42 to 92 is any or no amino acid
  Variant (94)..(94): Xaa in position 94 is any or no amino acid
  Variant (97)..(97): Xaa in position 97 is any amino acid
  Variant (98)..(101): Xaa in position 98 to 101 is any or no amino acid
  Variant (103)..(106): Xaa in position 103 to 106 is any amino acid
  Variant (108)..(109): Xaa in position 108 to 109 is any amino acid
  Variant (110)..(112): Xaa in position 110 to 112 is any or no amino acid
  Variant (114)..(119): Xaa in position 114 to 119 is any amino acid
  Variant (120)..(152): Xaa in position 120 to 152 is any or no amino acid
  Variant (154)..(154): Xaa in position 154 is any amino acid
  Variant (156)..(159): Xaa in position 156 to 159 is any amino acid
  Variant (163)..(166): Xaa in position 163 to 166 is any or no amino acid
  Variant (168)..(169): Xaa in position 168 to 169 is any or no amino acid
  Variant (172)..(172): Xaa in position 172 is any or no amino acid
  Variant (175)..(177): Xaa in position 175 to 177 is any or no amino acid
  Variant (188)..(188): Xaa in position 188 is any amino acid
  Variant (191)..(193): Xaa in position 191 to 193 is any amino acid
  Variant (195)..(196): Xaa in position 195 to 196 is any amino acid
  Variant (198)..(198): Xaa in position 198 is any amino acid
  Variant (200)..(200): Xaa in position 200 is any amino acid

SEQ ID NO: 64085 - protein, 12 aa, Artificial sequence
  Consensus
  Variant (2)..(2): Xaa in position 2 is any or no amino acid
  Variant (4)..(5): Xaa in position 4 to 5 is any amino acid
  Variant (6)..(6): Xaa in position 6 is Ala, Cys, Thr or Val
  Variant (7)..(7): Xaa in position 7 is any amino acid
  Variant (8)..(8): Xaa in position 8 is Phe, Ile, Leu, Met or Val
  Variant (9)..(11): Xaa in position 9 to 11 is any amino acid
  Variant (12)..(12): Xaa in position 12 is Ala, Cys, Asp, Gly, Asn, Ser, Thr or Val
IXGXXXXXXXXX

SEQ ID NO: 64086 - protein, 43 aa, Artificial sequence; identical to SEQ ID NO: 15917
  Consensus
  Variant (2)..(2): Xaa in position 2 is any amino acid
  Variant (3)..(4): Xaa in position 3 to 4 is any or no amino acid
  Variant (6)..(10): Xaa in position 6 to 10 is any amino acid
  Variant (11)..(12): Xaa in position 11 to 12 is any or no amino acid
  Variant (14)..(14): Xaa in position 14 is Ala, Ile or Val
  Variant (15)..(15): Xaa in position 15 is any amino acid
  Variant (16)..(16): Xaa in position 16 is Ile, Leu or Val
  Variant (17)..(17): Xaa in position 17 is Asp, Gly or Thr
  Variant (18)..(19): Xaa in position 18 to 19 is any amino acid
  Variant (20)..(20): Xaa in position 20 is Ala, Cys, Gly, Ser, Thr or Val
  Variant (21)..(21): Xaa in position 21 is any amino acid
  Variant (22)..(22): Xaa in position 22 is Ala, Ile, Leu or Val
  Variant (23)..(23): Xaa in position 23 is Ala, Gly or Ser
  Variant (24)..(25): Xaa in position 24 to 25 is any amino acid
  Variant (26)..(26): Xaa in position 26 is Ala, Cys, Ser or Thr
  Variant (27)..(27): Xaa in position 27 is any amino acid
  Variant (28)..(28): Xaa in position 28 is Ala, Ile or Val
  Variant (29)..(31): Xaa in position 29 to 31 is any amino acid
  Variant (32)..(32): Xaa in position 32 is Phe, Ile, Leu, Met or Val
  Variant (33)..(39): Xaa in position 33 to 39 is any amino acid
  Variant (41)..(41): Xaa in position 41 is any amino acid
  Variant (43)..(43): Xaa in position 43 is Ala, Cys or Gly

SEQ ID NO: 64087 - DNA, 414 bp, Escherichia coli
  CDS (1)..(414)
atgaacaatttaattattacgacccgacaatcaccagtacgtttactggttgattatgttgccacaaccatcttgtggacattatttgcgttgttcatattcttattcgccatggatctgctgacgggttattactggcaaagcgaggccagaagccgacttcagttctattttttgctggcagtggcgaatgccgtcgtgttaattgtctgggcgctgtacaataagctgcgttttcaaaaacagcagcatcatgcagcctaccaatatacgccgcaagaatatgcagagagcttagcaatacctgatgagctctatcagcaactacaaaaaagccacaggatgagcgtacacttcaccagccaggggcaaataaaaatggttgtttcagaaaaagcgctagtccgggcataa

SEQ ID NO: 64088 - protein, 137 aa, Escherichia coli
MNNLIITTRQSPVRLLVDYVATTILWTLFALFIFLFAMDLLTGYYWQSEARSRLQFYFLLAVANAVVLIVWALYNKLRFQKQQHHAAYQYTPQEYAESLAIPDELYQQLQKSHRMSVHFTSQGQIKMVVSEKALVRA

SEQ ID NO: 64089 - DNA, 468 bp, Yersinia pestis KIM
  CDS (1)..(468): transl_table=11
atgagtacgcccctgatttttacggaacagcgtctgctaccgcgctggattgacattatcattacggcgttagcctggtttggttttgtcttcctgctggtgcggggctttttggaaatgattagccgagcgccacatatggggccgataccgttgaggatttatattctcagcggtttgacgacgattgcattatatctggcgatagcggcatttaatgccgtcgtactgattatctgggccaaatacaatcaggtccgtttccaggttgaacgccgtggccaccgacccgatctggatgatgatgaattggcaagcagcatggcgctttcacctgagttgatcgcccaactcaaaagtggctcgtgtctcacgttatacaatgatgagcacgggcatttattggatgtgaaagaggggctccaactgccagaagttgctccagtgatccatttacgccagggatga

SEQ ID NO: 64090 - protein, 155 aa, Yersinia pestis KIM
MSTPLIFTEQRLLPRWIDIIITALAWFGFVFLLVRGFLEMISRAPHMGPIPLRIYILSGLTTIALYLAIAAFNAVVLIIWAKYNQVRFQVERRGHRPDLDDDELASSMALSPELIAQLKSGSCLTLYNDEHGHLLDVKEGLQLPEVAPVIHLRQG

SEQ ID NO: 64091 - DNA, 468 bp, Yersinia pseudotuberculosis IP 32953
  CDS (1)..(468): transl_table=11
atgagtacgcccctgatttttacggaacagcgtctgctaccgcgctggattgacattatcattacggcgttagcctggtttggttttatcttcctgctggtgcggggctttttggaaatgattagccgagcgccacatatggggccgataccgttgaggatttatattctcagcggtttgacgacgattgcattatatctggcgatagcggcatttaatgccgtcgtactgattatctgggccaaatacaatcaggtccgtttccaggttgaacgccgtggccaccgacccgatctggatgatgatgaattggcaagcagcatggcgctttcacctgagttgatcgcccaactcaaaagtggctcgtgtctcacgttatacaatgatgagcacgggcatttattggatgtgaaagaggggctccaactgccagaagttgctccagtgatccatttacgccagggatga

SEQ ID NO: 64092 - protein, 155 aa, Yersinia pseudotuberculosis IP 32953
MSTPLIFTEQRLLPRWIDIIITALAWFGFIFLLVRGFLEMISRAPHMGPIPLRIYILSGLTTIALYLAIAAFNAVVLIIWAKYNQVRFQVERRGHRPDLDDDELASSMALSPELIAQLKSGSCLTLYNDEHGHLLDVKEGLQLPEVAPVIHLRQG

SEQ ID NO: 64093 - DNA, 525 bp, Pseudomonas fluorescens Pf-5
  CDS (1)..(525): transl_table=11
atgaaaatcatccgaacccgccagcgtccgttcatggtgatcgtcgacgttgtcctcaccgtactggcctgggtaggcctgctgtacttgctggttcgtgggctcattccgctgctggacagccatgaagggccgcggatcgaagcgggcatgctcgatgccctgaccaccctgcagttctatgcctgggtggcggtactcaatgcggtgctgctgatttcctgggcccgctaccgccagcgtcgcaacaagagctacccgccccggctgccggcacccgtggtggacgacaagcgcctgagcgaaaccttcaagctcaacgacgcgaccttcgcccagatgcgccagcccggcaccatgatcgtgcacaacgacgaggaaggcggtatcagccacgtcaccacgcagttctatcgcattcttcccgaagaccagcagcacccgccgctaagggtggaaccgccaccgcgggtgatccatctgcgttcggaaggggatgaaggcaagaagacaggagaagattga

SEQ ID NO: 64094 - protein, 174 aa, Pseudomonas fluorescens Pf-5
MKIIRTRQRPFMVIVDVVLTVLAWVGLLYLLVRGLIPLLDSHEGPRIEAGMLDALTTLQFYAWVAVLNAVLLISWARYRQRRNKSYPPRLPAPVVDDKRLSETFKLNDATFAQMRQPGTMIVHNDEEGGISHVTTQFYRILPEDQQHPPLRVEPPPRVIHLRSEGDEGKKTGED

SEQ ID NO: 64095 - DNA, 534 bp, Pseudomonas fluorescens PfO-1
  CDS (1)..(534)
atgaaaatcatccggacccggcaacgaccgtttctggtgctgctcgatgcgttcttcaccgtgctggcctggatcggcctgctgtatctgctggtacgcggtctgtggccgctgattgatactcacgaaggtgggccacgcctcgacaactcggcgttcgaagccctcggcaccttgcagatttacctgtgggtggcggtggtcaacgcggtgatcctgatcggctgggcgcgctatcagcaacgcaagagccgcagcttcgcccagcgccgcctgccgtccccggtggtcgacgatgaagggctgagccgcagcttcaaactgtgcgacgagcgctttcagaaactgcgcgggccgggcgtgatgaccatccacaacgatcaggacggcgatgtcagtcatgtggtgccgcatctgtggccggttcagccgcaggagctgccatcaccgctggccccgctggaacatcctcgggtgatctttctgcacgccgaggacgacgacaaccgcgagccgcttaaccggatcacctga

SEQ ID NO: 64096 - protein, 177 aa, Pseudomonas fluorescens PfO-1
MKIIRTRQRPFLVLLDAFFTVLAWIGLLYLLVRGLWPLIDTHEGGPRLDNSAFEALGTLQIYLWVAVVNAVILIGWARYQQRKSRSFAQRRLPSPVVDDEGLSRSFKLCDERFQKLRGPGVMTIHNDQDGDVSHVVPHLWPVQPQELPSPLAPLEHPRVIFLHAEDDDNREPLNRIT

SEQ ID NO: 64097 - DNA, 26 bp, Artificial sequence
  Primer sequence
atgaacaatttaattattacgacccg

SEQ ID NO: 64098 - DNA, 23 bp, Artificial sequence
  Primer sequence
ttatgcccggactagcgcttttt

SEQ ID NO: 64099 - protein, 134 aa, Artificial sequence
  Consensus
  Variant (2)..(2): Xaa in position 2 is any amino acid
  Variant (4)..(4): Xaa in position 4 is any amino acid
  Variant (7)..(12): Xaa in position 7 to 12 is any amino acid
  Variant (14)..(16): Xaa in position 14 to 16 is any amino acid
  Variant (18)..(18): Xaa in position 18 is any amino acid
  Variant (22)..(22): Xaa in position 22 is any amino acid
  Variant (24)..(26): Xaa in position 24 to 26 is any amino acid
  Variant (32)..(38): Xaa in position 32 to 38 is any amino acid
  Variant (39)..(40): Xaa in position 39 to 40 is any or no amino acid
  Variant (42)..(42): Xaa in position 42 is any amino acid
  Variant (44)..(47): Xaa in position 44 to 47 is any amino acid
  Variant (48)..(54): Xaa in position 48 to 54 is any or no amino acid
  Variant (56)..(56): Xaa in position 56 is any amino acid
  Variant (58)..(60): Xaa in position 58 to 60 is any amino acid
  Variant (62)..(64): Xaa in position 62 to 64 is any amino acid
  Variant (66)..(67): Xaa in position 66 to 67 is any amino acid
  Variant (71)..(71): Xaa in position 71 is any amino acid
  Variant (74)..(74): Xaa in position 74 is any amino acid
  Variant (77)..(77): Xaa in position 77 is any amino acid
  Variant (79)..(81): Xaa in position 79 to 81 is any amino acid
  Variant (82)..(83): Xaa in position 82 to 83 is any or no amino acid
  Variant (85)..(89): Xaa in position 85 to 89 is any amino acid
  Variant (91)..(93): Xaa in position 91 to 93 is any amino acid
  Variant (95)..(96): Xaa in position 95 to 96 is any amino acid
  Variant (99)..(100): Xaa in position 99 to 100 is any amino acid
  Variant (102)..(103): Xaa in position 102 to 103 is any amino acid
  Variant (105)..(106): Xaa in position 105 to 106 is any amino acid
  Variant (108)..(109): Xaa in position 108 to 109 is any amino acid
  Variant (111)..(113): Xaa in position 111 to 113 is any amino acid
  Variant (116)..(124): Xaa in position 116 to 124 is any amino acid
  Variant (127)..(128): Xaa in position 127 to 128 is any amino acid
  Variant (130)..(133): Xaa in position 130 to 133 is any amino acid
IXTXQRXXXXXXDXXXTXLAWXGXXXLLVRGXXXXXXXXXHXGXXXXXXXXXXXLXTXXXYXXXAXXNAVXLIXWAXYXXXXXRXXXXXRXXXPXXDDXXLXXSXXLXXEXXXQLXXXXXXXXXNDXXGXXXXV

SEQ ID NO: 64100 - protein, 21 aa, Artificial sequence
  Consensus
  Variant (2)..(2): Xaa in position 2 is any amino acid
  Variant (4)..(4): Xaa in position 4 is Glu or Arg
  Variant (7)..(7): Xaa in position 7 is Leu or Pro
  Variant (8)..(8): Xaa in position 8 is Phe or Leu
  Variant (9)..(11): Xaa in position 9 to 11 is any amino acid
  Variant (12)..(12): Xaa in position 12 is Ile, Leu or Val
  Variant (14)..(14): Xaa in position 14 is Ala, Ile or Val
  Variant (15)..(15): Xaa in position 15 is Phe, Ile or Val
  Variant (16)..(16): Xaa in position 16 is Phe, Ile or Leu
  Variant (18)..(18): Xaa in position 18 is Ala or Val
IXTXQRXXXXXXDXXXTXLAW

SEQ ID NO: 64101 - protein, 18 aa, Artificial sequence
  Consensus
  Variant (2)..(2): Xaa in position 2 is Phe or Leu
  Variant (3)..(3): Xaa in position 3 is any amino acid
  Variant (4)..(4): Xaa in position 4 is Ile, Leu or Val
  Variant (6)..(8): Xaa in position 6 to 8 is any or no amino acid
  Variant (11)..(11): Xaa in position 11 is Ile or Val
  Variant (14)..(14): Xaa in position 14 is Gly, Ile or Val
  Variant (17)..(17): Xaa in position 17 is any amino acid
YXXXAXXXAVXLIXWAXY

SEQ ID NO: 64102 - protein, 10 aa, Artificial sequence
  Consensus
  Variant (3)..(3): Xaa in position 3 is Glu or Gln
  Variant (4)..(4): Xaa in position 4 is Asp, Glu or His
  Variant (6)..(8): Xaa in position 6 to 8 is any or no amino acid
  Variant (10)..(10): Xaa in position 10 is Leu or Val
NDXXGXXXHX

SEQ ID NO: 64103 - DNA, 1071 bp, Escherichia coli K12; identical to SEQ ID NO: 23463
  CDS (1)..(1071)

SEQ ID NO: 64104 - protein, 356 aa, Escherichia coli K12; identical to SEQ ID NO: 23464

SEQ ID NO: 64105 - DNA, 1068 bp, Yersinia pestis; identical to SEQ ID NO: 23465
  CDS (1)..(1068)

SEQ ID NO: 64106 - protein, 355 aa, Yersinia pestis; identical to SEQ ID NO: 23466

SEQ ID NO: 64107 - DNA, 1068 bp, Salmonella enterica subsp. enterica serovar Typhi; identical to SEQ ID NO: 23467
  CDS (1)..(1068)

SEQ ID NO: 64108 - protein, 355 aa, Salmonella enterica subsp. enterica serovar Typhi; identical to SEQ ID NO: 23468

SEQ ID NO: 64109 - DNA, 1074 bp, Vibrio cholerae; identical to SEQ ID NO: 23469
  CDS (1)..(1074)

SEQ ID NO: 64110 - protein, 357 aa, Vibrio cholerae; identical to SEQ ID NO: 23470

SEQ ID NO: 64111 - DNA, 1128 bp, Xylella fastidiosa; identical to SEQ ID NO: 23471
  CDS (1)..(1128)

SEQ ID NO: 64112 - protein, 375 aa, Xylella fastidiosa; identical to SEQ ID NO: 23472

SEQ ID NO: 64113 - DNA, 1065 bp, Salmonella typhimurium; identical to SEQ ID NO: 23473
  CDS (1)..(1065)

SEQ ID NO: 64114 - protein, 354 aa, Salmonella typhimurium; identical to SEQ ID NO: 23474

SEQ ID NO: 64115 - DNA, 1059 bp, Campylobacter jejuni; identical to SEQ ID NO: 23475
  CDS (1)..(1059)

SEQ ID NO: 64116 - protein, 352 aa, Campylobacter jejuni; identical to SEQ ID NO: 23476

SEQ ID NO: 64117 - DNA, 1089 bp, Haemophilus influenzae; identical to SEQ ID NO: 23477
  CDS (1)..(1089)

SEQ ID NO: 64118 - protein, 362 aa, Haemophilus influenzae; identical to SEQ ID NO: 23478

SEQ ID NO: 64119 - DNA, 1125 bp, Bacteroides fragilis; identical to SEQ ID NO: 23479
  CDS (1)..(1125)

SEQ ID NO: 64120 - protein, 374 aa, Bacteroides fragilis; identical to SEQ ID NO: 23480

SEQ ID NO: 64121 - DNA, 1098 bp, Mannheimia succiniciproducens MBEL55E; identical to SEQ ID NO: 23481
  CDS (1)..(1098)

SEQ ID NO: 64122 - protein, 365 aa, Mannheimia succiniciproducens MBEL55E; identical to SEQ ID NO: 23482

SEQ ID NO: 64123 - DNA, 1068 bp, Erwinia carotovora; identical to SEQ ID NO: 23483
  CDS (1)..(1068)

SEQ ID NO: 64124 - protein, 355 aa, Erwinia carotovora; identical to SEQ ID NO: 23484

SEQ ID NO: 64125 - DNA, 1125 bp, Bacteroides thetaiotaomicron; identical to SEQ ID NO: 23485
  CDS (1)..(1125)

SEQ ID NO: 64126 - protein, 374 aa, Bacteroides thetaiotaomicron; identical to SEQ ID NO: 23486

SEQ ID NO: 64127 - DNA, 1068 bp, Buchnera aphidicola; identical to SEQ ID NO: 23487
  CDS (1)..(1068)

SEQ ID NO: 64128 - protein, 355 aa, Buchnera aphidicola; identical to SEQ ID NO: 23488

SEQ ID NO: 64129 - DNA, 1074 bp, Buchnera aphidicola; identical to SEQ ID NO: 23489
  CDS (1)..(1074)

SEQ ID NO: 64130 - protein, 357 aa, Buchnera aphidicola; identical to SEQ ID NO: 23490

SEQ ID NO: 64131 - DNA, 1074 bp, Candidatus Blochmannia floridanus; identical to SEQ ID NO: 23491
  CDS (1)..(1074)

SEQ ID NO: 64132 - protein, 357 aa, Candidatus Blochmannia floridanus; identical to SEQ ID NO: 23492

SEQ ID NO: 64133 - DNA, 1092 bp, Pasteurella multocida; identical to SEQ ID NO: 23493
  CDS (1)..(1092)

SEQ ID NO: 64134 - protein, 363 aa, Pasteurella multocida; identical to SEQ ID NO: 23494

SEQ ID NO: 64135 - DNA, 1068 bp, Photorhabdus luminescens; identical to SEQ ID NO: 23495
  CDS (1)..(1068)

SEQ ID NO: 64136 - protein, 355 aa, Photorhabdus luminescens; identical to SEQ ID NO: 23496

SEQ ID NO: 64137 - DNA, 1086 bp, Photobacterium profundum; identical to SEQ ID NO: 23497
  CDS (1)..(1086)

SEQ ID NO: 64138 - protein, 361 aa, Photobacterium profundum; identical to SEQ ID NO: 23498

SEQ ID NO: 64139 - DNA, 1092 bp, Shewanella oneidensis; identical to SEQ ID NO: 23499
  CDS (1)..(1092)

SEQ ID NO: 64140 - protein, 363 aa, Shewanella oneidensis; identical to SEQ ID NO: 23500

SEQ ID NO: 64141 - DNA, 1074 bp, Vibrio vulnificus; identical to SEQ ID NO: 23501
  CDS (1)..(1074)

SEQ ID NO: 64142 - protein, 357 aa, Vibrio vulnificus; identical to SEQ ID NO: 23502

SEQ ID NO: 64143 - DNA, 1128 bp, Xanthomonas campestris; identical to SEQ ID NO: 23503
  CDS (1)..(1128)

SEQ ID NO: 64144 - protein, 375 aa, Xanthomonas campestris; identical to SEQ ID NO: 23504

SEQ ID NO: 64145 - DNA, 27 bp, Artificial sequence
  Primer sequence
atgatgagtcagaagtatctttttatc

SEQ ID NO: 64146 - DNA, 23 bp, Artificial sequence
  Primer sequence
ttacagcactcctttcgacgagg

SEQ ID NO: 64147 - protein, 392 aa, Artificial sequence; identical to SEQ ID NO: 23507
  Consensus
  Variant (6)..(8): Xaa in position 6 to 8 is any amino acid
  Variant (11)..(14): Xaa in position 11 to 14 is any amino acid
  Variant (16)..(16): Xaa in position 16 is any amino acid
  Variant (18)..(20): Xaa in position 18 to 20 is any amino acid
  Variant (23)..(47): Xaa in position 23 to 47 is any amino acid
  Variant (50)..(50): Xaa in position 50 is any amino acid
  Variant (54)..(57): Xaa in position 54 to 57 is any amino acid
  Variant (59)..(61): Xaa in position 59 to 61 is any amino acid
  Variant (63)..(68): Xaa in position 63 to 68 is any amino acid
  Variant (70)..(76): Xaa in position 70 to 76 is any amino acid
  Variant (78)..(79): Xaa in position 78 to 79 is any amino acid
  Variant (81)..(84): Xaa in position 81 to 84 is any amino acid
  Variant (86)..(96): Xaa in position 86 to 96 is any amino acid
  Variant (100)..(117): Xaa in position 100 to 117 is any amino acid
  Variant (119)..(121): Xaa in position 119 to 121 is any amino acid
  Variant (125)..(126): Xaa in position 125 to 126 is any amino acid
  Variant (128)..(163): Xaa in position 128 to 163 is any amino acid
  Variant (165)..(185): Xaa in position 165 to 185 is any amino acid
  Variant (187)..(191): Xaa in position 187 to 191 is any amino acid
  Variant (193)..(193): Xaa in position 193 is any amino acid
  Variant (195)..(195): Xaa in position 195 is any amino acid
  Variant (198)..(204): Xaa in position 198 to 204 is any amino acid
  Variant (206)..(214): Xaa in position 206 to 214 is any amino acid
  Variant (217)..(219): Xaa in position 217 to 219 is any amino acid
  Variant (221)..(221): Xaa in position 221 is any amino acid
  Variant (225)..(225): Xaa in position 225 is any amino acid
  Variant (227)..(229): Xaa in position 227 to 229 is any amino acid
  Variant (231)..(240): Xaa in position 231 to 240 is any amino acid
  Variant (243)..(245): Xaa in position 243 to 245 is any amino acid
  Variant (247)..(247): Xaa in position 247 is any amino acid
  Variant (250)..(251): Xaa in position 250 to 251 is any amino acid
  Variant (254)..(264): Xaa in position 254 to 264 is any amino acid
  Variant (266)..(268): Xaa in position 266 to 268 is any amino acid
  Variant (270)..(270): Xaa in position 270 is any amino acid
  Variant (272)..(273): Xaa in position 272 to 273 is any amino acid
  Variant (275)..(293): Xaa in position 275 to 293 is any amino acid
  Variant (295)..(296): Xaa in position 295 to 296 is any amino acid
  Variant (301)..(308): Xaa in position 301 to 308 is any amino acid
  Variant (310)..(312): Xaa in position 310 to 312 is any amino acid
  Variant (314)..(327): Xaa in position 314 to 327 is any amino acid
  Variant (329)..(336): Xaa in position 329 to 336 is any amino acid
  Variant (340)..(340): Xaa in position 340 is any amino acid
  Variant (342)..(349): Xaa in position 342 to 349 is any amino acid
  Variant (351)..(355): Xaa in position 351 to 355 is any amino acid
  Variant (357)..(357): Xaa in position 357 is any amino acid
  Variant (359)..(359): Xaa in position 359 is any amino acid
  Variant (362)..(363): Xaa in position 362 to 363 is any amino acid
  Variant (365)..(366): Xaa in position 365 to 366 is any amino acid
  Variant (369)..(390): Xaa in position 369 to 390 is any amino acid

SEQ ID NO: 64148 - protein, 397 aa, Artificial sequence; identical to SEQ ID NO: 23508
  Consensus
  Variant (11)..(11): Xaa in position 11 is any amino acid
  Variant (14)..(15): Xaa in position 14 to 15 is any amino acid
  Variant (17)..(17): Xaa in position 17 is any amino acid
  Variant (19)..(19): Xaa in position 19 is any amino acid
  Variant (21)..(23): Xaa in position 21 to 23 is any amino acid
  Variant (26)..(30): Xaa in position 26 to 30 is any amino acid
  Variant (34)..(34): Xaa in position 34 is any amino acid
  Variant (36)..(37): Xaa in position 36 to 37 is any amino acid
  Variant (39)..(46): Xaa in position 39 to 46 is any amino acid
  Variant (49)..(50): Xaa in position 49 to 50 is any amino acid
  Variant (58)..(58): Xaa in position 58 is any amino acid
  Variant (60)..(60): Xaa in position 60 is any amino acid
  Variant (62)..(64): Xaa in position 62 to 64 is any amino acid
  Variant (66)..(67): Xaa in position 66 to 67 is any amino acid
  Variant (70)..(71): Xaa in position 70 to 71 is any amino acid
  Variant (73)..(77): Xaa in position 73 to 77 is any amino acid
  Variant (81)..(82): Xaa in position 81 to 82 is any amino acid
  Variant (84)..(86): Xaa in position 84 to 86 is any amino acid
  Variant (92)..(96): Xaa in position 92 to 96 is any amino acid
  Variant (98)..(98): Xaa in position 98 is any amino acid
  Variant (103)..(105): Xaa in position 103 to 105 is any amino acid
  Variant (107)..(109): Xaa in position 107 to 109 is any amino acid
  Variant (111)..(116): Xaa in position 111 to 116 is any amino acid
  Variant (118)..(120): Xaa in position 118 to 120 is any amino acid
  Variant (122)..(122): Xaa in position 122 is any amino acid
  Variant (128)..(128): Xaa in position 128 is any amino acid
  Variant (131)..(132): Xaa in position 131 to 132 is any amino acid
  Variant (135)..(135): Xaa in position 135 is any amino acid
  Variant (137)..(138): Xaa in position 137 to 138 is any amino acid
  Variant (140)..(143): Xaa in position 140 to 143 is any amino acid
  Variant (145)..(166): Xaa in position 145 to 166 is any amino acid
  Variant (168)..(169): Xaa in position 168 to 169 is any amino acid
  Variant (171)..(173): Xaa in position 171 to 173 is any amino acid
  Variant (175)..(188): Xaa in position 175 to 188 is any amino acid
  Variant (190)..(190): Xaa in position 190 is any amino acid
  Variant (192)..(192): Xaa in position 192 is any amino acid
  Variant (194)..(194): Xaa in position 194 is any amino acid
  Variant (196)..(196): Xaa in position 196 is any amino acid
  Variant (201)..(201): Xaa in position 201 is any amino acid
  Variant (203)..(203): Xaa in position 203 is any amino acid
  Variant (205)..(207): Xaa in position 205 to 207 is any amino acid
  Variant (210)..(215): Xaa in position 210 to 215 is any amino acid
  Variant (217)..(217): Xaa in position 217 is any amino acid
  Variant (220)..(221): Xaa in position 220 to 221 is any amino acid
  Variant (228)..(228): Xaa in position 228 is any amino acid
  Variant (232)..(232): Xaa in position 232 is any amino acid
  Variant (234)..(234): Xaa in position 234 is any amino acid
  Variant (236)..(243): Xaa in position 236 to 243 is any amino acid
  Variant (247)..(247): Xaa in position 247 is any amino acid
  Variant (250)..(250): Xaa in position 250 is any amino acid
  Variant (254)..(254): Xaa in position 254 is any amino acid
  Variant (258)..(258): Xaa in position 258 is any amino acid
  Variant (263)..(263): Xaa in position 263 is any amino acid
  Variant (265)..(267): Xaa in position 265 to 267 is any amino acid
  Variant (271)..(271): Xaa in position 271 is any amino acid
  Variant (276)..(276): Xaa in position 276 is any amino acid
  Variant (278)..(296): Xaa in position 278 to 296 is any amino acid
  Variant (299)..(299): Xaa in position 299 is any amino acid
  Variant (305)..(306): Xaa in position 305 to 306 is any amino acid
  Variant (308)..(308): Xaa in position 308 is any amino acid
  Variant (310)..(310): Xaa in position 310 is any amino acid
  Variant (313)..(313): Xaa in position 313 is any amino acid
  Variant (318)..(322): Xaa in position 318 to 322 is any amino acid
  Variant (324)..(324): Xaa in position 324 is any amino acid
  Variant (326)..(330): Xaa in position 326 to 330 is any amino acid
  Variant (332)..(334): Xaa in position 332 to 334 is any amino acid
  Variant (338)..(339): Xaa in position 338 to 339 is any amino acid
  Variant (343)..(343): Xaa in position 343 is any amino acid
  Variant (346)..(352): Xaa in position 346 to 352 is any amino acid
  Variant (356)..(358): Xaa in position 356 to 358 is any amino acid
  Variant (360)..(360): Xaa in position 360 is any amino acid
  Variant (365)..(366): Xaa in position 365 to 366 is any amino acid
  Variant (368)..(368): Xaa in position 368 is any amino acid
  Variant (372)..(374): Xaa in position 372 to 374 is any amino acid
  Variant (376)..(376): Xaa in position 376 is any amino acid
  Variant (378)..(378): Xaa in position 378 is any amino acid
  Variant (381)..(386): Xaa in position 381 to 386 is any amino acid
  Variant (388)..(389): Xaa in position 388 to 389 is any amino acid
  Variant (396)..(396): Xaa in position 396 is any amino acid

SEQ ID NO: 64149 - protein, 25 aa, Artificial sequence
  Consensus
  Variant (1)..(1): Xaa in position 1 is Leu or Val
  Variant (2)..(2): Xaa in position 2 is Phe or Leu
  Variant (3)..(3): Xaa in position 3 is Ile or Val
  Variant (9)..(9): Xaa in position 9 is Leu or Ile
  Variant (10)..(10): Xaa in position 10 is Ile or Val
  Variant (11)..(11): Xaa in position 11 is any amino acid
  Variant (14)..(14): Xaa in position 14 is any amino acid
  Variant (15)..(15): Xaa in position 15 is any or no amino acid
  Variant (16)..(16): Xaa in position 16 is Asp or Asn
  Variant (17)..(17): Xaa in position 17 is any amino acid
  Variant (19)..(19): Xaa in position 19 is Val, Ile or Leu
  Variant (21)..(22): Xaa in position 21 to 22 is any amino acid
  Variant (23)..(23): Xaa in position 23 is Asp, Glu, Ala or Asn
XXXDRDGTXXXEPXXXXQXDXXXKL

SEQ ID NO: 64150 - protein, 22 aa, Artificial sequence
  Consensus
  Variant (1)..(1): Xaa in position 1 is Tyr or Phe
  Variant (2)..(2): Xaa in position 2 is any amino acid
  Variant (3)..(3): Xaa in position 3 is Phe or Leu
  Variant (4)..(4): Xaa in position 4 is Val or Ile
  Variant (5)..(5): Xaa in position 5 is Met or Ile
  Variant (6)..(6): Xaa in position 6 is Val or Ile
  Variant (7)..(7): Xaa in position 7 is Thr or Ser
  Variant (10)..(10): Xaa in position 10 is Asp or Asn
  Variant (14)..(14): Xaa in position 14 is Thr or Ser
  Variant (15)..(15): Xaa in position 15 is any amino acid
  Variant (16)..(16): Xaa in position 16 is Ser, Ala, Asn or Leu
  Variant (17)..(17): Xaa in position 17 is Phe or Tyr
  Variant (19)..(21): Xaa in position 19 to 21 is any amino acid
XXXXXXXNQXGLGXXXXPXXXF

SEQ ID NO: 64151 - protein, 42 aa, Artificial sequence; identical to SEQ ID NO: 23511
  Consensus
  Variant (4)..(6): Xaa in position 4 to 6 is any amino acid
  Variant (7)..(7): Xaa in position 7 is Leu or Met
  Variant (8)..(8): Xaa in position 8 is Val, Ile, Leu or Met
  Variant (9)..(10): Xaa in position 9 to 10 is any amino acid
  Variant (11)..(11): Xaa in position 11 is Tyr, Trp or Phe
  Variant (12)..(12): Xaa in position 12 is Leu or Ile
  Variant (13)..(17): Xaa in position 13 to 17 is any amino acid
  Variant (18)..(18): Xaa in position 18 is Asp or Asn
  Variant (19)..(21): Xaa in position 19 to 21 is any amino acid
  Variant (23)..(23): Xaa in position 23 is any amino acid
  Variant (24)..(24): Xaa in position 24 is Val or Met
  Variant (25)..(25): Xaa in position 25 is Ile or Val
  Variant (29)..(29): Xaa in position 29 is any amino acid
  Variant (30)..(30): Xaa in position 30 is Thr or Ser
  Variant (32)..(32): Xaa in position 32 is Ile, Val, Leu or Met
  Variant (33)..(33): Xaa in position 33 is any amino acid
  Variant (34)..(34): Xaa in position 34 is Leu or Phe
  Variant (35)..(35): Xaa in position 35 is Ala or Gly
  Variant (36)..(36): Xaa in position 36 is any amino acid
  Variant (37)..(37): Xaa in position 37 is Asn, Ala or Ser
  Variant (38)..(38): Xaa in position 38 is Met, Leu or Ile
  Variant (39)..(39): Xaa in position 39 is Gly, Ala or Asn
  Variant (40)..(40): Xaa in position 40 is Ile, Leu, Val or Cys
  Variant (41)..(41): Xaa in position 41 is any amino acid
  Variant (42)..(42): Xaa in position 42 is Gly, Ala or Ser

SEQ ID NO: 64152 - protein, 45 aa, Artificial sequence; identical to SEQ ID NO: 23512
  Consensus
  Variant (2)..(2): Xaa in position 2 is any amino acid
  Variant (3)..(3): Xaa in position 3 is Ala or Arg
  Variant (4)..(4): Xaa in position 4 is any amino acid
  Variant (5)..(5): Xaa in position 5 is Val, Ile or Tyr
  Variant (6)..(6): Xaa in position 6 is any amino acid
  Variant (8)..(8): Xaa in position 8 is any amino acid
  Variant (10)..(10): Xaa in position 10 is Lys, Asn or Arg
  Variant (13)..(13): Xaa in position 13 is any amino acid
  Variant (14)..(14): Xaa in position 14 is Ile or Val
  Variant (15)..(15): Xaa in position 15 is any amino acid
  Variant (16)..(16): Xaa in position 16 is Val or Ile
  Variant (17)..(17): Xaa in position 17 is any amino acid
  Variant (18)..(18): Xaa in position 18 is Val, Leu or Ile
  Variant (19)..(19): Xaa in position 19 is any amino acid
  Variant (21)..(21): Xaa in position 21 is Asp or Asn
  Variant (22)..(26): Xaa in position 22 to 26 is any amino acid
  Variant (27)..(27): Xaa in position 27 is any or no amino acid
  Variant (28)..(28): Xaa in position 28 is Ile or Thr
  Variant (29)..(29): Xaa in position 29 is any amino acid
  Variant (32)..(32): Xaa in position 32 is Leu, Val or Ile
  Variant (33)..(33): Xaa in position 33 is any amino acid
  Variant (34)..(34): Xaa in position 34 is Phe or Met
  Variant (36)..(36): Xaa in position 36 is Asp or Asn
  Variant (40)..(40): Xaa in position 40 is Asp or Glu
  Variant (42)..(42): Xaa in position 42 is Ile or Leu
  Variant (43)..(43): Xaa in position 43 is Ala, Gly or Ser
  Variant (44)..(44): Xaa in position 44 is any amino acid

SEQ ID NO: 64153 - protein, 61 aa, Artificial sequence; identical to SEQ ID NO: 23513
  Consensus
  Variant (3)..(3): Xaa in position 3 is Leu or Ile
  Variant (4)..(4): Xaa in position 4 is any amino acid
  Variant (5)..(5): Xaa in position 5 is Ile or Val
  Variant (7)..(7): Xaa in position 7 is Asp or Glu
  Variant (10)..(10): Xaa in position 10 is Thr or Ser
  Variant (11)..(11): Xaa in position 11 is Val or Ile
  Variant (14)..(14): Xaa in position 14 is Thr or Val
  Variant (15)..(15): Xaa in position 15 is Ala or Gly
  Variant (16)..(16): Xaa in position 16 is Leu or Ile
  Variant (17)..(17): Xaa in position 17 is Ala, Val or Ser
  Variant (18)..(18): Xaa in position 18 is Leu or Ile
  Variant (19)..(19): Xaa in position 19 is Gly or Arg
  Variant (20)..(20): Xaa in position 20 is any amino acid
  Variant (21)..(21): Xaa in position 21 is Ala or Cys
  Variant (22)..(22): Xaa in position 22 is Leu, Ile or Val
  Variant (23)..(24): Xaa in position 23 to 24 is any amino acid
  Variant (26)..(26): Xaa in position 26 is Leu, Ile or Val
  Variant (27)..(27): Xaa in position 27 is Gly, Asn or Arg
  Variant (28)..(28): Xaa in position 28 is Asp, Asn or Ser
  Variant (30)..(30): Xaa in position 30 is any amino acid
  Variant (32)..(32): Xaa in position 32 is Ile or Leu
  Variant (33)..(33): Xaa in position 33 is any amino acid
  Variant (35)..(35): Xaa in position 35 is Phe or Tyr
  Variant (36)..(53): Xaa in position 36 to 53 is any or no amino acid
  Variant (55)..(55): Xaa in position 55 is Phe or Tyr
  Variant (56)..(56): Xaa in position 56 is any amino acid
  Variant (61)..(61): Xaa in position 61 is Glu or Asp

SEQ ID NO: 64154 - protein, 68 aa, Artificial sequence; identical to SEQ ID NO: 23514
  Consensus
  Variant (1)..(1): Xaa in position 1 is Val, Ile or Leu
  Variant (3)..(3): Xaa in position 3 is any amino acid
  Variant (4)..(4): Xaa in position 4 is Leu, Met or Phe
  Variant (5)..(5): Xaa in position 5 is any amino acid
  Variant (6)..(6): Xaa in position 6 is Thr or Ser
  Variant (7)..(7): Xaa in position 7 is Glu, His or Asp
  Variant (8)..(8): Xaa in position 8 is Met or Leu
  Variant (9)..(10): Xaa in position 9 to 10 is any amino acid
  Variant (14)..(14): Xaa in position 14 is any amino acid
  Variant (16)..(16): Xaa in position 16 is Leu, Ile, Val or Phe
  Variant (17)..(22): Xaa in position 17 to 22 is any amino acid
  Variant (23)..(23): Xaa in position 23 is Thr, Asn or Ser
  Variant (25)..(25): Xaa in position 25 is His or Asn
  Variant (26)..(26): Xaa in position 26 is Leu, Ile or Val
  Variant (27)..(29): Xaa in position 27 to 29 is any amino acid
  Variant (31)..(31): Xaa in position 31 is any amino acid
  Variant (33)..(33): Xaa in position 33 is Asp, Glu or Ala
  Variant (36)..(37): Xaa in position 36 to 37 is any amino acid
  Variant (39)..(39): Xaa in position 39 is Ser, Gly or Ala
  Variant (40)..(40): Xaa in position 40 is Leu, Cys or Ile
  Variant (43)..(43): Xaa in position 43 is Ala, Val or Ser
  Variant (44)..(44): Xaa in position 44 is Phe or Leu
  Variant (45)..(45): Xaa in position 45 is Gly or Ala
  Variant (46)..(46): Xaa in position 46 is Arg or Lys
  Variant (47)..(47): Xaa in position 47 is Thr, Ala or Ser
  Variant (48)..(48): Xaa in position 48 is Leu or Val
  Variant (49)..(49): Xaa in position 49 is Arg, Lys or Asn
  Variant (50)..(50): Xaa in position 50 is Gln, Met or Lys
  Variant (51)..(51): Xaa in position 51 is Ala or Cys
  Variant (52)..(52): Xaa in position 52 is Ile, Leu or Val
  Variant (53)..(53): Xaa in position 53 is any amino acid
  Variant (54)..(55): Xaa in position 54 to 55 is any or no amino acid
  Variant (56)..(56): Xaa in position 56 is Val, Ile or Arg
  Variant (57)..(57): Xaa in position 57 is any amino acid
  Variant (58)..(58): Xaa in position 58 is Gly, His or Ser
  Variant (59)..(60): Xaa in position 59 to 60 is any amino acid
  Variant (61)..(61): Xaa in position 61 is Leu, Met or Ile
  Variant (62)..(62): Xaa in position 62 is Pro or Ala
  Variant (63)..(64): Xaa in position 63 to 64 is Ser or Thr
  Variant (67)..(67): Xaa in position 67 is any amino acid
  Variant (68)..(68): Xaa in position 68 is Leu or Ile

SEQ ID NO: 64155 - DNA, 1575 bp, Escherichia coli K12; identical to SEQ ID NO: 10324
  CDS (244)..(1575)

SEQ ID NO: 64156 - protein, 443 aa, Escherichia coli K12; identical to SEQ ID NO: 10325

SEQ ID NO: 64157 - DNA, 1326 bp, Yersinia pestis; identical to SEQ ID NO: 10326
  CDS (1)..(1326)

SEQ ID NO: 64158 - protein, 441 aa, Yersinia pestis; identical to SEQ ID NO: 10327

SEQ ID NO: 64159 - DNA, 1332 bp, Salmonella enterica subsp. enterica serovar Typhi; identical to SEQ ID NO: 10328
  CDS (1)..(1332)

SEQ ID NO: 64160 - protein, 443 aa, Salmonella enterica subsp. enterica serovar Typhi; identical to SEQ ID NO: 10329

SEQ ID NO: 64161 - DNA, 1311 bp, Neisseria meningitidis; identical to SEQ ID NO: 10330
  CDS (1)..(1311)

SEQ ID NO: 64162 - protein, 436 aa, Neisseria meningitidis; identical to SEQ ID NO: 10331

SEQ ID NO: 64163 - DNA, 1863 bp, Arabidopsis thaliana (mouse-ear cress); identical to SEQ ID NO: 10332
  CDS (1)..(1863)

SEQ ID NO: 64164 - protein, 620 aa, Arabidopsis thaliana (mouse-ear cress); identical to SEQ ID NO: 10333

SEQ ID NO: 64165 - DNA, 1371 bp, Vibrio cholerae; identical to SEQ ID NO: 10334
  CDS (1)..(1371)

SEQ ID NO: 64166 - protein, 456 aa, Vibrio cholerae; identical to SEQ ID NO: 10335

SEQ ID NO: 64167 - DNA, 1299 bp, Pseudomonas aeruginosa; identical to SEQ ID NO: 10336
  CDS (1)..(1299)

SEQ ID NO: 64168 - protein, 432 aa, Pseudomonas aeruginosa; identical to SEQ ID NO: 10337

SEQ ID NO: 64169 - DNA, 1259 bp, Pseudomonas aeruginosa; identical to SEQ ID NO: 10338
  CDS (45)..(1238)

SEQ ID NO: 64170 - protein, 397 aa, Pseudomonas aeruginosa; identical to SEQ ID NO: 10339

SEQ ID NO: 64171 - DNA, 1716 bp, Arabidopsis thaliana (mouse-ear cress); identical to SEQ ID NO: 10340
  CDS (1)..(1716)

SEQ ID NO: 64172 - protein, 571 aa, Arabidopsis thaliana (mouse-ear cress); identical to SEQ ID NO: 10341

SEQ ID NO: 64173 - DNA, 1326 bp, Erwinia carotovora; identical to SEQ ID NO: 10342
  CDS (1)..(1326)

SEQ ID NO: 64174 - protein, 441 aa, Erwinia carotovora; identical to SEQ ID NO: 10343

SEQ ID NO: 64175 - DNA, 1356 bp, Acinetobacter sp; identical to SEQ ID NO: 10344
  CDS (1)..(1356)

SEQ ID NO: 64176 - protein, 451 aa, Acinetobacter sp; identical to SEQ ID NO: 10345

SEQ ID NO: 64177 - DNA, 1326 bp, Photobacterium profundum; identical to SEQ ID NO: 10346
  CDS (1)..(1326)

SEQ ID NO: 64178 - protein, 441 aa, Photobacterium profundum; identical to SEQ ID NO: 10347

SEQ ID NO: 64179 - DNA, 1872 bp, Oryza sativa; identical to SEQ ID NO: 10348
  CDS (1)..(1731)

SEQ ID NO: 64180 - protein, 576 aa, Oryza sativa; identical to SEQ ID NO: 10349

SEQ ID NO: 64181 - DNA, 1308 bp, Chromobacterium violaceum; identical to SEQ ID NO: 10350
  CDS (1)..(1308)

SEQ ID NO: 64182 - protein, 435 aa, Chromobacterium violaceum; identical to SEQ ID NO: 10351

SEQ ID NO: 64183 - DNA, 1404 bp, Bordetella parapertussis; identical to SEQ ID NO: 10352
  CDS (1)..(1404)

SEQ ID NO: 64184 - protein, 467 aa, Bordetella parapertussis; identical to SEQ ID NO: 10353

SEQ ID NO: 64185 - DNA, 1335 bp, Nitrosomonas europaea; identical to SEQ ID NO: 10354
  CDS (1)..(1335)

SEQ ID NO: 64186 - protein, 444 aa, Nitrosomonas europaea; identical to SEQ ID NO: 10355

SEQ ID NO: 64187 - DNA, 2075 bp, Arabidopsis thaliana; identical to SEQ ID NO: 10356
  CDS (120)..(1949)

SEQ ID NO: 64188 - protein, 609 aa, Arabidopsis thaliana; identical to SEQ ID NO: 10357

SEQ ID NO: 64189 - DNA, 1728 bp, Oryza sativa; identical to SEQ ID NO: 10358
  CDS (1)..(1728)

SEQ ID NO: 64190 - protein, 575 aa, Oryza sativa; identical to SEQ ID NO: 10359

SEQ ID NO: 64191 - DNA, 1329 bp, Buchnera aphidicola; identical to SEQ ID NO: 10360
  CDS (1)..(1329)

SEQ ID NO: 64192 - protein, 442 aa, Buchnera aphidicola; identical to SEQ ID NO: 10361

SEQ ID NO: 64193 - DNA, 1314 bp, Haemophilus ducreyi; identical to SEQ ID NO: 10362
  CDS (1)..(1314)

SEQ ID NO: 64194 - protein, 437 aa, Haemophilus ducreyi; identical to SEQ ID NO: 10363

SEQ ID NO: 64195 - DNA, 1323 bp, Pasteurella multocida; identical to SEQ ID NO: 10364
  CDS (1)..(1323)

SEQ ID NO: 64196 - protein, 440 aa, Pasteurella multocida; identical to SEQ ID NO: 10365

SEQ ID NO: 64197 - DNA, 1347 bp, Photorhabdus luminescens; identical to SEQ ID NO: 10366
  CDS (1)..(1347)

SEQ ID NO: 64198 - protein, 448 aa, Photorhabdus luminescens; identical to SEQ ID NO: 10367

SEQ ID NO: 64199 - DNA, 1299 bp, Pseudomonas putida; identical to SEQ ID NO: 10368
  CDS (1)..(1299)

SEQ ID NO: 64200 - protein, 432 aa, Pseudomonas putida; identical to SEQ ID NO: 10369

SEQ ID NO: 64201 - DNA, 1299 bp, Pseudomonas syringae; identical to SEQ ID NO: 10370
  CDS (1)..(1299)

SEQ ID NO: 64202 - protein, 432 aa, Pseudomonas syringae; identical to SEQ ID NO: 10371

SEQ ID NO: 64203 - DNA, 1356 bp, Ralstonia solanacearum; identical to SEQ ID NO: 10372
  CDS (1)..(1356)

SEQ ID NO: 64204 - protein, 451 aa, Ralstonia solanacearum; identical to SEQ ID NO: 10373

SEQ ID NO: 64205 - DNA, 1338 bp, Shewanella oneidensis; identical to SEQ ID NO: 10374
  CDS (1)..(1338)

SEQ ID NO: 64206 - protein, 445 aa, Shewanella oneidensis; identical to SEQ ID NO: 10375

SEQ ID NO: 64207 - DNA, 1338 bp, Vibrio parahaemolyticus; identical to SEQ ID NO: 10376
  CDS (1)..(1338)

SEQ ID NO: 64208 - protein, 445 aa, Vibrio parahaemolyticus; identical to SEQ ID NO: 10377

SEQ ID NO: 64209 - DNA, 25 bp, Artificial sequence
  Primer sequence
atggtaaaggaacgtaaaaccgagt

SEQ ID NO: 64210 - DNA, 24 bp, Artificial sequence
  Primer sequence
ttaccctaaatccgccatcaacac

SEQ ID NO: 64211 - protein, 528 aa, Artificial sequence; identical to SEQ ID NO: 13504
  Consensus
  Variant (2)..(3): Xaa in position 2 to 3 is any amino acid
  Variant (6)..(8): Xaa in position 6 to 8 is any amino acid
  Variant (11)..(13): Xaa in position 11 to 13 is any amino acid
  Variant (16)..(17): Xaa in position 16 to 17 is any amino acid
  Variant (21)..(24): Xaa in position 21 to 24 is any amino acid
  Variant (26)..(42): Xaa in position 26 to 42 is any amino acid
  Variant (44)..(45): Xaa in position 44 to 45 is any amino acid
  Variant (49)..(49): Xaa in position 49 is any amino acid
  Variant (52)..(54): Xaa in position 52 to 54 is any amino acid
  Variant (56)..(56): Xaa in position 56 is any amino acid
  Variant (58)..(58): Xaa in position 58 is any amino acid
  Variant (60)..(60): Xaa in position 60 is any amino acid
  Variant (62)..(62): Xaa in position 62 is any amino acid
  Variant (65)..(67): Xaa in position 65 to 67 is any amino acid
  Variant (69)..(76): Xaa in position 69 to 76 is any amino acid
  Variant (78)..(81): Xaa in position 78 to 81 is any amino acid
  Variant (83)..(83): Xaa in position 83 is any amino acid
  Variant (86)..(88): Xaa in position 86 to 88 is any amino acid
  Variant (90)..(94): Xaa in position 90 to 94 is any amino acid
  Variant (96)..(96): Xaa in position 96 is any amino acid
  Variant (98)..(102): Xaa in position 98 to 102 is any amino acid
  Variant (104)..(104): Xaa in position 104 is any amino acid
  Variant (106)..(106): Xaa in position 106 is any amino acid
  Variant (109)..(114): Xaa in position 109 to 114 is any amino acid
  Variant (115)..(123): Xaa in position 115 to 123 is any or no amino acid
  Variant (125)..(131): Xaa in position 125 to 131 is any amino acid
  Variant (133)..(133): Xaa in position 133 is any amino acid
  Variant (138)..(139): Xaa in position 138 to 139 is any amino acid
  Variant (141)..(141): Xaa in position 141 is any amino acid
  Variant (143)..(143): Xaa in position 143 is any amino acid
  Variant (146)..(147): Xaa in position 146 to 147 is any amino acid
  Variant (149)..(149): Xaa in position 149 is any amino acid
  Variant (151)..(154): Xaa in position 151 to 154 is any amino acid
  Variant (156)..(157): Xaa in position 156 to 157 is any amino acid
  Variant (159)..(159): Xaa in position 159 is any amino acid
  Variant (162)..(164): Xaa in position 162 to 164 is any amino acid
  Variant (166)..(168): Xaa in position 166 to 168 is any amino acid
  Variant (170)..(173): Xaa in position 170 to 173 is any amino acid
  Variant (177)..(178): Xaa in position 177 to 178 is any amino acid
  Variant (180)..(182): Xaa in position 180 to 182 is any amino acid
  Variant (184)..(184): Xaa in position 184 is any amino acid
  Variant (188)..(188): Xaa in position 188 is any amino acid
  Variant (192)..(193): Xaa in position 192 to 193 is any amino acid
  Variant (195)..(196): Xaa in position 195 to 196 is any amino acid
  Variant (199)..(200): Xaa in position 199 to 200 is any amino acid
  Variant (202)..(203): Xaa in position 202 to 203 is any amino acid
  Variant (205)..(205): Xaa in position 205 is any amino acid
  Variant (207)..(207): Xaa in position 207 is any amino acid
  Variant (209)..(209): Xaa in position 209 is any amino acid
  Variant (211)..(216): Xaa in position 211 to 216 is any amino acid
  Variant (218)..(222): Xaa in position 218 to 222 is any amino acid
  Variant (224)..(228): Xaa in position 224 to 228 is any amino acid
  Variant (230)..(248): Xaa in position 230 to 248 is any amino acid
  Variant (249)..(330): Xaa in position 249 to 330 is any or no amino acid
  Variant (332)..(333): Xaa in position 332 to 333 is any amino acid
  Variant (335)..(336): Xaa in position 335 to 336 is any amino acid
  Variant (339)..(340): Xaa in position 339 to 340 is any amino acid
  Variant (343)..(343): Xaa in position 343 is any amino acid
  Variant (345)..(345): Xaa in position 345 is any amino acid
  Variant (347)..(352): Xaa in position 347 to 352 is any amino acid
  Variant (355)..(355): Xaa in position 355 is any amino acid
  Variant (358)..(358): Xaa in position 358 is any amino acid
  Variant (362)..(364): Xaa in position 362 to 364 is any amino acid
  Variant (366)..(366): Xaa in position 366 is any amino acid
  Variant (369)..(376): Xaa in position 369 to 376 is any amino acid
  Variant (378)..(379): Xaa in position 378 to 379 is any amino acid
  Variant (381)..(381): Xaa in position 381 is any amino acid
  Variant (383)..(385): Xaa in position 383 to 385 is any amino acid
  Variant (387)..(388): Xaa in position 387 to 388 is any amino acid
  Variant (390)..(392): Xaa in position 390 to 392 is any amino acid
  Variant (395)..(395): Xaa in position 395 is any amino acid
  Variant (399)..(400): Xaa in position 399 to 400 is any amino acid
  Variant (402)..(402): Xaa in position 402 is any amino acid
  Variant (405)..(405): Xaa in position 405 is any amino acid
  Variant (407)..(407): Xaa in position 407 is any amino acid
  Variant (410)..(410): Xaa in position 410 is any amino acid
  Variant (413)..(417): Xaa in position 413 to 417 is any amino acid
  Variant (419)..(421): Xaa in position 419 to 421 is any amino acid
  Variant (423)..(423): Xaa in position 423 is any amino acid
  Variant (425)..(427): Xaa in position 425 to 427 is any amino acid
  Variant (429)..(429): Xaa in position 429 is any amino acid
  Variant (434)..(434): Xaa in position 434 is any amino acid
  Variant (436)..(442): Xaa in position 436 to 442 is any amino acid
  Variant (443)..(446): Xaa in position 443 to 446 is any or no amino acid
  Variant (448)..(448): Xaa in position 448 is any amino acid
  Variant (451)..(451): Xaa in position 451 is any amino acid
  Variant (454)..(454): Xaa in position 454 is any amino acid
  Variant (456)..(457): Xaa in position 456 to 457 is any amino acid
  Variant (459)..(462): Xaa in position 459 to 462 is any amino acid
  Variant (464)..(465): Xaa in position 464 to 465 is any amino acid
  Variant (468)..(473): Xaa in position 468 to 473 is any amino acid
  Variant (475)..(477): Xaa in position 475 to 477 is any amino acid
  Variant (479)..(481): Xaa in position 479 to 481 is any amino acid
  Variant (484)..(484): Xaa in position 484 is any amino acid
  Variant (488)..(491): Xaa in position 488 to 491 is any amino acid
  Variant (494)..(496): Xaa in position 494 to 496 is any amino acid
  Variant (499)..(505): Xaa in position 499 to 505 is any amino acid
  Variant (508)..(513): Xaa in position 508 to 513 is any amino acid
  Variant (516)..(518): Xaa in position 516 to 518 is any amino acid
  Variant (520)..(520): Xaa in position 520 is any amino acid
  Variant (522)..(527): Xaa in position 522 to 527 is any amino acid

SEQ ID NO: 64212 - protein, 108 aa, Artificial sequence; identical to SEQ ID NO: 13500
  Consensus
  Variant (1)..(1): Xaa in position 1 is Val or Ile
  Variant (2)..(3): Xaa in position 2 to 3 is any amino acid
  Variant (4)..(4): Xaa in position 4 is Phe or Leu
  Variant (6)..(6): Xaa in position 6 is any amino acid
  Variant (7)..(7): Xaa in position 7 is Ser, Ala or Val
  Variant (8)..(8): Xaa in position 8 is any amino acid
  Variant (10)..(10): Xaa in position 10 is Tyr or His
  Variant (11)..(11): Xaa in position 11 is Ile, Val or Leu
  Variant (12)..(14): Xaa in position 12 to 14 is any amino acid
  Variant (15)..(15): Xaa in position 15 is Arg, His or Ser
  Variant (16)..(17): Xaa in position 16 to 17 is any amino acid
  Variant (18)..(18): Xaa in position 18 is Thr, Lys or Val
  Variant (19)..(19): Xaa in position 19 is any amino acid
  Variant (21)..(21): Xaa in position 21 is Ile, Leu, Val or Ala
  Variant (22)..(24): Xaa in position 22 to 24 is any amino acid
  Variant (25)..(25): Xaa in position 25 is Gly, Ala, Ser or Asp
  Variant (26)..(26): Xaa in position 26 is Glu, Asp, Arg or Asn
  Variant (27)..(27): Xaa in position 27 is any amino acid
  Variant (28)..(28): Xaa in position 28 is Ile, Val or Leu
  Variant (29)..(38): Xaa in position 29 to 38 is any amino acid
  Variant (39)..(42): Xaa in position 39 to 42 is any or no amino acid
  Variant (44)..(44): Xaa in position 44 is Ile, Leu, Val or Phe
  Variant (45)..(45): Xaa in position 45 is any amino acid
  Variant (46)..(46): Xaa in position 46 is Leu or Phe
  Variant (47)..(47): Xaa in position 47 is Leu or Met
  Variant (48)..(49): Xaa in position 48 to 49 is any amino acid
  Variant (50)..(50): Xaa in position 50 is Leu or Met
  Variant (52)..(52): Xaa in position 52 is Ile, Val, Leu, Met or Ala
  Variant (53)..(54): Xaa in position 53 to 54 is any amino acid
  Variant (55)..(55): Xaa in position 55 is Val or Ile
  Variant (56)..(56): Xaa in position 56 is Leu, Val or Ile
  Variant (57)..(57): Xaa in position 57 is Val or Ile
  Variant (58)..(58): Xaa in position 58 is any amino acid
  Variant (60)..(62): Xaa in position 60 to 62 is any amino acid
  Variant (63)..(63): Xaa in position 63 is Gln or Phe
  Variant (64)..(64): Xaa in position 64 is Ile, Val or Leu
  Variant (65)..(67): Xaa in position 65 to 67 is any amino acid
  Variant (68)..(68): Xaa in position 68 is Leu or Ala
  Variant (69)..(75): Xaa in position 69 to 75 is any amino acid
  Variant (76)..(76): Xaa in position 76 is any or no amino acid
  Variant (77)..(77): Xaa in position 77 is Tyr, Phe or Ile
  Variant (78)..(81): Xaa in position 78 to 81 is any amino acid
  Variant (82)..(82): Xaa in position 82 is Arg or Ala
  Variant (83)..(83): Xaa in position 83 is Val, Ile or Pro
  Variant (85)..(85): Xaa in position 85 is Asp or Thr
  Variant (86)..(88): Xaa in position 86 to 88 is any amino acid
  Variant (89)..(89): Xaa in position 89 is Leu or Met
  Variant (90)..(91): Xaa in position 90 to 91 is any amino acid
  Variant (92)..(92): Xaa in position 92 is Val, Ala or Ile
  Variant (93)..(94): Xaa in position 93 to 94 is any amino acid
  Variant (95)..(95): Xaa in position 95 is Ala, Ser, Val or Phe
  Variant (96)..(96): Xaa in position 96 is Ala, Val or Ser
  Variant (98)..(102): Xaa in position 98 to 102 is any amino acid
  Variant (103)..(103): Xaa in position 103 is Ile, Phe or Val
  Variant (104)..(104): Xaa in position 104 is any amino acid
  Variant (105)..(105): Xaa in position 105 is Ala or Ser
  Variant (106)..(106): Xaa in position 106 is any amino acid
  Variant (107)..(107): Xaa in position 107 is Leu or Phe
  Variant (108)..(108): Xaa in position 108 is Ser or Cys

SEQ ID NO: 64213 - protein, 79 aa, Artificial sequence; identical to SEQ ID NO: 13501
  Consensus
  Variant (1)..(1): Xaa in position 1 is Val or Leu
  Variant (2)..(2): Xaa in position 2 is any amino acid
  Variant (3)..(3): Xaa in position 3 is Ser, Thr or Gly
  Variant (4)..(4): Xaa in position 4 is Gly or Ser
  Variant (6)..(8): Xaa in position 6 to 8 is any amino acid
  Variant (9)..(9): Xaa in position 9 is Ala or Ser
  Variant (10)..(10): Xaa in position 10 is Gln, Arg or Lys
  Variant (11)..(11): Xaa in position 11 is Pro or Arg
  Variant (12)..(12): Xaa in position 12 is any amino acid
  Variant (14)..(14): Xaa in position 14 is Val or Ile
  Variant (15)..(16): Xaa in position 15 to 16 is any amino acid
  Variant (18)..(18): Xaa in position 18 is Val, Ile or Thr
  Variant (20)..(22): Xaa in position 20 to 22 is any amino acid
  Variant (23)..(23): Xaa in position 23 is Thr, Ser or Ala
  Variant (25)..(25): Xaa in position 25 is any amino acid
  Variant (26)..(26): Xaa in position 26 is Val or Ile
  Variant (27)..(27): Xaa in position 27 is Arg or Lys
  Variant (28)..(28): Xaa in position 28 is Arg, Lys or Ala
  Variant (29)..(29): Xaa in position 29 is Ile, Val or Thr
  Variant (30)..(30): Xaa in position 30 is Asp or Asn
  Variant (31)..(33): Xaa in position 31 to 33 is any amino acid
  Variant (34)..(34): Xaa in position 34 is Ile, Leu or Val
  Variant (35)..(37): Xaa in position 35 to 37 is any amino acid
  Variant (38)..(38): Xaa in position 38 is Leu or Ile
  Variant (39)..(42): Xaa in position 39 to 42 is any amino acid
  Variant (43)..(43): Xaa in position 43 is Ile, Val or Leu
  Variant (45)..(45): Xaa in position 45 is Leu, Val or Trp
  Variant (46)..(46): Xaa in position 46 is Leu, Ile, Val or Met
  Variant (47)..(47): Xaa in position 47 is any amino acid
  Variant (48)..(48): Xaa in position 48 is Pro or Asn
  Variant (49)..(49): Xaa in position 49 is any amino acid
  Variant (50)..(50): Xaa in position 50 is Gly or Ala
  Variant (51)..(51): Xaa in position 51 is any amino acid
  Variant (53)..(53): Xaa in position 53 is any amino acid
  Variant (54)..(54): Xaa in position 54 is Thr or Ser
  Variant (56)..(57): Xaa in position 56 to 57 is any amino acid
  Variant (58)..(58): Xaa in position 58 is Phe or Leu
  Variant (59)..(59): Xaa in position 59 is Asn or Tyr
  Variant (60)..(60): Xaa in position 60 is Leu or Cys
  Variant (61)..(61): Xaa in position 61 is any amino acid
  Variant (62)..(62): Xaa in position 62 is any or no amino acid
  Variant (63)..(63): Xaa in position 63 is Glu, Tyr or Leu
  Variant (64)..(64): Xaa in position 64 is Glu, Asp, Asn or Gln
  Variant (65)..(65): Xaa in position 65 is any amino acid
  Variant (67)..(69): Xaa in position 67 to 69 is any amino acid
  Variant (70)..(70): Xaa in position 70 is Ala or Ser
  Variant (71)..(72): Xaa in position 71 to 72 is any amino acid
  Variant (73)..(73): Xaa in position 73 is Leu or Ile
  Variant (74)..(74): Xaa in position 74 is any amino acid
  Variant (75)..(75): Xaa in position 75 is Ala or Val
  Variant (76)..(76): Xaa in position 76 is Asp or Glu
  Variant (78)..(78): Xaa in position 78 is Leu or Met
  Variant (79)..(79): Xaa in position 79 is Ile, Leu or Val

SEQ ID NO: 64214 - protein, 103 aa, Artificial sequence; identical to SEQ ID NO: 13502
  Consensus
  Variant (1)..(1): Xaa in position 1 is Leu or Ile
  Variant (2)..(6): Xaa in position 2 to 6 is any amino acid
  Variant (7)..(7): Xaa in position 7 is Ala or Val
  Variant (8)..(10): Xaa in position 8 to 10 is any amino acid
  Variant (12)..(12): Xaa in position 12 is Val or Ile
  Variant (13)..(13): Xaa in position 13 is any amino acid
  Variant (15)..(15): Xaa in position 15 is any amino acid
  Variant (16)..(16): Xaa in position 16 is His or Gln
  Variant (17)..(17): Xaa in position 17 is Leu or Ile
  Variant (18)..(18): Xaa in position 18 is Ile, Val or Leu
  Variant (19)..(23): Xaa in position 19 to 23 is any amino acid
  Variant (25)..(25): Xaa in position 25 is Ala, Ser or Val
  Variant (26)..(26): Xaa in position 26 is Leu, Ile or Val
  Variant (27)..(27): Xaa in position 27 is Leu or Ile
  Variant (28)..(28): Xaa in position 28 is any amino acid
  Variant (30)..(30): Xaa in position 30 is Leu, His or Ile
  Variant (32)..(34): Xaa in position 32 to 34 is any amino acid
  Variant (36)..(36): Xaa in position 36 is any amino acid
  Variant (38)..(38): Xaa in position 38 is Thr or Ser
  Variant (39)..(39): Xaa in position 39 is any amino acid
  Variant (40)..(40): Xaa in position 40 is Ile, Val, Leu or Met
  Variant (41)..(47): Xaa in position 41 to 47 is any amino acid
  Variant (48)..(49): Xaa in position 48 to 49 is any or no amino acid
  Variant (51)..(51): Xaa in position 51 is any amino acid
  Variant (53)..(55): Xaa in position 53 to 55 is any amino acid
  Variant (57)..(57): Xaa in position 57 is Ile, Val or Leu
  Variant (58)..(59): Xaa in position 58 to 59 is any amino acid
  Variant (60)..(60): Xaa in position 60 is Ile or Leu
  Variant (61)..(62): Xaa in position 61 to 62 is any amino acid
  Variant (63)..(63): Xaa in position 63 is Leu or Ile
  Variant (64)..(64): Xaa in position 64 is Ile or Leu
  Variant (65)..(65): Xaa in position 65 is any amino acid
  Variant (69)..(70): Xaa in position 69 to 70 is any amino acid
  Variant (72)..(72): Xaa in position 72 is any amino acid
  Variant (74)..(74): Xaa in position 74 is Val or Leu
  Variant (75)..(75): Xaa in position 75 is any amino acid
  Variant (77)..(77): Xaa in position 77 is any amino acid
  Variant (78)..(78): Xaa in position 78 is Arg or Asp
  Variant (79)..(80): Xaa in position 79 to 80 is any amino acid
  Variant (81)..(81): Xaa in position 81 is Leu or Ile
  Variant (82)..(82): Xaa in position 82 is Glu or Leu
  Variant (83)..(84): Xaa in position 83 to 84 is any amino acid
  Variant (85)..(85): Xaa in position 85 is Ile, Leu or Val
  Variant (86)..(87): Xaa in position 86 to 87 is any amino acid
  Variant (88)..(88): Xaa in position 88 is Phe or Tyr
  Variant (89)..(89): Xaa in position 89 is any amino acid
  Variant (90)..(91): Xaa in position 90 to 91 is Ile, Val or Leu
  Variant (92)..(92): Xaa in position 92 is any amino acid
  Variant (93)..(93): Xaa in position 93 is Arg, His or Lys
  Variant (94)..(94): Xaa in position 94 is Asp or Glu
  Variant (95)..(95): Xaa in position 95 is Gly or Asn
  Variant (96)..(98): Xaa in position 96 to 98 is any amino acid
  Variant (99)..(99): Xaa in position 99 is Ala or Gly
  Variant (101)..(101): Xaa in position 101 is Ala, Ser or Val
  Variant (103)..(103): Xaa in position 103 is Leu or Met

SEQ ID NO: 64215 - protein, 76 aa, Artificial sequence; identical to SEQ ID NO: 13503
  Consensus
  Variant (1)..(1): Xaa in position 1 is Gly, Ala or Cys
  Variant (3)..(3): Xaa in position 3 is Met, Leu, Val, Ile or Phe
  Variant (5)..(5): Xaa in position 5 is Cys or Ala
  Variant (6)..(6): Xaa in position 6 is Val, Leu or Ile
  Variant (7)..(7): Xaa in position 7 is any amino acid
  Variant (8)..(8): Xaa in position 8 is Val or Ile
  Variant (9)..(12): Xaa in position 9 to 12 is any amino acid
  Variant (13)..(13): Xaa in position 13 is Arg or Gln
  Variant (14)..(17): Xaa in position 14 to 17 is any amino acid
  Variant (19)..(20): Xaa in position 19 to 20 is any amino acid
  Variant (21)..(22): Xaa in position 21 to 22 is Leu or Ile
  Variant (23)..(28): Xaa in position 23 to 28 is any amino acid
  Variant (29)..(29): Xaa in position 29 is Ala or Ser
  Variant (30)..(32): Xaa in position 30 to 32 is any amino acid
  Variant (33)..(33): Xaa in position 33 is Gly, Asn or Arg
  Variant (34)..(36): Xaa in position 34 to 36 is any amino acid
  Variant (37)..(37): Xaa in position 37 is Leu, Ile or Val
  Variant (39)..(39): Xaa in position 39 is Val, Ala or Leu
  Variant (41)..(41): Xaa in position 41 is Thr or Ser
  Variant (43)..(43): Xaa in position 43 is any amino acid
  Variant (44)..(44): Xaa in position 44 is Thr or Ser
  Variant (45)..(46): Xaa in position 45 to 46 is any amino acid
  Variant (49)..(49): Xaa in position 49 is any amino acid
  Variant (50)..(50): Xaa in position 50 is any or no amino acid
  Variant (51)..(51): Xaa in position 51 is Arg, Gln or His
  Variant (54)..(60): Xaa in position 54 to 60 is any amino acid
  Variant (61)..(61): Xaa in position 61 is Leu or Ile
  Variant (63)..(64): Xaa in position 63 to 64 is any amino acid
  Variant (65)..(65): Xaa in position 65 is Lys or Arg
  Variant (66)..(68): Xaa in position 66 to 68 is any amino acid
  Variant (69)..(69): Xaa in position 69 is Tyr or Ile
  Variant (70)..(72): Xaa in position 70 to 72 is any amino acid
  Variant (73)..(73): Xaa in position 73 is any or no amino acid
  Variant (75)..(75): Xaa in position 75 is any amino acid
  Variant (76)..(76): Xaa in position 76 is Ser or Ala

SEQ ID NO: 64216 - DNA, 1434 bp, Escherichia coli K12; identical to SEQ ID NO: 4679
  CDS (1)..(1434)

SEQ ID NO: 64217 - protein, 477 aa, Escherichia coli K12 [sequence omitted]

SEQ ID NO: 64218 - DNA, 1314 bp, Pyrococcus abyssi; identical to SEQ ID NO: 4681
  CDS (1)..(1314)

SEQ ID NO: 64219 - protein, 437 aa, Pyrococcus abyssi; identical to SEQ ID NO: 4682

SEQ ID NO: 64220 - DNA, 1425 bp, Chlamydia muridarum, Chlamydia trachomatis MoPn; identical to SEQ ID NO: 4683
  CDS (1)..(1425)

SEQ ID NO: 64221 - protein, 474 aa, Chlamydia muridarum, Chlamydia trachomatis MoPn; identical to SEQ ID NO: 4684

SEQ ID NO: 64222 - DNA, 1434 bp, Clostridium acetobutylicum; identical to SEQ ID NO: 4685
  CDS (1)..(1434)

SEQ ID NO: 64223 - protein, 477 aa, Clostridium acetobutylicum; identical to SEQ ID NO: 4686

SEQ ID NO: 64224 - DNA, 1431 bp, Yersinia pestis; identical to SEQ ID NO: 4687
  CDS (1)..(1431)

SEQ ID NO: 64225 - protein, 476 aa, Yersinia pestis; identical to SEQ ID NO: 4688

SEQ ID NO: 64226 - DNA, 1443 bp, Agrobacterium tumefaciens; identical to SEQ ID NO: 4689
  CDS (1)..(1443)

SEQ ID NO: 64227 - protein, 480 aa, Agrobacterium tumefaciens; identical to SEQ ID NO: 4690

SEQ ID NO: 64228 - DNA, 1479 bp, Nostoc sp. PCC 7120; identical to SEQ ID NO: 4691
  CDS (1)..(1479)

SEQ ID NO: 64229 - protein, 492 aa, Nostoc sp. PCC 7120; identical to SEQ ID NO: 4692

SEQ ID NO: 64230 - DNA, 1419 bp, Nostoc sp. PCC 7120; identical to SEQ ID NO: 4693
  CDS (1)..(1419)

SEQ ID NO: 64231 - protein, 472 aa, Nostoc sp. PCC 7120; identical to SEQ ID NO: 4694

SEQ ID NO: 64232 - DNA, 1431 bp, Haemophilus influenzae; identical to SEQ ID NO: 4695
  CDS (1)..(1431)

SEQ ID NO: 64233 - protein, 476 aa, Haemophilus influenzae; identical to SEQ ID NO: 4696

SEQ ID NO: 64234 - DNA, 1392 bp, Aquifex aeolicus; identical to SEQ ID NO: 4697
  CDS (1)..(1392)

SEQ ID NO: 64235 - protein, 463 aa, Aquifex aeolicus; identical to SEQ ID NO: 4698

SEQ ID NO: 64236 - DNA, 1371 bp, Pyrococcus horikoshii; identical to SEQ ID NO: 4699
  CDS (1)..(1371)

SEQ ID NO: 64237 - protein, 456 aa, Pyrococcus horikoshii; identical to SEQ ID NO: 4700

SEQ ID NO: 64238 - DNA, 1431 bp, Chlamydophila pneumoniae, Chlamydia pneumoniae; identical to SEQ ID NO: 4701
  CDS (1)..(1431)

SEQ ID NO: 64239 - protein, 476 aa, Chlamydophila pneumoniae, Chlamydia pneumoniae; identical to SEQ ID NO: 4702

SEQ ID NO: 64240 - DNA, 1452 bp, Lactococcus lactis subsp. lactis; identical to SEQ ID NO: 4703
  CDS (1)..(1452)

SEQ ID NO: 64241 - protein, 483 aa, Lactococcus lactis subsp. lactis; identical to SEQ ID NO: 4704

SEQ ID NO: 64242 - DNA, 1461 bp, Sinorhizobium meliloti; identical to SEQ ID NO: 4705
  CDS (1)..(1461)

SEQ ID NO: 64243 - protein, 486 aa, Sinorhizobium meliloti; identical to SEQ ID NO: 4706

SEQ ID NO: 64244 - DNA, 1425 bp, Chlamydia trachomatis; identical to SEQ ID NO: 4707
  CDS (1)..(1425)

SEQ ID NO: 64245 - protein, 474 aa, Chlamydia trachomatis; identical to SEQ ID NO: 4708

SEQ ID NO: 64246 - DNA, 1701 bp, Sulfolobus solfataricus; identical to SEQ ID NO: 4709
  CDS (1)..(1701)

SEQ ID NO: 64247 - protein, 566 aa, Sulfolobus solfataricus; identical to SEQ ID NO: 4710

SEQ ID NO: 64248 - DNA, 1566 bp, Methanococcus jannaschii; identical to SEQ ID NO: 4711
  CDS (1)..(1566)

SEQ ID NO: 64249 - protein, 521 aa, Methanococcus jannaschii; identical to SEQ ID NO: 4712

SEQ ID NO: 64250 - DNA, 1431 bp, Bacillus halodurans; identical to SEQ ID NO: 4713
  CDS (1)..(1431)

SEQ ID NO: 64251 - protein, 476 aa, Bacillus halodurans; identical to SEQ ID NO: 4714

SEQ ID NO: 64252 - DNA, 1455 bp, Vibrio cholerae; identical to SEQ ID NO: 4715
  CDS (1)..(1455)

SEQ ID NO: 64253 - protein, 484 aa, Vibrio cholerae; identical to SEQ ID NO: 4716

SEQ ID NO: 64254 - DNA, 1833 bp, Arabidopsis thaliana (mouse-ear cress); identical to SEQ ID NO: 4717
  CDS (1)..(1833)

SEQ ID NO: 64255 - protein, 610 aa, Arabidopsis thaliana (mouse-ear cress); identical to SEQ ID NO: 4718

SEQ ID NO: 64256 - DNA, 1461 bp, Thermotoga maritima; identical to SEQ ID NO: 4719
  CDS (1)..(1461)

SEQ ID NO: 64257 - protein, 486 aa, Thermotoga maritima; identical to SEQ ID NO: 4720

SEQ ID NO: 64258 - DNA, 1542 bp, Pseudomonas aeruginosa; identical to SEQ ID NO: 4721
  CDS (1)..(1542)

SEQ ID NO: 64259 - protein, 513 aa, Pseudomonas aeruginosa; identical to SEQ ID NO: 4722

SEQ ID NO: 64260 - DNA, 3078 bp, Arabidopsis thaliana (mouse-ear cress); identical to SEQ ID NO: 4723
  CDS (1)..(3078)

SEQ ID NO: 64261 - protein, 1025 aa, Arabidopsis thaliana (mouse-ear cress); identical to SEQ ID NO: 4724

SEQ ID NO: 64262 - DNA, 1434 bp, Streptococcus pneumoniae; identical to SEQ ID NO: 4725
  CDS (1)..(1434)

SEQ ID NO: 64263 - protein, 477 aa, Streptococcus pneumoniae; identical to SEQ ID NO: 4726

SEQ ID NO: 64264 - DNA, 2533 bp, Oryza sativa (rice); identical to SEQ ID NO: 4727
  CDS (114)..(1994)

SEQ ID NO: 64265 - protein, 626 aa, Oryza sativa (rice); identical to SEQ ID NO: 4728

SEQ ID NO: 64266 - DNA, 1818 bp, Zea mays (maize); identical to SEQ ID NO: 4729
  CDS (1)..(1818)

SEQ ID NO: 64267 - protein, 605 aa, Zea mays (maize); identical to SEQ ID NO: 4730

SEQ ID NO: 64268 - DNA, 1455 bp, Bacillus subtilis; identical to SEQ ID NO: 4731
  CDS (1)..(1455)

SEQ ID NO: 64269 - protein, 484 aa, Bacillus subtilis; identical to SEQ ID NO: 4732

SEQ ID NO: 64270 - DNA, 2168 bp, Manihot esculenta (cassava); identical to SEQ ID NO: 4733
  CDS (75)..(1901)

SEQ ID NO: 64271 - protein, 608 aa, Manihot esculenta (cassava); identical to SEQ ID NO: 4734

SEQ ID NO: 64272 - DNA, 2035 bp, Pisum sativum (garden pea); identical to SEQ ID NO: 4735
  CDS (82)..(1893)

SEQ ID NO: 64273 - protein, 603 aa, Pisum sativum (garden pea); identical to SEQ ID NO: 4736

SEQ ID NO: 64274 - DNA, 1476 bp, Synechocystis sp; identical to SEQ ID NO: 4737
  CDS (1)..(1476)

SEQ ID NO: 64275 - protein, 491 aa, Synechocystis sp; identical to SEQ ID NO: 4738

SEQ ID NO: 64276 - DNA, 1434 bp, Synechocystis sp; identical to SEQ ID NO: 4739
  CDS (1)..(1434)

SEQ ID NO: 64277 - protein, 477 aa, Synechocystis sp; identical to SEQ ID NO: 4740

SEQ ID NO: 64278 - DNA, 2868 bp, Zea mays (maize); identical to SEQ ID NO: 4741
  CDS (670)..(2868)

SEQ ID NO: 64279 - protein, 732 aa, Zea mays (maize); identical to SEQ ID NO: 4742

SEQ ID NO: 64280 - DNA, 2480 bp, Zea mays (maize); identical to SEQ ID NO: 4743
  CDS (58)..(2154)

SEQ ID NO: 64281 - protein, 698 aa, Zea mays (maize); identical to SEQ ID NO: 4744

SEQ ID NO: 64282 - DNA, 6027 bp, Zea mays (maize); identical to SEQ ID NO: 4745
  CDS (120)..(5144)

SEQ ID NO: 64283 - protein, 1674 aa, Zea mays (maize); identical to SEQ ID NO: 4746

SEQ ID NO: 64284 - DNA, 2991 bp, Zea mays (maize); identical to SEQ ID NO: 4747
  misc_feature (2709)..(2709): n is a, c, g, or t
  CDS (602)..(2470)

SEQ ID NO: 64285 - protein, 622 aa, Zea mays (maize); identical to SEQ ID NO: 4748

SEQ ID NO: 64286 - DNA, 2360 bp, Solanum tuberosum (potato); identical to SEQ ID NO: 4749
  CDS (68)..(1993)

SEQ ID NO: 64287 - protein, 641 aa, Solanum tuberosum (potato); identical to SEQ ID NO: 4750

SEQ ID NO: 64288 - DNA, 2124 bp, Ipomoea batatas (sweet potato); identical to SEQ ID NO: 4751
  CDS (23)..(1849)

SEQ ID NO: 64289 - protein, 608 aa, Ipomoea batatas (sweet potato); identical to SEQ ID NO: 4752

SEQ ID NO: 64290 - DNA, 2287 bp, Sorghum bicolor (sorghum); identical to SEQ ID NO: 4753
  CDS (207)..(2033)

SEQ ID NO: 64291 - protein, 608 aa, Sorghum bicolor (sorghum); identical to SEQ ID NO: 4754

SEQ ID NO: 64292 - DNA, 4110 bp, Schizosaccharomyces pombe; identical to SEQ ID NO: 4755
  CDS (1)..(4110)

SEQ ID NO: 64293 - protein, 1369 aa, Schizosaccharomyces pombe; identical to SEQ ID NO: 4756

SEQ ID NO: 64294 - DNA, 1812 bp, Hordeum vulgare (barley); identical to SEQ ID NO: 4757
  CDS (1)..(1812)

SEQ ID NO: 64295 - protein, 603 aa, Hordeum vulgare (barley); identical to SEQ ID NO: 4758

SEQ ID NO: 64296 - DNA, 2161 bp, Solanum tuberosum (potato); identical to SEQ ID NO: 4759
  CDS (37)..(1860)

SEQ ID NO: 64297 - protein, 607 aa, Solanum tuberosum (potato); identical to SEQ ID NO: 4760

SEQ ID NO: 64298 - DNA, 2825 bp, Triticum aestivum; identical to SEQ ID NO: 4761
  CDS (162)..(2561)

SEQ ID NO: 64299 - protein, 799 aa, Triticum aestivum; identical to SEQ ID NO: 4762

SEQ ID NO: 64300 - DNA, 2771 bp, Triticum aestivum; identical to SEQ ID NO: 4763
  CDS (280)..(2550)

SEQ ID NO: 64301 - protein, 756 aa, Triticum aestivum; identical to SEQ ID NO: 4764

SEQ ID NO: 64302 - DNA, 4121 bp, Zea mays; identical to SEQ ID NO: 4765
  CDS (442)..(3954)

SEQ ID NO: 64303 - protein, 1170 aa, Zea mays; identical to SEQ ID NO: 4766

SEQ ID NO: 64304 - DNA, 3240 bp, Chlamydomonas reinhardtii; identical to SEQ ID NO: 4767
  CDS (138)..(2264)

SEQ ID NO: 64305 - protein, 708 aa, Chlamydomonas reinhardtii; identical to SEQ ID NO: 4768

SEQ ID NO: 64306 - DNA, 3049 bp, Chlamydomonas reinhardtii; identical to SEQ ID NO: 4769
  CDS (190)..(1920)

SEQ ID NO: 64307 - protein, 576 aa, Chlamydomonas reinhardtii; identical to SEQ ID NO: 4770

SEQ ID NO: 64308 - DNA, 2716 bp, Chlamydomonas reinhardtii; identical to SEQ ID NO: 4771
  CDS (93)..(2048)

SEQ ID NO: 64309 - protein, 651 aa, Chlamydomonas reinhardtii; identical to SEQ ID NO: 4772

SEQ ID NO: 64310 - DNA, 2325 bp, Ipomoea batatas; identical to SEQ ID NO: 4773
  CDS (155)..(2047)

SEQ ID NO: 64311 - protein, 630 aa, Ipomoea batatas; identical to SEQ ID NO: 4774

SEQ ID NO: 64312 - DNA, 1440 bp, Erwinia carotovora subsp; identical to SEQ ID NO: 4775
  CDS (1)..(1440)

SEQ ID NO: 64313 - protein, 479 aa, Erwinia carotovora subsp; identical to SEQ ID NO: 4776

SEQ ID NO: 64314 - DNA, 1497 bp, Bacillus thuringiensis serovar konkukian str; identical to SEQ ID NO: 4777
  CDS (1)..(1497)

SEQ ID NO: 64315 - protein, 498 aa, Bacillus thuringiensis serovar konkukian str; identical to SEQ ID NO: 4778

SEQ ID NO: 64316 - DNA, 1431 bp, Mycoplasma mobile; identical to SEQ ID NO: 4779
  CDS (1)..(1431): transl-table=4

SEQ ID NO: 64317 - protein, 476 aa, Mycoplasma mobile; identical to SEQ ID NO: 4780

SEQ ID NO: 64318 - DNA, 1815 bp, Hordeum bulbosum; identical to SEQ ID NO: 4781
  CDS (1)..(1815)

SEQ ID NO: 64319 - protein, 604 aa, Hordeum bulbosum; identical to SEQ ID NO: 4782

SEQ ID NO: 64320 - DNA, 1527 bp, Photobacterium profundum; identical to SEQ ID NO: 4783
  CDS (1)..(1527)

SEQ ID NO: 64321 - protein, 508 aa, Photobacterium profundum; identical to SEQ ID NO: 4784

SEQ ID NO: 64322 - DNA, 1569 bp, Methanococcus maripaludis; identical to SEQ ID NO: 4785
  CDS (1)..(1569)

SEQ ID NO: 64323 - protein, 522 aa, Methanococcus maripaludis; identical to SEQ ID NO: 4786

SEQ ID NO: 64324 - DNA, 1503 bp, Parachlamydia sp; identical to SEQ ID NO: 4787
  CDS (1)..(1503)

SEQ ID NO: 64325 - protein, 500 aa, Parachlamydia sp; identical to SEQ ID NO: 4788

SEQ ID NO: 64326 - DNA, 1452 bp, Rhodopseudomonas palustris; identical to SEQ ID NO: 4789
  CDS (1)..(1452)

SEQ ID NO: 64327 - protein, 483 aa, Rhodopseudomonas palustris; identical to SEQ ID NO: 4790

SEQ ID NO: 64328 - DNA, 1173 bp, Corynebacterium diphtheriae; identical to SEQ ID NO: 4791
  CDS (1)..(1173)

SEQ ID NO: 64329 - protein, 390 aa, Corynebacterium diphtheriae; identical to SEQ ID NO: 4792

SEQ ID NO: 64330 - DNA, 1578 bp, Ostreococcus tauri; identical to SEQ ID NO: 4793
  CDS (1)..(1578)

SEQ ID NO: 64331 - protein, 525 aa, Ostreococcus tauri; identical to SEQ ID NO: 4794

SEQ ID NO: 64332 - DNA, 1725 bp, Ostreococcus tauri; identical to SEQ ID NO: 4795
  CDS (1)..(1725)

SEQ ID NO: 64333 - protein, 574 aa, Ostreococcus tauri; identical to SEQ ID NO: 4796

SEQ ID NO: 64334 - DNA, 2022 bp, Ostreococcus tauri; identical to SEQ ID NO: 4797
  CDS (1)..(2022)

SEQ ID NO: 64335 - protein, 673 aa, Ostreococcus tauri; identical to SEQ ID NO: 4798

SEQ ID NO: 64336 - DNA, 2939 bp, Colocasia esculenta; identical to SEQ ID NO: 4799
  CDS (220)..(2634)

SEQ ID NO: 64337 - protein, 804 aa, Colocasia esculenta; identical to SEQ ID NO: 4800

SEQ ID NO: 64338 - DNA, 1554 bp, Thermoproteus tenax; identical to SEQ ID NO: 4801
  CDS (1)..(1554)

SEQ ID NO: 64339 - protein, 517 aa, Thermoproteus tenax; identical to SEQ ID NO: 4802

SEQ ID NO: 64340 - DNA, 1470 bp, Desulfovibrio vulgaris; identical to SEQ ID NO: 4803
  CDS (1)..(1470)

SEQ ID NO: 64341 - protein, 489 aa, Desulfovibrio vulgaris; identical to SEQ ID NO: 4804

SEQ ID NO: 64342 - DNA, 1323 bp, Thermus thermophilus; identical to SEQ ID NO: 4805
  CDS (1)..(1323)

SEQ ID NO: 64343 - protein, 440 aa, Thermus thermophilus; identical to SEQ ID NO: 4806

SEQ ID NO: 64344 - DNA, 1431 bp, Bacillus cereus; identical to SEQ ID NO: 4807
  CDS (1)..(1431)

SEQ ID NO: 64345 - protein, 476 aa, Bacillus cereus; identical to SEQ ID NO: 4808

SEQ ID NO: 64346 - DNA, 1476 bp, Treponema denticola; identical to SEQ ID NO: 4809
  CDS (1)..(1476)

SEQ ID NO: 64347 - protein, 491 aa, Treponema denticola; identical to SEQ ID NO: 4810

SEQ ID NO: 64348 - DNA, 1173 bp, Mycobacterium paratuberculosis; identical to SEQ ID NO: 4811
  CDS (1)..(1173)

SEQ ID NO: 64349 - protein, 390 aa, Mycobacterium paratuberculosis; identical to SEQ ID NO: 4812

SEQ ID NO: 64350 - DNA, 2486 bp, Phaseolus vulgaris; identical to SEQ ID NO: 4813
  CDS (39)..(2255)

SEQ ID NO: 64351 - protein, 738 aa, Phaseolus vulgaris; identical to SEQ ID NO: 4814

SEQ ID NO: 64352 - DNA, 2570 bp, Phaseolus vulgaris; identical to SEQ ID NO: 4815
  CDS (135)..(2309)

SEQ ID NO: 64353 - protein, 724 aa, Phaseolus vulgaris; identical to SEQ ID NO: 4816

SEQ ID NO: 64354 - DNA, 2444 bp, Phaseolus vulgaris; identical to SEQ ID NO: 4817
  CDS (78)..(2015)

SEQ ID NO: 64355 - protein, 645 aa, Phaseolus vulgaris; identical to SEQ ID NO: 4818

SEQ ID NO: 64356 - DNA, 1827 bp, Hordeum spontaneum; identical to SEQ ID NO: 4819
  CDS (1)..(1827)

SEQ ID NO: 64357 - protein, 608 aa, Hordeum spontaneum; identical to SEQ ID NO: 4820

SEQ ID NO: 64358 - DNA, 1248 bp, Gloeobacter violaceus; identical to SEQ ID NO: 4821
  CDS (1)..(1248)

SEQ ID NO: 64359 - protein, 415 aa, Gloeobacter violaceus; identical to SEQ ID NO: 4822

SEQ ID NO: 64360 - DNA, 3219 bp, Oryza sativa; identical to SEQ ID NO: 4823
  CDS (1)..(3219)

SEQ ID NO: 64361 - protein, 1072 aa, Oryza sativa; identical to SEQ ID NO: 4824

SEQ ID NO: 64362 - DNA, 2547 bp, Oryza sativa; identical to SEQ ID NO: 4825
  CDS (97)..(2022)

SEQ ID NO: 64363 - protein, 641 aa, Oryza sativa; identical to SEQ ID NO: 4826

SEQ ID NO: 64364 - DNA, 1242 bp, Streptomyces avermitilis; identical to SEQ ID NO: 4827
  CDS (1)..(1242)

SEQ ID NO: 64365 - protein, 413 aa, Streptomyces avermitilis; identical to SEQ ID NO: 4828

SEQ ID NO: 64366 - DNA, 2208 bp, Phaseolus vulgaris; identical to SEQ ID NO: 4829
  CDS (144)..(1991)

SEQ ID NO: 64367 - protein, 615 aa, Phaseolus vulgaris; identical to SEQ ID NO: 4830

SEQ ID NO: 64368 - DNA, 2748 bp, Oryza sativa; identical to SEQ ID NO: 4831
  CDS (1)..(2748)

SEQ ID NO: 64369 - protein, 915 aa, Oryza sativa; identical to SEQ ID NO: 4832

SEQ ID NO: 64370 - DNA, 1605 bp, Shewanella oneidensis; identical to SEQ ID NO: 4833
  CDS (1)..(1605)

SEQ ID NO: 64371 - protein, 534 aa, Shewanella oneidensis; identical to SEQ ID NO: 4834

SEQ ID NO: 64372 - DNA, 1173 bp, Corynebacterium efficiens; identical to SEQ ID NO: 4835
  CDS (1)..(1173)

SEQ ID NO: 64373 - protein, 390 aa, Corynebacterium efficiens; identical to SEQ ID NO: 4836

SEQ ID NO: 64374 - DNA, 2340 bp, Colocasia esculenta; identical to SEQ ID NO: 4837
  CDS (155)..(2086)

SEQ ID NO: 64375 - protein, 643 aa, Colocasia esculenta; identical to SEQ ID NO: 4838

SEQ ID NO: 64376 - DNA, 2409 bp, Hordeum vulgare; identical to SEQ ID NO: 4839
  CDS (1)..(2409)

SEQ ID NO: 64377 - protein, 802 aa, Hordeum vulgare; identical to SEQ ID NO: 4840

SEQ ID NO: 64378 - DNA, 2115 bp, Setaria italica; identical to SEQ ID NO: 4841
  CDS (142)..(1959)

SEQ ID NO: 64379 - protein, 605 aa, Setaria italica; identical to SEQ ID NO: 4842

SEQ ID NO: 64380 - DNA, 2081 bp, Triticum aestivum; identical to SEQ ID NO: 4843
  CDS (1)..(1800)

SEQ ID NO: 64381 - protein, 599 aa, Triticum aestivum; identical to SEQ ID NO: 4844

SEQ ID NO: 64382 - DNA, 1230 bp, Corynebacterium glutamicum; identical to SEQ ID NO: 4845
  CDS (1)..(1230)

SEQ ID NO: 64383 - protein, 409 aa, Corynebacterium glutamicum; identical to SEQ ID NO: 4846

SEQ ID NO: 64384 - DNA, 1356 bp, Pyrococcus furiosus; identical to SEQ ID NO: 4847
  CDS (1)..(1356)

SEQ ID NO: 64385 - protein, 451 aa, Pyrococcus furiosus; identical to SEQ ID NO: 4848

SEQ ID NO: 64386 - DNA, 2112 bp, Oryza sativa; identical to SEQ ID NO: 4849
  CDS (61)..(1887)

SEQ ID NO: 64387 - protein, 608 aa, Oryza sativa; identical to SEQ ID NO: 4850

SEQ ID NO: 64388 - DNA, 2496 bp, Oryza sativa; identical to SEQ ID NO: 4851
  CDS (1)..(2496)

SEQ ID NO: 64389 - protein, 831 aa, Oryza sativa; identical to SEQ ID NO: 4852

SEQ ID NO: 64390 - DNA, 1443 bp, Rhizobium loti; identical to SEQ ID NO: 4853
  CDS (1)..(1443)

SEQ ID NO: 64391 - protein, 480 aa, Rhizobium loti; identical to SEQ ID NO: 4854

SEQ ID NO: 64392 - DNA, 2100 bp, Pisum sativum; identical to SEQ ID NO: 4855
  CDS (6)..(1847)

SEQ ID NO: 64393 - protein, 613 aa, Pisum sativum; identical to SEQ ID NO: 4856

SEQ ID NO: 64394 - DNA, 3386 bp, Triticum aestivum; identical to SEQ ID NO: 4857
  CDS (251)..(2995)

SEQ ID NO: 64395 - protein, 914 aa, Triticum aestivum; identical to SEQ ID NO: 4858

SEQ ID NO: 64396 - DNA, 2919 bp, Oryza sativa; identical to SEQ ID NO: 4859
  CDS (165)..(2597)

SEQ ID NO: 64397 - protein, 810 aa, Oryza sativa; identical to SEQ ID NO: 4860

SEQ ID NO: 64398 - DNA, 2394 bp, Oryza sativa; identical to SEQ ID NO: 4861
  CDS (34)..(2118)

SEQ ID NO: 64399 - protein, 694 aa, Oryza sativa; identical to SEQ ID NO: 4862

SEQ ID NO: 64400 - DNA, 2903 bp, Oryza sativa; identical to SEQ ID NO: 4863
  CDS (86)..(2335)

SEQ ID NO: 64401 - protein, 749 aa, Oryza sativa; identical to SEQ ID NO: 4864

SEQ ID NO: 64402 - DNA, 1719 bp, Sulfolobus tokodaii; identical to SEQ ID NO: 4865
  CDS (1)..(1719)

SEQ ID NO: 64403 - protein, 572 aa, Sulfolobus tokodaii; identical to SEQ ID NO: 4866

SEQ ID NO: 64404 - DNA, 2270 bp, Perilla frutescens; identical to SEQ ID NO: 4867
  CDS (172)..(1986)

SEQ ID NO: 64405 - protein, 604 aa, Perilla frutescens; identical to SEQ ID NO: 4868

SEQ ID NO: 64406 - DNA, 1701 bp, Sulfolobus acidocaldarius; identical to SEQ ID NO: 4869
  CDS (1)..(1701)

SEQ ID NO: 64407 - protein, 566 aa, Sulfolobus acidocaldarius; identical to SEQ ID NO: 4870

SEQ ID NO: 64408 - DNA, 2793 bp, Triticum aestivum; identical to SEQ ID NO: 4871
  CDS (135)..(2531)

SEQ ID NO: 64409 - protein, 798 aa, Triticum aestivum; identical to SEQ ID NO: 4872

SEQ ID NO: 64410 - DNA, 5346 bp, Triticum aestivum; identical to SEQ ID NO: 4873
  CDS (29)..(4915)

SEQ ID NO: 64411 - protein, 1628 aa, Triticum aestivum; identical to SEQ ID NO: 4874

SEQ ID NO: 64412 - DNA, 2502 bp, Arabidopsis thaliana; identical to SEQ ID NO: 4875
  CDS (1)..(2379)

SEQ ID NO: 64413 - protein, 792 aa, Arabidopsis thaliana; identical to SEQ ID NO: 4876

SEQ ID NO: 64414 - DNA, 2592 bp, Sorghum bicolor; identical to SEQ ID NO: 4877
  CDS (59)..(1948)

SEQ ID NO: 64415 - protein, 629 aa, Sorghum bicolor; identical to SEQ ID NO: 4878

SEQ ID NO: 64416 - DNA, 1815 bp, Triticum turgidum subsp; identical to SEQ ID NO: 4879
  CDS (1)..(1815)

SEQ ID NO: 64417 - protein, 604 aa, Triticum turgidum subsp; identical to SEQ ID NO: 4880

SEQ ID NO: 64418 - DNA, 2575 bp, Manihot esculenta; identical to SEQ ID NO: 4881
  CDS (50)..(2305)

SEQ ID NO: 64419 - protein, 751 aa, Manihot esculenta; identical to SEQ ID NO: 4882

SEQ ID NO: 64420 - DNA, 2842 bp, Triticum aestivum; identical to SEQ ID NO: 4883
  CDS (89)..(2488)

SEQ ID NO: 64421 - protein, 799 aa, Triticum aestivum; identical to SEQ ID NO: 4884

SEQ ID NO: 64422 - DNA, 1818 bp, Triticum monococcum; identical to SEQ ID NO: 4885
  CDS (1)..(1818)

SEQ ID NO: 64423 - protein, 605 aa, Triticum monococcum; identical to SEQ ID NO: 4886

SEQ ID NO: 64424 - DNA, 2081 bp, Triticum aestivum; identical to SEQ ID NO: 4887
  CDS (120)..(1919)

SEQ ID NO: 64425 - protein, 599 aa, Triticum aestivum; identical to SEQ ID NO: 4888

SEQ ID NO: 64426 - DNA, 2591 bp, Triticum aestivum; identical to SEQ ID NO: 4889
  CDS (256)..(2199)

SEQ ID NO: 64427 - protein, 647 aa, Triticum aestivum; identical to SEQ ID NO: 4890

SEQ ID NO: 64428 - DNA, 1872 bp, Oryza sativa; identical to SEQ ID NO: 4891
  CDS (1)..(1872)

SEQ ID NO: 64429 - protein, 623 aa, Oryza sativa; identical to SEQ ID NO: 4892

SEQ ID NO: 64430 - DNA, 2028 bp, Triticum aestivum; identical to SEQ ID NO: 4893
  CDS (30)..(1754)

SEQ ID NO: 64431 - protein, 574 aa, Triticum aestivum; identical to SEQ ID NO: 4894

SEQ ID NO: 64432 - DNA, 3901 bp, Vigna unguiculata; identical to SEQ ID NO: 4895
  CDS (161)..(3604)

SEQ ID NO: 64433 - protein, 1147 aa, Vigna unguiculata; identical to SEQ ID NO: 4896

SEQ ID NO: 64434 - DNA, 3519 bp, Vigna unguiculata; identical to SEQ ID NO: 4897
  CDS (386)..(3010)

SEQ ID NO: 64435 - protein, 874 aa, Vigna unguiculata; identical to SEQ ID NO: 4898

SEQ ID NO: 64436 - DNA, 2221 bp, Phaseolus vulgaris; identical to SEQ ID NO: 4899
  CDS (30)..(1850)

SEQ ID NO: 64437 - protein, 606 aa, Phaseolus vulgaris; identical to SEQ ID NO: 4900

SEQ ID NO: 64438 - DNA, 2107 bp, Astragalus membranaceus; identical to SEQ ID NO: 4901
  CDS (96)..(1919)

SEQ ID NO: 64439 - protein, 607 aa, Astragalus membranaceus; identical to SEQ ID NO: 4902

SEQ ID NO: 64440 - DNA, 1389 bp, Bradyrhizobium japonicum; identical to SEQ ID NO: 4903
  CDS (1)..(1389)

SEQ ID NO: 64441 - protein, 462 aa, Bradyrhizobium japonicum; identical to SEQ ID NO: 4904

SEQ ID NO: 64442 - DNA, 1530 bp, Agrobacterium tumefaciens; identical to SEQ ID NO: 4905
  CDS (1)..(1530)

SEQ ID NO: 64443 - protein, 509 aa, Agrobacterium tumefaciens; identical to SEQ ID NO: 4906

SEQ ID NO: 64444 - DNA, 1449 bp, Bradyrhizobium japonicum; identical to SEQ ID NO: 4907
  CDS (1)..(1449)

SEQ ID NO: 64445 - protein, 482 aa, Bradyrhizobium japonicum; identical to SEQ ID NO: 4908

SEQ ID NO: 64446 - DNA, 1431 bp, Bacillus cereus; identical to SEQ ID NO: 4909
  CDS (1)..(1431)

SEQ ID NO: 64447 - protein, 476 aa, Bacillus cereus; identical to SEQ ID NO: 4910

SEQ ID NO: 64448 - DNA, 1458 bp, Bacillus stearothermophilus; identical to SEQ ID NO: 4911
  CDS (1)..(1458)

SEQ ID NO: 64449 - protein, 485 aa, Bacillus stearothermophilus; identical to SEQ ID NO: 4912

SEQ ID NO: 64450 - DNA, 1533 bp, Bordetella bronchiseptica; identical to SEQ ID NO: 4913
  CDS (1)..(1533)

SEQ ID NO: 64451 - protein, 510 aa, Bordetella bronchiseptica; identical to SEQ ID NO: 4914

SEQ ID NO: 64452 - DNA, 1428 bp, Chlamydophila caviae; identical to SEQ ID NO: 4915
  CDS (1)..(1428)

SEQ ID NO: 64453 - protein, 475 aa, Chlamydophila caviae; identical to SEQ ID NO: 4916

SEQ ID NO: 64454 - DNA, 1467 bp, Chlorobium tepidum; identical to SEQ ID NO: 4917
  CDS (1)..(1467)

SEQ ID NO: 64455 - protein, 488 aa, Chlorobium tepidum; identical to SEQ ID NO: 4918

SEQ ID NO: 64456 - DNA, 1449 bp, Clostridium perfringens; identical to SEQ ID NO: 4919
  CDS (1)..(1449)

SEQ ID NO: 64457 - protein, 482 aa, Clostridium perfringens; identical to SEQ ID NO: 4920

SEQ ID NO: 64458 - DNA, 1335 bp, Deinococcus radiodurans; identical to SEQ ID NO: 4921
  CDS (1)..(1335)

SEQ ID NO: 64459 - protein, 444 aa, Deinococcus radiodurans; identical to SEQ ID NO: 4922

SEQ ID NO: 64460 - DNA, 1386 bp, Fusobacterium nucleatum; identical to SEQ ID NO: 4923
  CDS (1)..(1386)

SEQ ID NO: 64461 - protein, 461 aa, Fusobacterium nucleatum; identical to SEQ ID NO: 4924

SEQ ID NO: 64462 - DNA, 1377 bp, Gloeobacter violaceus; identical to SEQ ID NO: 4925
  CDS (1)..(1377)

SEQ ID NO: 64463 - protein, 458 aa, Gloeobacter violaceus; identical to SEQ ID NO: 4926

SEQ ID NO: 64464 - DNA, 1440 bp, Lactobacillus plantarum; identical to SEQ ID NO: 4927
  CDS (1)..(1440)

SEQ ID NO: 64465 - protein, 479 aa, Lactobacillus plantarum; identical to SEQ ID NO: 4928

SEQ ID NO: 64466 - DNA, 1488 bp, Nitrosomonas europaea; identical to SEQ ID NO: 4929
  CDS (1)..(1488)

SEQ ID NO: 64467 - protein, 495 aa, Nitrosomonas europaea; identical to SEQ ID NO: 4930

SEQ ID NO: 64468 - DNA, 1434 bp, Oceanobacillus iheyensis; identical to SEQ ID NO: 4931
  CDS (1)..(1434)

SEQ ID NO: 64469 - protein, 477 aa, Oceanobacillus iheyensis; identical to SEQ ID NO: 4932

SEQ ID NO: 64470 - DNA, 1443 bp, Pasteurella multocida; identical to SEQ ID NO: 4933
  CDS (1)..(1443)

SEQ ID NO: 64471 - protein, 480 aa, Pasteurella multocida; identical to SEQ ID NO: 4934

SEQ ID NO: 64472 - DNA, 1506 bp, Prochlorococcus marinus; identical to SEQ ID NO: 4935
  CDS (1)..(1506)

SEQ ID NO: 64473 - protein, 501 aa, Prochlorococcus marinus; identical to SEQ ID NO: 4936

SEQ ID NO: 64474 - DNA, 1500 bp, Prochlorococcus marinus; identical to SEQ ID NO: 4937
  CDS (1)..(1500)

SEQ ID NO: 64475 - protein, 499 aa, Prochlorococcus marinus; identical to SEQ ID NO: 4938

SEQ ID NO: 64476 - DNA, 1452 bp, Prochlorococcus marinus subsp; identical to SEQ ID NO: 4939
  CDS (1)..(1452)

SEQ ID NO: 64477 - protein, 483 aa, Prochlorococcus marinus subsp; identical to SEQ ID NO: 4940

SEQ ID NO: 64478 - DNA, 1560 bp, Pseudomonas putida; identical to SEQ ID NO: 4941
  CDS (1)..(1560)

SEQ ID NO: 64479 - protein, 519 aa, Pseudomonas putida; identical to SEQ ID NO: 4942

SEQ ID NO: 64480 - DNA, 1455 bp, Pseudomonas syringae; identical to SEQ ID NO: 4943
  CDS (1)..(1455)

SEQ ID NO: 64481 - protein, 484 aa, Pseudomonas syringae; identical to SEQ ID NO: 4944

SEQ ID NO: 64482 - DNA, 1626 bp, Ralstonia solanacearum; identical to SEQ ID NO: 4945
  CDS (1)..(1626)

SEQ ID NO: 64483 - protein, 541 aa, Ralstonia solanacearum; identical to SEQ ID NO: 4946

SEQ ID NO: 64484 - DNA, 1446 bp, Rhizobium loti; identical to SEQ ID NO: 4947
  CDS (1)..(1446)

SEQ ID NO: 64485 - protein, 481 aa, Rhizobium loti; identical to SEQ ID NO: 4948

SEQ ID NO: 64486 - DNA, 1443 bp, Rhizobium tropici; identical to SEQ ID NO: 4949
  CDS (1)..(1443)

SEQ ID NO: 64487 - protein, 480 aa, Rhizobium tropici; identical to SEQ ID NO: 4950

SEQ ID NO: 64488 - DNA, 1524 bp, Rhodopirellula baltica; identical to SEQ ID NO: 4951
  CDS (1)..(1524)

SEQ ID NO: 64489 - protein, 507 aa, Rhodopirellula baltica; identical to SEQ ID NO: 4952

SEQ ID NO: 64490 - DNA, 1434 bp, Rhodobacter sphaeroides; identical to SEQ ID NO: 4953
  CDS (1)..(1434)

SEQ ID NO: 64491 - protein, 477 aa, Rhodobacter sphaeroides; identical to SEQ ID NO: 4954

SEQ ID NO: 64492 - DNA, 1434 bp, Salmonella typhimurium; identical to SEQ ID NO: 4955
  CDS (1)..(1434)

SEQ ID NO: 64493 - protein, 477 aa, Salmonella typhimurium; identical to SEQ ID NO: 4956

SEQ ID NO: 64494 - DNA, 1431 bp, Streptococcus mutans; identical to SEQ ID NO: 4957
  CDS (1)..(1431)

SEQ ID NO: 64495 - protein, 476 aa, Streptococcus mutans; identical to SEQ ID NO: 4958

SEQ ID NO: 64496 - DNA, 1425 bp, Synechococcus elongatus; identical to SEQ ID NO: 4959
  CDS (1)..(1425)

SEQ ID NO: 64497 - protein, 474 aa, Synechococcus elongatus; identical to SEQ ID NO: 4960

SEQ ID NO: 64498 - DNA, 1398 bp, Synechococcus sp; identical to SEQ ID NO: 4961
  CDS (1)..(1398)

SEQ ID NO: 64499 - protein, 465 aa, Synechococcus sp; identical to SEQ ID NO: 4962

SEQ ID NO: 64500 - DNA, 1542 bp, Synechococcus sp; identical to SEQ ID NO: 4963
  CDS (1)..(1542)

SEQ ID NO: 64501 - protein, 513 aa, Synechococcus sp; identical to SEQ ID NO: 4964

SEQ ID NO: 64502 - DNA, 1317 bp, Thermus caldophilus; identical to SEQ ID NO: 4965
  CDS (1)..(1317)

SEQ ID NO: 64503 - protein, 438 aa, Thermus caldophilus; identical to SEQ ID NO: 4966

SEQ ID NO: 64504 - DNA, 1458 bp, Vibrio parahaemolyticus; identical to SEQ ID NO: 4967
  CDS (1)..(1458)

SEQ ID NO: 64505 - protein, 485 aa, Vibrio parahaemolyticus; identical to SEQ ID NO: 4968

SEQ ID NO: 64506 - DNA, 1458 bp, Vibrio vulnificus; identical to SEQ ID NO: 4969
  CDS (1)..(1458)

SEQ ID NO: 64507 - protein, 485 aa, Vibrio vulnificus; identical to SEQ ID NO: 4970

SEQ ID NO: 64508 - DNA, 1425 bp, Xanthomonas axonopodis; identical to SEQ ID NO: 4971
  CDS (1)..(1425)

SEQ ID NO: 64509 - protein, 474 aa, Xanthomonas axonopodis; identical to SEQ ID NO: 4972

SEQ ID NO: 64510 - DNA, 1425 bp, Xanthomonas campestris; identical to SEQ ID NO: 4973
  CDS (1)..(1425)

SEQ ID NO: 64511 - protein, 474 aa, Xanthomonas campestris; identical to SEQ ID NO: 4974

SEQ ID NO: 64512 - DNA, 2345 bp, Antirrhinum majus; identical to SEQ ID NO: 4975
  CDS (10)..(1836)

SEQ ID NO: 64513 - protein, 608 aa, Antirrhinum majus; identical to SEQ ID NO: 4976

SEQ ID NO: 64514 - DNA, 2211 bp, Ipomoea batatas; identical to SEQ ID NO: 4977
  CDS (93)..(1919)

SEQ ID NO: 64515 - protein, 608 aa, Ipomoea batatas; identical to SEQ ID NO: 4978

SEQ ID NO: 64516 - DNA, 2988 bp, Pisum sativum; identical to SEQ ID NO: 4979
  CDS (140)..(2398)

SEQ ID NO: 64517 - protein, 752 aa, Pisum sativum; identical to SEQ ID NO: 4980

SEQ ID NO: 64518 - DNA, 2329 bp, Arabidopsis thaliana; identical to SEQ ID NO: 4981
  CDS (67)..(2025)

SEQ ID NO: 64519 - protein, 652 aa, Arabidopsis thaliana; identical to SEQ ID NO: 4982

SEQ ID NO: 64520 - DNA, 4127 bp, Solanum tuberosum; identical to SEQ ID NO: 4983
  CDS (143)..(3835)

SEQ ID NO: 64521 - protein, 1230 aa, Solanum tuberosum; identical to SEQ ID NO: 4984

SEQ ID NO: 64522 - DNA, 25 bp, Artificial sequence
  Primer sequence
atgcaggttttacatgtatgttcag

SEQ ID NO: 64523 - DNA, 26 bp, Artificial sequence
  Primer sequence
ttatttcaagcgatagtaaagctcac

SEQ ID NO: 64524 - protein, 974 aa, Artificial sequence; identical to SEQ ID NO: 32738
  Consensus
  Variant (2)..(2): Xaa in position 2 is any amino acid
  Variant (5)..(5): Xaa in position 5 is any amino acid
  Variant (10)..(10): Xaa in position 10 is any amino acid
  Variant (14)..(14): Xaa in position 14 is any amino acid
  Variant (18)..(108): Xaa in position 18 to 108 is any or no amino acid
  Variant (119)..(119): Xaa in position 119 is any amino acid
  Variant (123)..(124): Xaa in position 123 to 124 is any amino acid
  Variant (126)..(151): Xaa in position 126 to 151 is any or no amino acid
  Variant (153)..(153): Xaa in position 153 is any amino acid
  Variant (155)..(155): Xaa in position 155 is any amino acid
  Variant (160)..(160): Xaa in position 160 is any amino acid
  Variant (162)..(171): Xaa in position 162 to 171 is any amino acid
  Variant (173)..(178): Xaa in position 173 to 178 is any amino acid
  Variant (179)..(209): Xaa in position 179 to 209 is any or no amino acid
  Variant (211)..(216): Xaa in position 211 to 216 is any amino acid
  Variant (217)..(218): Xaa in position 217 to 218 is any or no amino acid
  Variant (221)..(223): Xaa in position 221 to 223 is any amino acid
  Variant (227)..(227): Xaa in position 227 is any amino acid
  Variant (229)..(229): Xaa in position 229 is any amino acid
  Variant (231)..(232): Xaa in position 231 to 232 is any amino acid
  Variant (234)..(234): Xaa in position 234 is any amino acid
  Variant (235)..(262): Xaa in position 235 to 262 is any or no amino acid
  Variant (264)..(264): Xaa in position 264 is any amino acid
  Variant (266)..(268): Xaa in position 266 to 268 is any amino acid
  Variant (272)..(275): Xaa in position 272 to 275 is any amino acid
  Variant (279)..(280): Xaa in position 279 to 280 is any amino acid
  Variant (281)..(406): Xaa in position 281 to 406 is any or no amino acid
  Variant (420)..(420): Xaa in position 420 is any amino acid
  Variant (424)..(425): Xaa in position 424 to 425 is any or no amino acid
  Variant (427)..(429): Xaa in position 427 to 429 is any or no amino acid
  Variant (431)..(442): Xaa in position 431 to 442 is any or no amino acid
  Variant (446)..(446): Xaa in position 446 is any amino acid
  Variant (456)..(456): Xaa in position 456 is any amino acid
  Variant (457)..(464): Xaa in position 457 to 464 is any or no amino acid
  Variant (466)..(475): Xaa in position 466 to 475 is any or no amino acid
  Variant (477)..(491): Xaa in position 477 to 491 is any or no amino acid
  Variant (493)..(514): Xaa in position 493 to 514 is any or no amino acid
  Variant (523)..(524): Xaa in position 523 to 524 is any or no amino acid
  Variant (529)..(529): Xaa in position 529 is any amino acid
  Variant (537)..(537): Xaa in position 537 is any amino acid
  Variant (540)..(540): Xaa in position 540 is any amino acid
  Variant (542)..(549): Xaa in position 542 to 549 is any or no amino acid
  Variant (551)..(551): Xaa in position 551 is any or no amino acid
  Variant (553)..(553): Xaa in position 553 is any or no amino acid
  Variant (557)..(557): Xaa in position 557 is any or no amino acid
  Variant (560)..(560): Xaa in position 560 is any amino acid
  Variant (561)..(567): Xaa in position 561 to 567 is any or no amino acid
  Variant (569)..(569): Xaa in position 569 is any amino acid
  Variant (577)..(578): Xaa in position 577 to 578 is any amino acid
  Variant (579)..(579): Xaa in position 579 is any or no amino acid
  Variant (583)..(584): Xaa in position 583 to 584 is any amino acid
  Variant (586)..(587): Xaa in position 586 to 587 is any or no amino acid
  Variant (589)..(607): Xaa in position 589 to 607 is any or no amino acid
  Variant (609)..(612): Xaa in position 609 to 612 is any or no amino acid
  Variant (614)..(641): Xaa in position 614 to 641 is any or no amino acid
  Variant (643)..(645): Xaa in position 643 to 645 is any or no amino acid
  Variant (647)..(647): Xaa in position 647 is any or no amino acid
  Variant (651)..(652): Xaa in position 651 to 652 is any amino acid
  Variant (656)..(656): Xaa in position 656 is any amino acid
  Variant (658)..(663): Xaa in position 658 to 663 is any or no amino acid
  Variant (668)..(668): Xaa in position 668 is any amino acid
  Variant (673)..(674): Xaa in position 673 to 674 is any amino acid
  Variant (682)..(683): Xaa in position 682 to 683 is any amino acid
  Variant (686)..(687): Xaa in position 686 to 687 is any amino acid
  Variant (690)..(692): Xaa in position 690 to 692 is any amino acid
  Variant (693)..(704): Xaa in position 693 to 704 is any or no amino acid
  Variant (715)..(715): Xaa in position 715 is any amino acid
  Variant (716)..(729): Xaa in position 716 to 729 is any or no amino acid
  Variant (732)..(733): Xaa in position 732 to 733 is any or no amino acid
  Variant (735)..(736): Xaa in position 735 to 736 is any amino acid
  Variant (738)..(739): Xaa in position 738 to 739 is any amino acid
  Variant (740)..(740): Xaa in position 740 is any or no amino acid
  Variant (742)..(743): Xaa in position 742 to 743 is any amino acid
  Variant (745)..(748): Xaa in position 745 to 748 is any or no amino acid
  Variant (750)..(752): Xaa in position 750 to 752 is any or no amino acid
  Variant (754)..(754): Xaa in position 754 is any or no amino acid
  Variant (756)..(758): Xaa in position 756 to 758 is any amino acid
  Variant (762)..(762): Xaa in position 762 is any amino acid
  Variant (764)..(764): Xaa in position 764 is any amino acid
  Variant (782)..(844): Xaa in position 782 to 844 is any or no amino acid
  Variant (847)..(847): Xaa in position 847 is any amino acid
  Variant (858)..(859): Xaa in position 858 to 859 is any amino acid
  Variant (864)..(864): Xaa in position 864 is any amino acid
  Variant (868)..(868): Xaa in position 868 is any amino acid
  Variant (870)..(871): Xaa in position 870 to 871 is any amino acid
  Variant (872)..(892): Xaa in position 872 to 892 is any or no amino acid
  Variant (894)..(894): Xaa in position 894 is any or no amino acid
  Variant (897)..(897): Xaa in position 897 is any amino acid
  Variant (900)..(901): Xaa in position 900 to 901 is any amino acid
  Variant (903)..(905): Xaa in position 903 to 905 is any amino acid
  Variant (907)..(908): Xaa in position 907 to 908 is any amino acid
  Variant (911)..(911): Xaa in position 911 is any amino acid
  Variant (915)..(916): Xaa in position 915 to 916 is any or no amino acid
  Variant (918)..(942): Xaa in position 918 to 942 is any or no amino acid
  Variant (944)..(945): Xaa in position 944 to 945 is any or no amino acid
  Variant (947)..(952): Xaa in position 947 to 952 is any or no amino acid
  Variant (955)..(956): Xaa in position 955 to 956 is any amino acid
  Variant (961)..(962): Xaa in position 961 to 962 is any amino acid
  Variant (965)..(966): Xaa in position 965 to 966 is any amino acid
  Variant (968)..(969): Xaa in position 968 to 969 is any amino acid
  Variant (972)..(973): Xaa in position 972 to 973 is any amino acid

SEQ ID NO: 64525 - protein, 56 aa, Artificial sequence; identical to SEQ ID NO: 6176
  Consensus
  Variant (1)..(1): Xaa in position 1 is Gly or Ala
  Variant (2)..(4): Xaa in position 2 to 4 is any amino acid
  Variant (5)..(5): Xaa in position 5 is Ala, Ser or Cys
  Variant (6)..(7): Xaa in position 6 to 7 is any amino acid
  Variant (8)..(8): Xaa in position 8 is Val, Ile, Leu or Ala
  Variant (9)..(9): Xaa in position 9 is any amino acid
  Variant (10)..(10): Xaa in position 10 is Thr, Ala or Val
  Variant (13)..(14): Xaa in position 13 to 14 is any amino acid
  Variant (15)..(15): Xaa in position 15 is Tyr, Met or His
  Variant (16)..(16): Xaa in position 16 is Ala, Ser, Leu, Lys or Val
  Variant (17)..(17): Xaa in position 17 is any amino acid
  Variant (18)..(18): Xaa in position 18 is Glu, Gln or Asp
  Variant (19)..(19): Xaa in position 19 is Ile, Leu, Val or Glu
  Variant (20)..(28): Xaa in position 20 to 28 is any amino acid
  Variant (29)..(43): Xaa in position 29 to 43 is any or no amino acid
  Variant (44)..(44): Xaa in position 44 is Gly, Val or Tyr
  Variant (45)..(45): Xaa in position 45 is Ile or Val
  Variant (46)..(46): Xaa in position 46 is any amino acid
  Variant (49)..(49): Xaa in position 49 is Ile, Met, Val, Leu or Cys
  Variant (51)..(52): Xaa in position 51 to 52 is any amino acid
  Variant (53)..(53): Xaa in position 53 is any or no amino acid
  Variant (54)..(54): Xaa in position 54 is Trp, Tyr, Phe or Leu
  Variant (55)..(55): Xaa in position 55 is any amino acid
  Variant (56)..(56): Xaa in position 56 is Pro or Glu

SEQ ID NO: 64526 - protein, 65 aa, Artificial sequence; identical to SEQ ID NO: 6177
  Consensus
  Variant (1)..(1): Xaa in position 1 is Lys, Arg or Phe
  Variant (2)..(4): Xaa in position 2 to 4 is any amino acid
  Variant (5)..(5): Xaa in position 5 is Lys, Arg, Ala or Glu
  Variant (6)..(7): Xaa in position 6 to 7 is any amino acid
  Variant (8)..(8): Xaa in position 8 is Leu, Val or Ile
  Variant (9)..(11): Xaa in position 9 to 11 is any amino acid
  Variant (12)..(12): Xaa in position 12 is Leu, Val, Phe, Met or Thr
  Variant (13)..(13): Xaa in position 13 is any amino acid
  Variant (14)..(14): Xaa in position 14 is Leu, Ile, Phe or Val
  Variant (15)..(19): Xaa in position 15 to 19 is any amino acid
  Variant (20)..(22): Xaa in position 20 to 22 is any or no amino acid
  Variant (23)..(23): Xaa in position 23 is Leu, Val, Ile or Met
  Variant (24)..(24): Xaa in position 24 is Ile, Val, Phe, Leu, Tyr or Met
  Variant (25)..(26): Xaa in position 25 to 26 is any amino acid
  Variant (27)..(27): Xaa in position 27 is Ile or Val
  Variant (28)..(28): Xaa in position 28 is Gly, Ser, Thr, Cys or Ala
  Variant (30)..(30): Xaa in position 30 is Leu, Ile or Phe
  Variant (31)..(32): Xaa in position 31 to 32 is any amino acid
  Variant (33)..(33): Xaa in position 33 is any or no amino acid
  Variant (37)..(37): Xaa in position 37 is any amino acid
  Variant (38)..(38): Xaa in position 38 is Asp, His or Glu
  Variant (39)..(39): Xaa in position 39 is any amino acid
  Variant (40)..(40): Xaa in position 40 is Ile, Leu, Val, Met, Ala or Thr
  Variant (41)..(54): Xaa in position 41 to 54 is any amino acid
  Variant (55)..(59): Xaa in position 55 to 59 is any or no amino acid
  Variant (60)..(60): Xaa in position 60 is Val, Ile, Ala, Leu or Tyr
  Variant (61)..(61): Xaa in position 61 is Leu, Ile, Val, Met or Cys
  Variant (62)..(62): Xaa in position 62 is Leu, Val, Ile or Ala
  Variant (64)..(64): Xaa in position 64 is any amino acid
  Variant (65)..(65): Xaa in position 65 is Gly, Ala, Ser, Pro or Cys

SEQ ID NO: 64527 - protein, 51 aa, Artificial sequence; identical to SEQ ID NO: 6178
  Consensus
  Variant (1)..(1): Xaa in position 1 is Phe, Tyr, Leu or His
  Variant (2)..(5): Xaa in position 2 to 5 is any amino acid
  Variant (6)..(6): Xaa in position 6 is Ala, Ser, Ile or Val
  Variant (7)..(7): Xaa in position 7 is His, Arg or Gln
  Variant (8)..(8): Xaa in position 8 is any amino acid
  Variant (9)..(9): Xaa in position 9 is Ile, Val, Leu, Met or Ala
  Variant (10)..(10): Xaa in position 10 is any amino acid
  Variant (11)..(11): Xaa in position 11 is Ala, Gly or Thr
  Variant (12)..(12): Xaa in position 12 is Gly, Ala or Ser
  Variant (13)..(13): Xaa in position 13 is any amino acid
  Variant (15)..(16): Xaa in position 15 to 16 is any amino acid
  Variant (17)..(17): Xaa in position 17 is Leu, Ile, Val, Ala, Met or Cys
  Variant (18)..(18): Xaa in position 18 is Met, Ile, Val, His or Cys
  Variant (19)..(19): Xaa in position 19 is Pro or Thr
  Variant (21)..(21): Xaa in position 21 is any amino acid
  Variant (22)..(22): Xaa in position 22 is Phe or Tyr
  Variant (24)..(24): Xaa in position 24 is Pro or Ala
  Variant (25)..(25): Xaa in position 25 is Cys, Phe or Leu
  Variant (27)..(27): Xaa in position 27 is Leu or Ile
  Variant (28)..(28): Xaa in position 28 is any amino acid
  Variant (29)..(29): Xaa in position 29 is Gln, Asn or Pro
  Variant (30)..(30): Xaa in position 30 is Leu, Met or Ile
  Variant (31)..(31): Xaa in position 31 is any amino acid
  Variant (32)..(32): Xaa in position 32 is Ala, Gly or Ser
  Variant (33)..(33): Xaa in position 33 is Met, Leu or Gln
  Variant (34)..(34): Xaa in position 34 is any amino acid
  Variant (35)..(35): Xaa in position 35 is Tyr, Phe, Cys or Leu
  Variant (36)..(36): Xaa in position 36 is Gly, Ala or Asn
  Variant (37)..(37): Xaa in position 37 is Thr, Ser, Ala or Cys
  Variant (38)..(38): Xaa in position 38 is Val, Ile, Leu, Pro or Ala
  Variant (39)..(39): Xaa in position 39 is Pro, Cys or Val
  Variant (40)..(40): Xaa in position 40 is Ile, Val, Leu or Ala
  Variant (41)..(41): Xaa in position 41 is Val, Ala or Cys
  Variant (42)..(42): Xaa in position 42 is Arg, His, Ala, Ser or Thr
  Variant (43)..(43): Xaa in position 43 is any amino acid
  Variant (44)..(44): Xaa in position 44 is Thr or Val
  Variant (47)..(47): Xaa in position 47 is Leu or Ile
  Variant (48)..(48): Xaa in position 48 is any amino acid
  Variant (49)..(49): Xaa in position 49 is Asp or Glu
  Variant (50)..(50): Xaa in position 50 is Thr, Ser or Val
  Variant (51)..(51): Xaa in position 51 is Val or Ile

SEQ ID NO: 64528 - DNA, 834 bp, Escherichia coli
  CDS (1)..(834)
atgctggcgatgccttccgctatctccgtcgctgtattacccgattcaccgcacgccagagagatggcgaccaaagcgcataacagcgggcacgaagtgttgattcatctcccgatggcaccgttgagtaaacagccgctggagaaaaatacgctacgcccggagatgagcagcgacgaaattgagcgcattattcgtagtgcggtcaataacgtgccctatgccgtggggatcaacaaccacatgggcagcaagatgacctctaacctgtttggtatgcagaaagtgatgcaggcgctggagcgttacaatctttacttcctcgacagcgtaaccatcggtaatacccaggcgatgcgcgccgcgcaaggcactggcgtgaaggtgatcaaacggaaggtattcctcgacgattcgcaaaatgaagcggacatccgtgtgcaatttaatcgcgcaattgacctggcgcgtcgcaacggttcgaccattgccattgggcatcctcaccctgcaacggtacgcgtgttgcaacagatggtttataacctgccgccagacattacgctggtgaaagccagcagcttgctgaatgaaccgcaggttgatacttctacaccgccgaaaaacgctgtgcctgatgcaccgcgtaatccgttccgtggcgtgaagctgtgcaaaccgaagaaaccgatagaacctgtttatgctaatcgcttctttgaagtattaagcgaaagcatcagccagagcacgctgatcgtttacttccagcatcagtggcaaggctggggcaaacagcccgaagcggcgaagtttaacgctagcgcaaattaa

SEQ ID NO: 64529 - protein, 277 aa, Escherichia coli
MLAMPSAISVAVLPDSPHAREMATKAHNSGHEVLIHLPMAPLSKQPLEKNTLRPEMSSDEIERIIRSAVNNVPYAVGINNHMGSKMTSNLFGMQKVMQALERYNLYFLDSVTIGNTQAMRAAQGTGVKVIKRKVFLDDSQNEADIRVQFNRAIDLARRNGSTIAIGHPHPATVRVLQQMVYNLPPDITLVKASSLLNEPQVDTSTPPKNAVPDAPRNPFRGVKLCKPKKPIEPVYANRFFEVLSESISQSTLIVYFQHQWQGWGKQPEAAKFNASAN

SEQ ID NO: 64530 - DNA, 882 bp, Borrelia burgdorferi B31
  CDS (1)..(882): transl_table=11
atgtttgtattttatattaaaaaaaacaagtttattattgtaatttttattataatttctattgttattgcaataactcaggcatttgcaagttttttatattttaatgacaattcaaaaattgcaaatgccccacttaaaaataggtttgaaaaaacacaaaaagaaagcttaataataaaaaacaacaacgaggataaaaaagccaaaagcaaacctaagttttacttaatcattgacgacgtgggctatgatgaatttatgttagaacaatttataaaacttaatcttaaaataacttatgctattattccatttttaccaaaatcaatgagtttatacaaaaaactaaaaaatgctaacaaaacagtaataatacatttcccaatgcaatcaaaacatagaaattcaatagaaaaatttcatataaacataaaagataaaaaagaagaaatacacaaaaaaatcgaaaaagcatttaaaaagtatcctgatgcaaaaataatgaataaccatatgggaagtttaatcacttcaaataaagatttgatgaaaatcattttagaaaagcttaaagagattgacagatattttttcgacagcgtaactattgcaggaagcgtaccagaaataataggcaaagaaattggagttaaagtagaaaaaagagacgtatttcttgatagcaaagacacagaagagtccgtaacaaaggagcttgaaaaagcaaaaaatattgctagaaaaaatggaatggtaaaagtaataggacacatttggtctaaaaatacgctaaaagtccttaaaaaagaaggacctgatttaaaccaggaattcgaattcgacaacttattaaatctttacgaggaaacaatcagatga

SEQ ID NO: 64531 - protein, 293 aa, Borrelia burgdorferi B31
MFVFYIKKNKFIIVIFIIISIVIAITQAFASFLYFNDNSKIANAPLKNRFEKTQKESLIIKNNNEDKKAKSKPKFYLIIDDVGYDEFMLEQFIKLNLKITYAIIPFLPKSMSLYKKLKNANKTVIIHFPMQSKHRNSIEKFHINIKDKKEEIHKKIEKAFKKYPDAKIMNNHMGSLITSNKDLMKIILEKLKEIDRYFFDSVTIAGSVPEIIGKEIGVKVEKRDVFLDSKDTEESVTKELEKAKNIARKNGMVKVIGHIWSKNTLKVLKKEGPDLNQEFEFDNLLNLYEETIR

SEQ ID NO: 64532 - DNA, 822 bp, Bacillus halodurans C-125
  CDS (1)..(822): transl_table=11
atgcaaacgtattttaagcttattttccttctttcagcctccctcctctgtcttggtttggcaagtccagatgattcaaataaaggcgagatgaaacgagcagccatcattattgatgattttggcggggatgtaaagggtgttgatgattttttgacaggagagattccagttaccgtagcggttatgccctttcttgaacactcaacaaaacaagcagaaatagcccaagcagccggactggaagtgattgttcatatgcctcttgagccgaaaaaaggcaaaatctcgtggcttgggccaagtggaatcacaagtaatttatccgtgggagaagtgaagagtcgcgtgaggaaagcctttgatgatatcccctacgcagttggcttaaacaatcacatggggtcgaaaatcgttgaaaacgaaaaaatcatgcgagccattctcgaagttgtaaaggaaaaaaatgcattcattatcgatagtgggacaagcccacactcccttattcctcaattggcagaggagctagaggttccttatgcgacgaggagcatctttttagacaatactcactcatctagaaaagaagttataaaaaacatgcgtaagctcgcaaaaaaagcaaaacaaggttccgagccaatcgggattggtcatgtgggggtacgtggggatgagacgtatgctggaatccgttccatgttggacgaatttcaagcagagtcgattcagctcgtccccgtctctcaactactgccaagccctattgaagaagaccacaacaagttttggcaacaaccttttcaagcaaaggagtga

SEQ ID NO: 64533 - protein, 273 aa, Bacillus halodurans C-125
MQTYFKLIFLLSASLLCLGLASPDDSNKGEMKRAAIIIDDFGGDVKGVDDFLTGEIPVTVAVMPFLEHSTKQAEIAQAAGLEVIVHMPLEPKKGKISWLGPSGITSNLSVGEVKSRVRKAFDDIPYAVGLNNHMGSKIVENEKIMRAILEVVKEKNAFIIDSGTSPHSLIPQLAEELEVPYATRSIFLDNTHSSRKEVIKNMRKLAKKAKQGSEPIGIGHVGVRGDETYAGIRSMLDEFQAESIQLVPVSQLLPSPIEEDHNKFWQQPFQAKE

SEQ ID NO: 64534 - DNA, 843 bp, Pasteurella multocida subsp. multocida str. Pm70
  CDS (1)..(843): transl_table=11
atgaaaacaattggcgtcaaaagggtgaaaagtgcgctactttttgggggattttggatcagcatggcgttggcacagcctgccaagttagccattgtgatcgatgatattgggtatcaccagaaagaagacgcacaaatttatgcgctaccaaaagaaatttcggtggcgattatcccgtctgctccacatgctcgccaacgtaatgaacaagcctatcaacaaggtcgtgatattttaatccatatgcccatgcaaccgttaagtcatcagcgcattgaagcgggaggattacatgttggcatgcgccaagaggacgtacaacaacgtgtgcaaactgccaaggcgattgtgtctcatgccattggcatgaataatcacatgggcagtgccgcgactgctgacgcggagttaatgcataaattaatgcaagaactgaaagtgcaagatttgttctttcttgatagccgcaccattggacgcagtgtggcaggcaaaatagccaaagagtacggggtacaaagcctcgatcgccacatttttttggatgacaaagacacttatgcggatgttgaacgtcaatttcaacgtgcagtgcattatgcacaaaagcacggtacggcaatcgcgattggtcatccacgtaaaaatacagtagccgtgttacaagccggattaaaacacttacccgataatgtacagctagtcggcatggggcgtttgtggcgtagtgaaacagagacggcgccgaaaccgcttatttctctctttaatacaatgccagcaccaacatcgaacatgccttatcaggctgtcccaatgttgagaggcataccgcaataa

SEQ ID NO: 64535 - protein, 280 aa, Pasteurella multocida subsp. multocida str. Pm70
MKTIGVKRVKSALLFGGFWISMALAQPAKLAIVIDDIGYHQKEDAQIYALPKEISVAIIPSAPHARQRNEQAYQQGRDILIHMPMQPLSHQRIEAGGLHVGMRQEDVQQRVQTAKAIVSHAIGMNNHMGSAATADAELMHKLMQELKVQDLFFLDSRTIGRSVAGKIAKEYGVQSLDRHIFLDDKDTYADVERQFQRAVHYAQKHGTAIAIGHPRKNTVAVLQAGLKHLPDNVQLVGMGRLWRSETETAPKPLISLFNTMPAPTSNMPYQAVPMLRGIPQ

SEQ ID NO: 64536 - DNA, 774 bp, Pseudomonas aeruginosa PAO1
  CDS (1)..(774): transl_table=11
atgtcggcgttccgcgttgccctgctgggcctgtgcctgctgttcaaccaggcccaggcccgccaggaccccgtcccctaccagcgcccgccgctgctgaccgtggtcatcgatgacctcgggcagaacctggcgcgcgaccgccgggtcctcgacctgccccccggcgtaaccctggcgatcatcccggaaaccccgcatgccgccgaactggcccgcgaggcgcaccagcgcgggcgcacggtgatcctgcacatgccgatggacccagccggcggtccctacgcctggcggccggagctgacccaggaagagcgtgcgcggcggctggacgcggcgctggccaaggtgccgttcgtgcagggcctgaacaaccacgagggcagccgcatgaccgcggtgcgcccggcgatggcctggctcgccgaggaactccagcgtcgcggcctgtacctggtcgacagccgcaccagcgccgccaccgtggccgccagcgaggcgcagcggatcggcctggcgagcgtctcgcgcgatgtgttcctcgacaacgaagccacaccggaagcggtctccgcacaactgcaggccggcgtcgccctggcccgcaagcagggttcggcgttgctcatcggccacccgcacaaggccaccctcgacgtgctggcgcgggagctgccgaagctgcgcgcccagggcatcgagctggtaccgccgcagatgctcatcggcgagcgcggcaaccgcaacgtcaacccacgccaggcgccgcactga

SEQ ID NO: 64537 - protein, 257 aa, Pseudomonas aeruginosa PAO1
MSAFRVALLGLCLLFNQAQARQDPVPYQRPPLLTVVIDDLGQNLARDRRVLDLPPGVTLAIIPETPHAAELAREAHQRGRTVILHMPMDPAGGPYAWRPELTQEERARRLDAALAKVPFVQGLNNHEGSRMTAVRPAMAWLAEELQRRGLYLVDSRTSAATVAASEAQRIGLASVSRDVFLDNEATPEAVSAQLQAGVALARKQGSALLIGHPHKATLDVLARELPKLRAQGIELVPPQMLIGERGNRNVNPRQAPH

SEQ ID NO: 64538 - DNA, 963 bp, Salmonella typhimurium LT2
  CDS (1)..(963): transl_table=11
ttgcctcagtttcgtcgctccattctcacgctggccactttgctggcgtttgcacatcccgttttcgctggcaagctcgccatcgtgattgatgattttggctatcgcccgcacacggaaaaccaggttctggcgctgccgccaaacatctccgtcgctgtactgcccaacgcgccgcacgcgcgcgaaatggcaactaaagcgcacaatagcgggcatgaggtgttaatccatctgccgatggcgccgctaagcaaacagccgctggagaaggatacgctgcgaccagatatgagcagcgatgagatcgagcgcattatccgcgaggcggtaaacaacgtgccgtatgccgtcgggcttaataaccacatgggcagcgcaatgacttccagcctgttcggtatgcaaaaagttatgcaggcgctggaacattacaatctctattttctcgacagcatgacgattggcaatagccaggcgatgcgcgcggcatccggtacgggtgtgaaagtgatcaagcgcaaagtgttcctcgacgatacgcaaaacgaggcggatatccgtcgtcagtttaatcgcgctatcgaactggcccgtcgcaacggttccgctatcgcgattggtcatccacatcccgcaacggttcgcgtgctgcaacagatggtttatcgcctgccggcggatatcaccctggtacgtccaggcagcctgctcaacgaaccgcaggtagatacgtcccgacctggtgtgacgccgcagaaaattgacgcgccgcgcaatcccttccgcggcgtaaagatgtgcaagccgaaaaaaccgctgcaaccggtctacgctacgcgctttttcagcgtcatcggcgagagcattacgcaaagttccgtggttacctggtttcagcaccagtggcaaggctgggggaaaatcgccgcgcctaaaaacgtgagcgctaagacagattga

SEQ ID NO: 64539 - protein, 320 aa, Salmonella typhimurium LT2
MPQFRRSILTLATLLAFAHPVFAGKLAIVIDDFGYRPHTENQVLALPPNISVAVLPNAPHAREMATKAHNSGHEVLIHLPMAPLSKQPLEKDTLRPDMSSDEIERIIREAVNNVPYAVGLNNHMGSAMTSSLFGMQKVMQALEHYNLYFLDSMTIGNSQAMRAASGTGVKVIKRKVFLDDTQNEADIRRQFNRAIELARRNGSAIAIGHPHPATVRVLQQMVYRLPADITLVRPGSLLNEPQVDTSRPGVTPQKIDAPRNPFRGVKMCKPKKPLQPVYATRFFSVIGESITQSSVVTWFQHQWQGWGKIAAPKNVSAKTD

SEQ ID NO: 64540 - DNA, 756 bp, Shewanella oneidensis MR-1
  CDS (1)..(756): transl_table=11
gtgcgtctactttacattttggctctttggactatcagtgttgccccgagcaatgcggctcaaattgccctgatcatcgatgacattggctatcgtcataccgacgaagccgtactttcgttgccgagttctgtcacgctgtcggtattaccgcacacgccactgagcagcaaactggccaaagccgcacacgcaaatggtcacgaaattatgctgcatttacccatgcaggcgctaaatggcaaagccttaggcgttggtggattaaccaataatatgaacgaagcacaaattcgtagcagcgtacttgccgccatggccagtgtacccttcgctaaaggtgccaacaatcatatgggcagcttactcacgcagcttgatgaccccatgctctgggtgatggaaacgctcaaacagaagcagttctattttgtcgacagcatgacgactaaatttaccaaggcgggagatagggcagatcaactcggtgtgccactacttcgacgtcagctatttctcgacaatgatgtcagcactcaagcactagaaagacaatttaacttgatgataagtcaggctcacgcacaaggcagtttagtggccatcgcgcatccttaccccgaaaccattcacttcttaaaagccaacttagcacgcctgaaggcggaagggattgagctagtaccgacatcacgcttgttgcccatcaaactagcccatgaaaaaggggctaatctaactgtaagacagaaatag

SEQ ID NO: 64541 - protein, 251 aa, Shewanella oneidensis MR-1
MRLLYILALWTISVAPSNAAQIALIIDDIGYRHTDEAVLSLPSSVTLSVLPHTPLSSKLAKAAHANGHEIMLHLPMQALNGKALGVGGLTNNMNEAQIRSSVLAAMASVPFAKGANNHMGSLLTQLDDPMLWVMETLKQKQFYFVDSMTTKFTKAGDRADQLGVPLLRRQLFLDNDVSTQALERQFNLMISQAHAQGSLVAIAHPYPETIHFLKANLARLKAEGIELVPTSRLLPIKLAHEKGANLTVRQK

SEQ ID NO: 64542 - DNA, 768 bp, Pseudomonas putida KT2440
  CDS (1)..(768): transl_table=11
atgcgttatctgctgtgtctgttgttttgcctgatggccggaatcgcgcaagcggcaccggccaacaaggcctacatgagcatcatcatcgacgacctgggccagagcccagagcgcgacagccgtaccctggccctgcctgggccggtgaccatggcgatcatgcccgacaccccgcatgccaccgactttgcacgccaggcgcacaaggccggcaagacggtgatcctgcacatgcccatggacccggccaccgggccctatgcctggcacccgggcatcgccatcgaagagctggcgcggcgcctggacgcagcattggtcaaggtgccctacgccgccggcatcaacaaccacatgggtagccgcatgaccgcacagcgtgaacccatggcgtggttgatgggcgagctgcagcggcgccatctgttctttgtcgacagccgcaccagtgccgccacggttgccgcggccgaggctcaagcacacgatgtcgcgcatgtatcacgggatgtatttctggatgacgtgcgcacgccggaagccatcgacgctcagctgcaacagggtattgcactggcccgcaagcaaggctcggccgtgttgatcggccacccctacccgcagacgctagcggtgctggaaagtcagattccacggctcaagcaattggggatcgaactggtcacgctgcaacagatgatcgccacacgtggcaaccaggccatgcctgcacacggtaagcatggccgttacagcaatcgctag

SEQ ID NO: 64543 - protein, 255 aa, Pseudomonas putida KT2440
MRYLLCLLFCLMAGIAQAAPANKAYMSIIIDDLGQSPERDSRTLALPGPVTMAIMPDTPHATDFARQAHKAGKTVILHMPMDPATGPYAWHPGIAIEELARRLDAALVKVPYAAGINNHMGSRMTAQREPMAWLMGELQRRHLFFVDSRTSAATVAAAEAQAHDVAHVSRDVFLDDVRTPEAIDAQLQQGIALARKQGSAVLIGHPYPQTLAVLESQIPRLKQLGIELVTLQQMIATRGNQAMPAHGKHGRYSNR

SEQ ID NO: 64544 - DNA, 783 bp, Pseudomonas syringae pv. tomato str. DC3000
  CDS (1)..(783): transl_table=11
gtgcgctttctcggctcgcttctgttggcactctcgatcactggcgctgcgcatgcagcgccagtcgatcatgctgaaaaaacctcgaaagcctacttcaccctgatcatcgacgatctgggccagaacccggtgcgcgacagccgtactctggcgctcccaggcccggtcacgctggcgatcatgcccgacaccccgcacgccaccgagtttgcccgcgaggcccatcgcgccggtaaaacggtgattctgcacatgccgatggaccccgcgaccggcccttacgcctggcaccccgagctgcctctgccggaactggaaagtcgtctgaatgcagcgctgttgaaagtgccgtatgccgccggtatcaataaccacatgggcagccgcatgaccgccgagccggtagccatgacctggctaatggccgaactgcagcgacgtcatctgtttttcgtcgacagccgcaccagcgcaaaaaccgtggccgccgccgaggcgcagcgcatcggtctggccagcgtttcgcgcgatgtgttcctggacgacgaacgcacggccgaagccatcacccgccaattgcagactgcaatcaaactggcccaaaagcacggttcagcggtggttatcggtcacccctacccggtcacgctggacgtgctggagcgcgagctgcccaagctcaaggctcagggcgtcgaatggatcgacctgcgcagcatgatcagcgaacgcggcaatcaggcgagtgcggcgcatggcaagaatggactttaccgctga

SEQ ID NO: 64545 - protein, 260 aa, Pseudomonas syringae pv. tomato str. DC3000
MRFLGSLLLALSITGAAHAAPVDHAEKTSKAYFTLIIDDLGQNPVRDSRTLALPGPVTLAIMPDTPHATEFAREAHRAGKTVILHMPMDPATGPYAWHPELPLPELESRLNAALLKVPYAAGINNHMGSRMTAEPVAMTWLMAELQRRHLFFVDSRTSAKTVAAAEAQRIGLASVSRDVFLDDERTAEAITRQLQTAIKLAQKHGSAVVIGHPYPVTLDVLERELPKLKAQGVEWIDLRSMISERGNQASAAHGKNGLYR

SEQ ID NO: 64546 - DNA, 963 bp, Salmonella enterica subsp. enterica serovar Typhi Ty2
  CDS (1)..(963): transl_table=11
ttgcctcagtttcgtcgctccattctcacgctggccactttgctggcatttgcacatcccgttttcgctggcaagctcgccatcgtgattgatgattttggctatcgcccgcacacggaaaaccaggttctggcgctgccgccaaacatctccgtcgctgtactgcccaacgcgccgcacgcgcgcgaaatggcgactaaagcgcacaatagcgggcatgaggtgttaatccatctgccgatggcgccgctaagcaaacagccgctggagaaggatacgctgcgaccagatatgagcagcgatgagatcgagcgcattatccgcgaggcggtaaacaacgtgccgtatgccgttgggcttaataaccacatgggcagcgcaatgacttccagcctgttcggtatgcaaaaagttatgcaggcgctggaacattacaatctctattttctcgacagcatgacgattggcaatagccaggcgatgcgcgcggcatccggtacgggtgtgaaagtgatcaagcgcaaagtgttcctcgacgatacgcaaaacgaggcggatatccgtcgtcagtttaatcgcactatcgaactggcccgtcgcaacggttccgctatcgcgattggtcatccgcatcccgcaacggttcgcgtgctgcaacagatggtttatcgcctgccggcagatatcaccctggtacgtccaggcagcctgctcaacgaaccgcaggtagatacgtctcgacctgatttgacgccgcagaaaattgacgcgccgcgcaatccctttcgcggcgtgaagatgtgcaagccgaaaaaaccgctgcaaccagtctacgctacgcgctttttcagcgtcatcggcgagagcattacgcaaagttccgtgattgtctggtttcagcaccagtggcaaggctgggggaaaatcgccgcgcctaaaaacatgagcgctaagacagattga

SEQ ID NO: 64547 - protein, 320 aa, Salmonella enterica subsp. enterica serovar Typhi Ty2
MPQFRRSILTLATLLAFAHPVFAGKLAIVIDDFGYRPHTENQVLALPPNISVAVLPNAPHAREMATKAHNSGHEVLIHLPMAPLSKQPLEKDTLRPDMSSDEIERIIREAVNNVPYAVGLNNHMGSAMTSSLFGMQKVMQALEHYNLYFLDSMTIGNSQAMRAASGTGVKVIKRKVFLDDTQNEADIRRQFNRTIELARRNGSAIAIGHPHPATVRVLQQMVYRLPADITLVRPGSLLNEPQVDTSRPDLTPQKIDAPRNPFRGVKMCKPKKPLQPVYATRFFSVIGESITQSSVIVWFQHQWQGWGKIAAPKNMSAKTD

SEQ ID NO: 64548 - DNA, 771 bp, Bacillus cereus ATCC 14579
  CDS (1)..(771): transl_table=11
atgcgaaaatatacgattgcattattcatcattgttttgtttttaccgtccttcttatttcctattcaagcaaatgctcatacgaataaagttgctattgtcattgatgatttcggaaataatatgaaggggactaatcaaatgttatcacttcccattccactcactgttgctgttatgccttttcttccttccacaaaagaagatgcaatagctgcccataagaaaggccatgaagttattatacatatgccaatggaacctataaaaggtaaaaaagaatggcttgggccgaaagcaattacaactgatttaagcgatgaagaaataaacaaccgacttgaacaagcgattcaagaagtaccgcatgcaattggaatgaacaatcatatggggtcaaaagtaacagcggatgaaagaattgttcgccttatacttgctgcttgtaaaaaacacggtttattttacttagatagtaaaacgaatcctaatagtgtcgtcccaaaaatcggaaaagaattaggagttcctattattgaaaaccaactattttttgatgatgtgtatacagcaggacatatttcaaaacaagcccaattactcatcaaaaaaattcaagaaaaacctattatggtagctatcgggcatgtgggccctccaggtgaaattacatcacgcgttattgaaacttctatccctaaaattcgtgagcatgcagactttattttcttatctgatctagcattatccccgcctcctgtttcaaaataa

SEQ ID NO: 64549 - protein, 256 aa, Bacillus cereus ATCC 14579
MRKYTIALFIIVLFLPSFLFPIQANAHTNKVAIVIDDFGNNMKGTNQMLSLPIPLTVAVMPFLPSTKEDAIAAHKKGHEVIIHMPMEPIKGKKEWLGPKAITTDLSDEEINNRLEQAIQEVPHAIGMNNHMGSKVTADERIVRLILAACKKHGLFYLDSKTNPNSVVPKIGKELGVPIIENQLFFDDVYTAGHISKQAQLLIKKIQEKPIMVAIGHVGPPGEITSRVIETSIPKIREHADFIFLSDLALSPPPVSK

SEQ ID NO: 64550 - DNA, 816 bp, Photorhabdus luminescens subsp. laumondii TTO1
  CDS (1)..(816): transl_table=11
ttgggagataatcaggtgagacaacgcaaactcgcaaaactcattggtactaccgccctgttacttttgagcctacaaaccggtgctgcccgtttggctattgttatcgatgattttggctaccgtcctcataatgaaaacaaaatattgcagatgcctgttgcaatctctatcgccattctgccggattcaccgcatggcagggagatggctgaaaaagcctataaacaagggcgggagatcttaatccacctgccaatggcacctttaagtaagcaactgctagaaccggatactctccagccaaccatgagcagtgaagatattgaccgcatcatccagcgtgcaatacaaaaagttccttatgctgtaggaatcaataaccatatgggcagcgctatgacttcgagcttgccgggaatgcagaaagtgatgcgttcactgtctggttataacctctattttctcgacagcgtgacgattggcaatactcaagcaacaaaggcagcacaaggcacacctgttcgcgttatccgccgtaatgttttcctagatgatgtgcaatcagaagcggaaactcgtcatcagttaaaccgtgcgatttccattgcccgtaagaatggttccgctattgctatcggtcatcctcattcaacaaccattcgtgcattacaacagatgctgccaacgcttcccgctgatattgagttagtcagcccaagtaggttgttaagtggcaaacctgttggtgataacccacataaatggggcaagctgtgtgaactcaacaaccaccgactaaagtcggtgggttag

SEQ ID NO: 64551 - protein, 271 aa, Photorhabdus luminescens subsp. laumondii TTO1
MGDNQVRQRKLAKLIGTTALLLLSLQTGAARLAIVIDDFGYRPHNENKILQMPVAISIAILPDSPHGREMAEKAYKQGREILIHLPMAPLSKQLLEPDTLQPTMSSEDIDRIIQRAIQKVPYAVGINNHMGSAMTSSLPGMQKVMRSLSGYNLYFLDSVTIGNTQATKAAQGTPVRVIRRNVFLDDVQSEAETRHQLNRAISIARKNGSAIAIGHPHSTTIRALQQMLPTLPADIELVSPSRLLSGKPVGDNPHKWGKLCELNNHRLKSVG

SEQ ID NO: 64552 - DNA, 873 bp, Geobacter sulfurreducens PCA
  CDS (1)..(873): transl_table=11
atggctctggtcgtcatagcggtaatcgccgctgttttttttcttgatcgcgcgtaccgcaaacaaccggtcgtgcagcagaccccacctcccgtggtggagcgtcacaagcttcctccccgagagccggaacaaccagttgcccacgaagactacacgggggttatccaccacccggccgaaccacagcgcgcgcagcgtccaacggggccgggaacccttgccgtcatcatcgacgacatggggaaggggcttcctgaggcgcgtgccctgatggatatcggtattccgctcacctttgccatcattccgggactgccgaaggtcagacgggttgccgaggaggcccggcagcggggaattgaggtaatggtacatctgcccatggagcccaaaggatatcccgaaaggcggcttgaggcgaacggactcctcctctcacagggcgacgatgagattgccggccgggtaaacggttacctgaacgagattccccaggcagtcggggcgaacaatcacatgggctccgggtttaccgagaaccgtcagaaaatggctgtggtgatgggggtactgaaggaaagggggctgttctttgtagacagtaagacatcccctgtctcggtgggtgatgccgtggcgcgggaaatgggggtgcgcacggcggtgcggaacgtcttcctcgacaatatccaggaatcgggctacatcacgaaccaactccgtcaggccgcttcgatcgcccgaaagcggggcaatgccatagcgatttgccacccgcatcctgccaccatccagacccttgccgtcgagttaccgcgtctgcgggacgaggggatcacctttgtgacggtgtcgaggctggtcaggtag

SEQ ID NO: 64553 - protein, 290 aa, Geobacter sulfurreducens PCA
MALVVIAVIAAVFFLDRAYRKQPVVQQTPPPVVERHKLPPREPEQPVAHEDYTGVIHHPAEPQRAQRPTGPGTLAVIIDDMGKGLPEARALMDIGIPLTFAIIPGLPKVRRVAEEARQRGIEVMVHLPMEPKGYPERRLEANGLLLSQGDDEIAGRVNGYLNEIPQAVGANNHMGSGFTENRQKMAVVMGVLKERGLFFVDSKTSPVSVGDAVAREMGVRTAVRNVFLDNIQESGYITNQLRQAASIARKRGNAIAICHPHPATIQTLAVELPRLRDEGITFVTVSRLVR

SEQ ID NO: 64554 - DNA, 1173 bp, Treponema denticola ATCC 35405
  CDS (1)..(1173): transl_table=11
atggcaaaaaagagcaccaaaacaggaaaaacaactaaaccggtaaaaaaaaccggaaaaaaaagaagaaaaaagtcaaaaattaactataccggagctatagccggttttttggcagtctgtataataatgctcgcagtatttttgtttataattccttcggtaaaaaataaagatgaaacaacgaataaaacgcaaattgccaaggaacaagaaaaaatagaagaagaaaagcctaaaactaccgaaaagccgcctatagaaagcaaggctaaagataagcgtaccgaaaaaactaaggaagctgaaacgcaggcctcaaaaaatctgcctaaagaagctgcaaaaaagactttacatgataagcctaaagaaagcgaaaaggcgggcagagaaaacaaggcaaaaaagcctgaaaatcccataatcacgggtaagcctaaacctcaagaacaagagcctgacgtttcggcctaccctattcaggacctgcctgagcttccctcaaagggaaaacttatttttgtgtttgacgatgcaggacacaaccttgaacagttacagtattttttggatttaccctttccctgtaccatagccgttttgcctaagctgcctaactcaagagaaacggcaagaagaataagggctgccggaaaggaactcatccttcatcagcctatgcaggcattaaaccccaatattaatccgggagatggagccgttaaacccggcatggaccgtgaagagataaaaaaaatcgtagcttcaaatgtggaagaaattgggcccatagccggaatgaataaccacgagggctctcttattacatcggatgaaaaagctatggaggcagtgcttgaattgtgcagggaaaaaaacatatactttttggattcccgcaccagctcaaaaagcgttgttcctcaagttgcaaaaaaactgaatatgaatatttgggaaagagctgtctttcttgataataaaaaagataaggcctatatgaaaaaacaaattatagaaggcttggaaattgcctcacaaagaggtgaagcgattatgataggccatgtgtttaccgtagatcttgcaatccttttaaaagaaatgtactccgatttaacacaagaaggatatacattttctacaatttcaaaatcaaaagggaaataa

SEQ ID NO: 64555 - protein, 390 aa, Treponema denticola ATCC 35405
MAKKSTKTGKTTKPVKKTGKKRRKKSKINYTGAIAGFLAVCIIMLAVFLFIIPSVKNKDETTNKTQIAKEQEKIEEEKPKTTEKPPIESKAKDKRTEKTKEAETQASKNLPKEAAKKTLHDKPKESEKAGRENKAKKPENPIITGKPKPQEQEPDVSAYPIQDLPELPSKGKLIFVFDDAGHNLEQLQYFLDLPFPCTIAVLPKLPNSRETARRIRAAGKELILHQPMQALNPNINPGDGAVKPGMDREEIKKIVASNVEEIGPIAGMNNHEGSLITSDEKAMEAVLELCREKNIYFLDSRTSSKSVVPQVAKKLNMNIWERAVFLDNKKDKAYMKKQIIEGLEIASQRGEAIMIGHVFTVDLAILLKEMYSDLTQEGYTFSTISKSKGK

SEQ ID NO: 64556 - DNA, 771 bp, Bacillus cereus ATCC 10987
  CDS (1)..(771): transl_table=11
atgcgcaaatatacgattgcattgcttattttgactatgtttttaccatctttcttgtttcctgttgaggccaaggctcatacaaataaagtagctattgtcattgatgacttcggcaataatatgaaaggaactgataaaatgttatcacttcctattccactaactgttgctgttatgccttttcttccttccacaaaggaagatgcgatagcggctcataagaaaggacacgaagttattatacatatgccaatggaaccgattaaaggtaaaaaagaatggcttggaccaaaagcaattacaactgatttaagcgacgaagaaataaataatcgactcgaacaagcgattcaagaagtgccacatgcaattgggatgaataatcatatgggatcaaaagtgactgcagacgaaagaattgtacgacttatacttgcagcttgtaaaaaacacggtttattttatttagatagcaaaacaaatcctaagagtgtcgtcccaaaaatcgggaaagaattaggagtgccaattattgaaaatcaattattttttgatgacgtgtacacagcggcacatatttcaaaacaagcccaattactcattaaaaaacttcaagaaaaaccgattatggtagctatcggacatgttgggcctccaggtgaaattacatcacgtgttatagaaacctctattcctaaaattcgtgaacatgcagattttatttttttatccgatttagcattatctccgcctcctgtttcaaaataa

SEQ ID NO: 64557 - protein, 256 aa, Bacillus cereus ATCC 10987
MRKYTIALLILTMFLPSFLFPVEAKAHTNKVAIVIDDFGNNMKGTDKMLSLPIPLTVAVMPFLPSTKEDAIAAHKKGHEVIIHMPMEPIKGKKEWLGPKAITTDLSDEEINNRLEQAIQEVPHAIGMNNHMGSKVTADERIVRLILAACKKHGLFYLDSKTNPKSVVPKIGKELGVPIIENQLFFDDVYTAAHISKQAQLLIKKLQEKPIMVAIGHVGPPGEITSRVIETSIPKIREHADFIFLSDLALSPPPVSK

SEQ ID NO: 64558 - DNA, 1551 bp, Desulfovibrio vulgaris subsp. vulgaris str. Hildenborough
  CDS (1)..(1551): transl_table=11
atggccgccaaacgcccgcagaagaaaagcagcacagccaagggagacggcacgtcaggccgttcacgcggcagtggcaccaagtctggcacccgcaagggaagcaagacccccgcagctacagagaagaccctgacgcgacttgtcatcgtcatcatgggggtgctgtgcctcgtcttcacggtcatggccgggtactggctgtggcagggcggggctgatgccacacggcccgtacccccctcgaagaccgaacgtcagaagacccccgcggcaacctctcccgcgaggccgacgccagcgcagccttccgccacagccgggaaggtgcagtcgggtgaagcctcaaggacgaccggtaagggcgtacacgccgacgcgcagtctgatgcctcgacaccgggtggggacgcggacaaggccgcgccgtccgtgccccgaaacgccacttccgacgccgtggacggtgagggcgcggtgcgtgccccggtcaacgccggggccttgccctacgaggaatccctcgacgccccgctggaagaaggggtgaagcaggtcgactacgcgctggtgcagacgctggtgcgtctcggcatcgcgcgggagaggctgcgcatcgcgagcgtcgagacacgcaacgaacagggcgaaagctaccatttccagcagatgacactgggtgtcggcgacgcccccgaccgtttcgtcaaggcgttcgtcgaagctctttccgtatgggccgagcgtgcgcagatgcgcaagaaggccgatgacctcattgaggtctacgtgggcggggtgctcacgcatgagatcaccctttcgttgtatgagtcggtggaagagccccgtcccggaaccccggtggaaggcgcgttgcttgccatcgtcatcgatgacataggcgagagcatgggggcggtgcgtgacctgctgaagctcgactaccccgtcaccttcgcggtgtggcccagaagctcgcatgcgcgtgaggctgcggaggcggcacaccgcgccggacgtgaggtgatgatccaccagcccatggaaccgctcaagtatccgtcggtgaagccggggccgggtgccatctatgtacggatgggcagtgacgagatagaggcgacgctgcgggacaacctcgcccgggtaccccacgccgtgggcctcaacaaccatatggggtcgcgtttcacgcaggacacccgtggcgtacgcgccgtatgtgacgcgctggagggcaaggggctcttcgtgctcgacagcgtgacgcattccgggtcggtcttctatcgtgaggcgcgcaaggcagggttgcccgccggaaagcgcaacgtgttccttgatgtcatccacgacaagcgcaacatcatgttccagctcgacaaggcggcgcgcgtagcccatgaacagggcgtggctgtcgccatcgggcatcctctcgccgagacagtggcggcactcaaggagtggcagcgtacgcgcgacaagtcggtgcgtatcgtgaccatgcgtcagctgcttgatgcggagacgactgcgcgccgatga

SEQ ID NO: 64559 - protein, 516 aa, Desulfovibrio vulgaris subsp. vulgaris str. Hildenborough
MAAKRPQKKSSTAKGDGTSGRSRGSGTKSGTRKGSKTPAATEKTLTRLVIVIMGVLCLVFTVMAGYWLWQGGADATRPVPPSKTERQKTPAATSPARPTPAQPSATAGKVQSGEASRTTGKGVHADAQSDASTPGGDADKAAPSVPRNATSDAVDGEGAVRAPVNAGALPYEESLDAPLEEGVKQVDYALVQTLVRLGIARERLRIASVETRNEQGESYHFQQMTLGVGDAPDRFVKAFVEALSVWAERAQMRKKADDLIEVYVGGVLTHEITLSLYESVEEPRPGTPVEGALLAIVIDDIGESMGAVRDLLKLDYPVTFAVWPRSSHAREAAEAAHRAGREVMIHQPMEPLKYPSVKPGPGAIYVRMGSDEIEATLRDNLARVPHAVGLNNHMGSRFTQDTRGVRAVCDALEGKGLFVLDSVTHSGSVFYREARKAGLPAGKRNVFLDVIHDKRNIMFQLDKAARVAHEQGVAVAIGHPLAETVAALKEWQRTRDKSVRIVTMRQLLDAETTARR

SEQ ID NO: 64560 - DNA, 780 bp, Bacillus thuringiensis serovar konkukian str. 97-27
  CDS (1)..(780): transl_table=11
atgcacaaatatacgattgcattgcttattttgactatgtttttaccatctttcttgtttcctgttcaagcaaaggcccatacaaacaaagtagctattgttattgatgacttcggtaataatatgaaggggactgataaaatgttatcacttcctattcccctaactgttgctgttatgccttttcttccttccacaaaggaagatgcgatagcggctcataagaaaggacacgaagttattatacatatgccaatggaaccggttaaaggtaaaaaagaatggctcggaccaaaagcaattacaactgatttaagcgacgaagaaataaacaaccgactcgaacaagcaattcaagaagtaccacatgcaattgggatgaataatcatatgggatcaaaagtgactgcagacgaaagaattgtacgacttatacttgcagcttgtaaaaaacacggtttattttatttagatagcaaaacaaaccctaaaagtgtcgttccaaaaatcgggaaagaattaggagtaccaattattgaaaatcaattattttttgatgatgtgtatactgcggcacatatttcaaaacaagcccaattactcataaaaaaacttcaagaaaaaccgattatggtggctattggacatgttggccctccaggtgaaattacatcacgtgttatagaaacttctattcctaaaattcgtgaacacgcagattttatttttttatctgatttagcattatctccgcctcctgtttcgaaatcagatttataa

SEQ ID NO: 64561 - protein, 259 aa, Bacillus thuringiensis serovar konkukian str. 97-27
MHKYTIALLILTMFLPSFLFPVQAKAHTNKVAIVIDDFGNNMKGTDKMLSLPIPLTVAVMPFLPSTKEDAIAAHKKGHEVIIHMPMEPVKGKKEWLGPKAITTDLSDEEINNRLEQAIQEVPHAIGMNNHMGSKVTADERIVRLILAACKKHGLFYLDSKTNPKSVVPKIGKELGVPIIENQLFFDDVYTAAHISKQAQLLIKKLQEKPIMVAIGHVGPPGEITSRVIETSIPKIREHADFIFLSDLALSPPPVSKSDL

SEQ ID NO: 64562 - DNA, 948 bp, Erwinia carotovora subsp. atroseptica SCRI1043
  CDS (1)..(948): transl_table=11
ttgtcttatttaaccaaaacaccgttattggcattgagtctgttcgcgctttctcctttggcactggccggaaaattgtctatcgtgatcgatgatttcggctatcgtccacataatgagaaccagattctggcgatgcctacggcaatttccgtcgcagtattacctaacgcaccatacgcccgtgaaatggcgactaaagcccaccagcaagggcgagaagtgctgatccacctgccgatggcaccgatgagcaagcagccgctggagcgcgacacgttacgcccagatatgagcagcgatgaaattcagctcattattcgccaatcggtcagtaacgtgccttatgccgtagggttgaataaccatatgggcagcgcgatgaccgccagcctgcctggcatgcaaaaagtcatgcaggcgctgagcgcctaccagctctatttcctcgatagtatgaccattggcagcagccaatcgagtcaggccgcagcaggaacgggcgtcaaagttatcaaacgcaaagtctttctggacgattcgcagaacgaagccgagattcgtaaacagtttacccgcgcggtgcaaattgcccgccgcagcggttccgctatcgctattgggcacccacatccttccactatccgcgtcttgcagcagatgctgcctacactggatgccgatatcgtcttagtgcgccccagccagttgctgaatgagcctacgcagcattatgagcctcagccacagaaaccatccaaggcgcgtaatccgttccgtggcataccgcaatgccaggtcaagcagccaccggaaccgataaaagacgatgtgttcttcaggctggtgagcagcagtattcgggacagcgcacccgtgctgtttatcaagcaccgctggcagacctggattgcccctgccgacaccgaaacgcacaagcagccgtaa

SEQ ID NO: 64563 - protein, 315 aa, Erwinia carotovora subsp. atroseptica SCRI1043
MSYLTKTPLLALSLFALSPLALAGKLSIVIDDFGYRPHNENQILAMPTAISVAVLPNAPYAREMATKAHQQGREVLIHLPMAPMSKQPLERDTLRPDMSSDEIQLIIRQSVSNVPYAVGLNNHMGSAMTASLPGMQKVMQALSAYQLYFLDSMTIGSSQSSQAAAGTGVKVIKRKVFLDDSQNEAEIRKQFTRAVQIARRSGSAIAIGHPHPSTIRVLQQMLPTLDADIVLVRPSQLLNEPTQHYEPQPQKPSKARNPFRGIPQCQVKQPPEPIKDDVFFRLVSSSIRDSAPVLFIKHRWQTWIAPADTETHKQP

SEQ ID NO: 64564 - DNA, 1011 bp, Yersinia pseudotuberculosis IP 32953
  CDS (1)..(1011): transl_table=11
ttgcgctacttcaacacacgccaatttatcatcgtaagcacgctattcatcgccagcacagcacaggccggcaaactctctattgttattgacgattttggttatcgcccccaaaacgaaaataagattttacagatgcccctgcccatttcagtggccattctgcctaatgctccttacgccagagagatggcaaccaaagcccataatcaggggcgtgaaatcctgattcacttgccgatggccccacagagtaaacagccactggagcgtgataccttgcagccttcaatgagcagcgaggaaatccagcgcatcatccgccaggccgcgaataacgtcccttatgcgaaaggcatgaataaccatatgggcagtgcgatgaccgccagtttgccaggtatgcagaaagtgatgcaggcactggggagctaccagctctattttctcgacagtgtgactattggtaatagccaggcgagcaaagccgccgaaggcactggtgtcaaagtgatcaagcggaaaatctttttagatgactcacaaaatgaagcagctatccgtcaacaatttaaccgggcagtagcactggcacgccgcaatggctcagcgattgctatcgggcaccctcaccctgcgaccattaaagtattgcaacaaatgttgcctcagttgcctgccgacatcgtcttagtcagacccagtgcgctgctaaatgaaccggtacaaagtctctctccggacaaaacaaaaccacgtgaaccggtgaaaggccaacgtctgcccgctatcaagcaatgtaaagcgaaagccagctatgtgcctgagaaaatctacgctgataagctgtttatcttattgggtgagagcttgatgcaaaacccggcggtcatatttattcagcaacattggcaacaatattttacgccagcgccgccggcaacacctattgatgaacagaaagcgattgaaaatacagagaaattgccacccaagaaggcggcacaataa

SEQ ID NO: 64565 - protein, 336 aa, Yersinia pseudotuberculosis IP 32953
MRYFNTRQFIIVSTLFIASTAQAGKLSIVIDDFGYRPQNENKILQMPLPISVAILPNAPYAREMATKAHNQGREILIHLPMAPQSKQPLERDTLQPSMSSEEIQRIIRQAANNVPYAKGMNNHMGSAMTASLPGMQKVMQALGSYQLYFLDSVTIGNSQASKAAEGTGVKVIKRKIFLDDSQNEAAIRQQFNRAVALARRNGSAIAIGHPHPATIKVLQQMLPQLPADIVLVRPSALLNEPVQSLSPDKTKPREPVKGQRLPAIKQCKAKASYVPEKIYADKLFILLGESLMQNPAVIFIQQHWQQYFTPAPPATPIDEQKAIENTEKLPPKKAAQ

SEQ ID NO: 64566 - DNA, 867 bp, Borrelia garinii PBi
  CDS (1)..(867): transl_table=11
atgtttatattttatattaaaaaaaacaaatttattattgtaatttctattgctattgcaataactcaagcatttgcaagttttttatattttaacgacaatttaaaggttgcaaatgcactacttaaggataggtttcaaaaaacacaaaaagacagcttaataataaataacaaagaaaataaaaaatccagaataaagcctaagttttacttaatcatcgatgacgtaggttatgatgaatttatgttagaacaatttataaaacttaattttgaaataaattatgccattattccatttctaccaaaatcaatgaatttatacaaaaagctaaaaaataataacaaaacaataataatacatttcccaatgcaatcaaaacatagaaattcaatcgaaaaatttcatataaacataaaagataaaaaggaagaaatatacaaaaaaatcgaaaaaacatttaaaatgtaccccgatgcaaaaataatgaataatcacatgggtagcttaatcacttcaaataaagatttgatgaaaatcattttgataaagcttaaagagattgatagatattttttcgacagcgtaactattgcaggaagcgtaccagaaataataggcaaagaaattggagttagagtagaaaaaagagatgtatttcttgataacaaagatacagaagaatccgtactcaaggaacttgaaaaagcaaaaaatattgccagaaaacatggaatagtaaaagtaatcgggcatatttggtctaaaagcacgctaaaagtcctcgaaaaagaaggacctaatttaaaccaggaatttgaatttgacaacttattaaatctgtacgaggaaacaatcagatga

SEQ ID NO: 64567 - protein, 288 aa, Borrelia garinii PBi
MFIFYIKKNKFIIVISIAIAITQAFASFLYFNDNLKVANALLKDRFQKTQKDSLIINNKENKKSRIKPKFYLIIDDVGYDEFMLEQFIKLNFEINYAIIPFLPKSMNLYKKLKNNNKTIIIHFPMQSKHRNSIEKFHINIKDKKEEIYKKIEKTFKMYPDAKIMNNHMGSLITSNKDLMKIILIKLKEIDRYFFDSVTIAGSVPEIIGKEIGVRVEKRDVFLDNKDTEESVLKELEKAKNIARKHGIVKVIGHIWSKSTLKVLEKEGPNLNQEFEFDNLLNLYEETIR

SEQ ID NO: 64568 - DNA, 759 bp, Symbiobacterium thermophilum IAM 14863
  CDS (1)..(759): transl_table=11
gtggtcgccgcgttcgcgccgcaggacggatacggctccgtcttctgcaacgcgcgcccggttcccgggcagcctcccctgctggcgatcgtcatcgacgacctgacgaccggggcgccggggctggaggagatgctgcggctgccgtacccgctcaccttcgcgatcctgcctgaccggcccgacgccggggcgctggcccggcgcatcgccgccctcggacacgaggtcatcctgcacttgcccatggacgcgggagaggtggatccccagtggtacgtgggccggcccatctcctcccgacagtcggacgaggagatccagcagctggtctcggagtggctggccgccgtgccggaggcccggggcatgaacaaccacatgggcacggtggccacgcaggacgagcgcgtggtccgggcggtgctggaggtggcccgccggcatgggaagtacatcctcgacagcatgaccaccgagaacacggttgtgccgcggacggcggtggagatgggcgtcccctgcatgcagcgttcgctgttcctcgaccacgagaacggcgaggaggtggtggccgcccagctctacaagctggccgagtgggcggagacccacggcgccgccatcgggatcggccatgtgggcgtcggccgggagggcaccgctgccgcgctggcggaggtgctgcccgaactggaggcgcgggggatccggctggtcaccctttcgcaactgctctcctatcagcaggaaaattag

SEQ ID NO: 64569 - protein, 252 aa, Symbiobacterium thermophilum IAM 14863
MVAAFAPQDGYGSVFCNARPVPGQPPLLAIVIDDLTTGAPGLEEMLRLPYPLTFAILPDRPDAGALARRIAALGHEVILHLPMDAGEVDPQWYVGRPISSRQSDEEIQQLVSEWLAAVPEARGMNNHMGTVATQDERVVRAVLEVARRHGKYILDSMTTENTVVPRTAVEMGVPCMQRSLFLDHENGEEVVAAQLYKLAEWAETHGAAIGIGHVGVGREGTAAALAEVLPELEARGIRLVTLSQLLSYQQEN

SEQ ID NO: 64570 - DNA, 771 bp, Bacillus cereus E33L
  CDS (1)..(771): transl_table=11
atgcgcaaatatacgattgcattgcttattttgactatgttcttaccatctttcttgtttcctgttcaagcaaaggcccatacaaacaaagtagctattgttattgatgacttcggcaataatatgaaggggactgataaaatgttatcacttcctattcccctaactgttgctgttatgccttttcttccttccacaaaggaagatgcgatagcggctcataaaaaaggacacgaagttattatacatatgccaatggaaccgattaaaggtaaaaaagaatggcttggaccaaaagcaattacaactgatttaagcgacgaagaaataaacaaccgactcgaacaagcgattcaagaagtaccacatgcaattgggatgaataatcatatgggatcaaaagtgactgcggacgaaagaattgtacgacttatacttgcagcttgtaaaaaacacggtttattttatttagatagcaaaacaaatcctaagagtgtcgtcccaaaaatcggaaaagaattaggagtgccaattattgaaaatcaattattttttgatgacgtgtacacagcggcacatatttcaaaacaagcccaattactcattaaaaaacttcaagaaaaaccgattatggtagctatcggacatgttgggcctccaggtgaaattacatcacgtgttatagaaacttctattcctaaaattcgtgaacatgcagattttatttttttatccgatttagcattatctccgcctcctgtttcgaaataa

SEQ ID NO: 64571 - protein, 256 aa, Bacillus cereus E33L
MRKYTIALLILTMFLPSFLFPVQAKAHTNKVAIVIDDFGNNMKGTDKMLSLPIPLTVAVMPFLPSTKEDAIAAHKKGHEVIIHMPMEPIKGKKEWLGPKAITTDLSDEEINNRLEQAIQEVPHAIGMNNHMGSKVTADERIVRLILAACKKHGLFYLDSKTNPKSVVPKIGKELGVPIIENQLFFDDVYTAAHISKQAQLLIKKLQEKPIMVAIGHVGPPGEITSRVIETSIPKIREHADFIFLSDLALSPPPVSK

SEQ ID NO: 64572 - DNA, 846 bp, Mannheimia succiniciproducens MBEL55E
  CDS (1)..(846): transl_table=11
atgattcggcatcaattaaaaagtgcggtaaaaaataccgcacttttatgtttgttattcctgatctcgctaccggcattttcggcgaaattagccattgtgattgatgatttaggttatcatccgagggaagatgcggcaattttggcgatgcctaaagaaatcagtgtagcgattattccttccgcaccttatgcccgtcagcgtaatcagctggcttatgaacaaggacgggatattcttattcacatgccgatgcaacctatcagccaaatgaacattgaggccggcggtttatcgatcggtatggatgcgcaacaagtggcgcataacgtgcaacaggcgaaaaatatcgtttctcatgcaatcggtatgaataaccatatgggcagcgctgcaacggcggataggccgttgatgaccgaattaatggcggaattgcgcaaacagcatttgttctttttggacagtcgtactatcgggcgttcggtggcggaaaaaattgccaaagaaagcggtgttcgcgccttgcaacggcatatttttctggatgacagcgatgtctatggggacgtacaacggcagtttcagcaggcaattcattatgcccgcaagcatggcacggcgattgttatcgggcatccgcgaaaaaatacggtcgccgtgttgaggcaaggtcttgctaatttaccgccggatattcaattggtgagcatgggcagcttatggcgtgacgaaaaagtcgtgccgccggcgccgtttattttaattttcagtgataagcccgccccgacatccgtcgcaccttttgagccggttcctttgttgcgcggtgtgccgagatag

SEQ ID NO: 64573 - protein, 281 aa, Mannheimia succiniciproducens MBEL55E
MIRHQLKSAVKNTALLCLLFLISLPAFSAKLAIVIDDLGYHPREDAAILAMPKEISVAIIPSAPYARQRNQLAYEQGRDILIHMPMQPISQMNIEAGGLSIGMDAQQVAHNVQQAKNIVSHAIGMNNHMGSAATADRPLMTELMAELRKQHLFFLDSRTIGRSVAEKIAKESGVRALQRHIFLDDSDVYGDVQRQFQQAIHYARKHGTAIVIGHPRKNTVAVLRQGLANLPPDIQLVSMGSLWRDEKVVPPAPFILIFSDKPAPTSVAPFEPVPLLRGVPR

SEQ ID NO: 64574 - DNA, 816 bp, Photobacterium profundum SS9
  CDS (1)..(816): transl_table=11
ttgggtatacttatcgggctagattcaaacagtcagcccgacatgatttcgatattcacttcaaggaagaaggctatcaggcaatctactatgcgaaggaacgtagttaaaacagcatcactgattctacttctgttaacatcaaccaatattcacgccgctcaattagcgattgttatcgatgatttaggctatcaggcaatgcctgaattactatcaaaccttcccccagaagtcaccatatccattttaccgaatacgccgtttgatttagctgtcgcagcacaagctaaaaaacaacaccgagagacattgcttcatatgcccatggagccggaacatttagccccactcgaagttaacactttaacctcggcaatgtcgcaacaaaccttacagcacaccttgcgccaagcactgactcgagtcccgaatgcaatcgcaatcaataatcatatggggagtgccctcagccaagatacacaagcgatgggctggataatggcagaactcaaacaacataatctttattatctcgacagccgtactacggctaaatccatcgcacaacaacaagccactagtcatcacgtattgtcattgcgccgccatgtttttctcgaccattatcaaaccaaagaatttgtcacaaagcagttaatgagtgcaataaaacgtgcaaagcaatacggctatgcgattgctattgggcatcctcatccagttaccctatccacattgaatgaattactgccaaatttaacggaagaagatattaccttggtgcggctgtcgacgctttttgcggagatttga

SEQ ID NO: 64575 - protein, 271 aa, Photobacterium profundum SS9
MGILIGLDSNSQPDMISIFTSRKKAIRQSTMRRNVVKTASLILLLLTSTNIHAAQLAIVIDDLGYQAMPELLSNLPPEVTISILPNTPFDLAVAAQAKKQHRETLLHMPMEPEHLAPLEVNTLTSAMSQQTLQHTLRQALTRVPNAIAINNHMGSALSQDTQAMGWIMAELKQHNLYYLDSRTTAKSIAQQQATSHHVLSLRRHVFLDHYQTKEFVTKQLMSAIKRAKQYGYAIAIGHPHPVTLSTLNELLPNLTEEDITLVRLSTLFAEI

SEQ ID NO: 64576 - DNA, 963 bp, Salmonella enterica subsp. enterica serovar Paratyphi A str. ATCC
  CDS (1)..(963): transl_table=11
ttgcctcagtttcgtcgctccattctcacgctggccactttgctggcgtttgcacatcccgttttcgctggcaagctcgccatcgtgattgatgattttggctatcgcccgcacacggaaaaccaggttctggcgctgccgccaaacatctccgtcgccgtactgcccaacgcgccgcatgcgcgcgaaatggcaactaaagcgcacaatagcgggcatgaggtgttaatccatctgccgatggcgccgctaagcaaacagcctctggagaaggatacgctgcgaccagatatgagcagcgatgagatcgagcgcattatccgcgaggcggtaaacaacgtgccgtatgccgttgggcttaataaccacatgggcagcgcaatgacttccagcctgttcggtatgcaaaaagttatgcaggcgctggaacattacaatctctattttctcgacagcatgacgattggcaatagccaggcgatgcgcgcggcatccggtacgggtgtgaaagtgatcaagcgcaaagtgttcctcgacgatacgcaaaacgaggcggatatccgtcgtcagtttaatcgcgctatcgaactggcccgtcgcaacggttccgctatcgcgattggtcatccacatcccgcaacggttcgcgtgctgcaacagatggtttatcgcctgccggcggatatcaccctggtacgcccaggcagcctgctcaacgaaccgcaggtagatacgtcccgacctggtgtgacgccgcagaaaattgacgcgccgcgcaatcccttccgcggcgtgaagatgtgcaagccgaaaaaaccgctgcaaccggtctacgctacgcgctttttcagcgtcatcggcgagagcattacgcaaagttccgtgattgtctggtttcagcaccagtggcaaggctgggggaaaatcgccgcgcctaaaaacgtgagcgctaagacaaattga

SEQ ID NO: 64577 - protein, 320 aa, Salmonella enterica subsp. enterica serovar Paratyphi A str. ATCC
MPQFRRSILTLATLLAFAHPVFAGKLAIVIDDFGYRPHTENQVLALPPNISVAVLPNAPHAREMATKAHNSGHEVLIHLPMAPLSKQPLEKDTLRPDMSSDEIERIIREAVNNVPYAVGLNNHMGSAMTSSLFGMQKVMQALEHYNLYFLDSMTIGNSQAMRAASGTGVKVIKRKVFLDDTQNEADIRRQFNRAIELARRNGSAIAIGHPHPATVRVLQQMVYRLPADITLVRPGSLLNEPQVDTSRPGVTPQKIDAPRNPFRGVKMCKPKKPLQPVYATRFFSVIGESITQSSVIVWFQHQWQGWGKIAAPKNVSAKTN

SEQ ID NO: 64578 - DNA, 756 bp, Idiomarina loihiensis L2TR
  CDS (1)..(756): transl_table=11
atgttgaagcttgtactttctttgggtttactggtgtgcctgatgacgccagcttatgcctctaagatagccattgttatcgatgatataggcaataataaaaacgatttaaaagcagctctgctacctggtaatatcagtttcgcagtgctgccctataccccttatgcccgcgccttcgccttacgcggccatcatcagaaaaaacagatattactgcatatgccaatggaagccgttgaaaataaccgcccgggtcccggtgtggttacggcagatatgaacaatgcacagatcaaactgcaactggttgatgccctggactcaataccttacgttactggtgtcaataatcatatgggcagcaagttaactcagctacacatgccaatgcaggcagtgatggaaacattagcctcccgcaaactcttttttattgatagccggacatctgagttcagcgttgcagaacaaatggcgggagaatttggcgtacggacatcgcacagacatgtgtttcttgataaccaggttgatgagccctatttacagcagcaatttgagcaactgctgagtatagccaaacgtcagggacaagccataggtattggacatccttacccggaaaccctgagctttttgcaaaagcaactaccgcaattacaagaacagggtattgagttggtattcgtatctgagttaaccactgtggctaaccgcaatgggtatcttcttccagtgacgtcagcaaaataa

SEQ ID NO: 64579 - protein, 251 aa, Idiomarina loihiensis L2TR
MLKLVLSLGLLVCLMTPAYASKIAIVIDDIGNNKNDLKAALLPGNISFAVLPYTPYARAFALRGHHQKKQILLHMPMEAVENNRPGPGVVTADMNNAQIKLQLVDALDSIPYVTGVNNHMGSKLTQLHMPMQAVMETLASRKLFFIDSRTSEFSVAEQMAGEFGVRTSHRHVFLDNQVDEPYLQQQFEQLLSIAKRQGQAIGIGHPYPETLSFLQKQLPQLQEQGIELVFVSELTTVANRNGYLLPVTSAK

SEQ ID NO: 64580 - DNA, 963 bp, Salmonella enterica subsp. enterica serovar Choleraesuis str
  CDS (1)..(963): transl_table=11
ttgcctcagtttcgtcgctccattctcacgctggccactttgctggcgtttgcacatcccgttttcgctggcaagctcgccatcgtgattgatgattttggctatcgcccgcatacggaaaaccaggttctggcgctgccgccaaacatctccgtcgccgtactgcccaacgcgccgcacgcgcgcgaaatggcaactaaagcgcacaatagcgggcatgaggtgttaatccatctgccgatggcgccgttaagcaaacagccgctggagaaggatacgctgcgaccagatatgagcagcgatgagatcgagcgcattatccgcgaggcggtaaacaacgtgccgtatgccgttgggcttaataaccacatgggcagcgcaatgacttccagcctgttcggtatgcaaaaagttatgcaggcgctggaacattacaatctctattttctcgacagcatgacgattggcaatagccaggcgatgcgcgcggcatccggtacgggtgtgaaagtgctcaagcgtaaagtgttcctcgacgatacgcaaaacgaggcggatattcgccgtcagtttaatcgcgctatcgaactggcccgtcgcaacggttccgctatcgcgattggtcatccgcatcccgcaacggttcgcgtgctgcaacagatggtttatcgcctgccggcggatatcaccctggtacgtccaggcagcctgctcaacgaaccgcaggtagatacgtcccgaccgggtgtgacgccgcagaaaattgacgcgccgcgcaatccctttcgcggtgtgaagatgtgcaagccgaaaaaaccgctgcaaccggtctacgctacgcgctttttcagcgtcatcggcgagagcattacgcaaagttccgtggttgtctggtttcagcatcagtggcaaggctgggggaaaatcgccgcgcctaaaaacgtgagcgctaagacagattga

SEQ ID NO: 64581 - protein, 320 aa, Salmonella enterica subsp. enterica serovar Choleraesuis str
MPQFRRSILTLATLLAFAHPVFAGKLAIVIDDFGYRPHTENQVLALPPNISVAVLPNAPHAREMATKAHNSGHEVLIHLPMAPLSKQPLEKDTLRPDMSSDEIERIIREAVNNVPYAVGLNNHMGSAMTSSLFGMQKVMQALEHYNLYFLDSMTIGNSQAMRAASGTGVKVLKRKVFLDDTQNEADIRRQFNRAIELARRNGSAIAIGHPHPATVRVLQQMVYRLPADITLVRPGSLLNEPQVDTSRPGVTPQKIDAPRNPFRGVKMCKPKKPLQPVYATRFFSVIGESITQSSVVVWFQHQWQGWGKIAAPKNVSAKTD

SEQ ID NO: 64582 - DNA, 783 bp, Pseudomonas syringae pv. syringae B728a
  CDS (1)..(783): transl_table=11
atgcgctttctaactttgttattgctgaccctctcgatcactggcgctgcccatgcagcgccagccgagaacagcggcaaaccgtccaaggcctacctgagcctgatcatcgatgacctgggccagaatccgcagcgcgacagccgcacactggcgcttcccggcccggtcaccctggcaatcatgcccgacaccccgcatgccaccgagtttgcccgccaggcccatcgcgcaggcaaaacggtcatgctgcacatgcccatggaccccgcgaccggtccttacgcctggcaccccgagctgccactgcctgagctggaaagccgtctcaatgctgccctgctgaaagtgccgtacgcagccggtatcaacaaccacatgggcagccggatgaccgccgagccggtcgccatgacctggctgatggccgagctacagcgtcgtcacctgtttttcgtcgacagccgcaccagcgcgaaaaccgtggcggccgccgaagcgcagcgcatcggtctggccagcgtctcgcgtgacgtattcctggacgacgaacgcactgcagaagccatcacccgccaattgcagaccgcgataaaaatcgcccgcaaatatggctcggccgtggttatcggccacccctaccctgtcacgctggacgtactggaacgcgaactgcccaacctcaaagcgcaaggcgtcgaatggatcgacctgcgcagcatgatcggcgaacgcggcaatcaggcgagtgcggcgcatggcaagaacgggatttatcgctga

SEQ ID NO: 64583 - protein, 260 aa, Pseudomonas syringae pv. syringae B728a
MRFLTLLLLTLSITGAAHAAPAENSGKPSKAYLSLIIDDLGQNPQRDSRTLALPGPVTLAIMPDTPHATEFARQAHRAGKTVMLHMPMDPATGPYAWHPELPLPELESRLNAALLKVPYAAGINNHMGSRMTAEPVAMTWLMAELQRRHLFFVDSRTSAKTVAAAEAQRIGLASVSRDVFLDDERTAEAITRQLQTAIKIARKYGSAVVIGHPYPVTLDVLERELPNLKAQGVEWIDLRSMIGERGNQASAAHGKNGIYR

SEQ ID NO: 64584 - DNA, 843 bp, Haemophilus influenzae 86-028NP
  CDS (1)..(843): transl_table=11
atgaatattctgataaaaagtgcggtaaaaaatttcattgttttttctaccgcactttatacctctttttcttttgctcaaagtaaacttgctattgtgattgatgatgtaggctatcattccaaagaagatgcagcaatttttgcgatgccacgtgaaatttccgtagcaattattcctgctgcgccctatgctcgagcacgtaatcaagaagcaaaatctcaaggtagagatattttaatccatatgccgatgcaaccagtaagtgcagtgaaaatagaagacggtgggctgcatttaggaatgtctgcagcacaagtaaatgatcgcgttaatacggctaaaaatattgtgcgtgatgccatcggtatgaacaatcatatggggagtgcagctacggcagatccccaattaatgacttatttaatgaccgcacttcaagaaaaacatttattctttttagatagtcgaacaataggaaaatctgtagctgggaaaatagcaaaagaacaaggcgtgcgttcattagatcgccatatatttttagatgatagtaacgaattcgcagacgttcaacgtcaatttaaagcagcaattcactatgctagaaaacacggctccgccattgcaataggtcatcctcgccaaaatacgattgcagttttacaagcaggacttcgtaatttacccgaagatattcaattagtcggaatgggaaatttatggcgaaatgaaaaagttattccgcacaagccatttattttattattcagcgaagtgcccgcgccaacttctatagaaccttttgagcctgtaggattattgcgtggaattccaaaataa

SEQ ID NO: 64585 - protein, 280 aa, Haemophilus influenzae 86-028NP
MNILIKSAVKNFIVFSTALYTSFSFAQSKLAIVIDDVGYHSKEDAAIFAMPREISVAIIPAAPYARARNQEAKSQGRDILIHMPMQPVSAVKIEDGGLHLGMSAAQVNDRVNTAKNIVRDAIGMNNHMGSAATADPQLMTYLMTALQEKHLFFLDSRTIGKSVAGKIAKEQGVRSLDRHIFLDDSNEFADVQRQFKAAIHYARKHGSAIAIGHPRQNTIAVLQAGLRNLPEDIQLVGMGNLWRNEKVIPHKPFILLFSEVPAPTSIEPFEPVGLLRGIPK

SEQ ID NO: 64586 - DNA, 807 bp, Pseudomonas fluorescens Pf-5
  CDS (1)..(807): transl_table=11
atgatttcccgctgctcactgctgttgcgctcgctccaggccccgctgctcaccctgctgtgcctcttgcccctcgcgacccaagccgccgaacccacagccgctgcgcccaaggcctacctgagcctgatcatcgacgacctcggccagaacctgccccgtgaccgtcgcgtactggccctgcccggcccggtcaccacggcgatcatgcccgacacgccccacgccgccgaatttgcccgcgaggcccatcgcgccggcaagatcgtcatcctgcacatgcccatggacccggccaccgggccgttcgcctggcaccccgagctgcccatcgaagagctgcaaaaacgcctggaagccgccttccaggccgtgccttacaccagcggtatcaacaaccacatgggcagccgcatgaccgcccaaccccaggccatggcctggctgatggccgacttgcagcggcgacacaaattcttcgtcgacagccgcaccagcgcccagacggtggccgccgccgaagcgcagaagatcggtctggccagtgtttcccgggatgtgttcctggatgacgaacgtaccgaagcggcgatcagccaacagttgcagaccgcgatcaaactggcgcgcaaacagggttcagcggtgatgatcggccacccttatccacagaccctggcagtgctcgaacgtgagctgcccaggctcaaggcccagggcattgagtggatcgatatcaagtcgatgatcagcctgcgcagcaataaggccatggccgggcatggcaagaacggggtttatcgctag

SEQ ID NO: 64587 - protein, 268 aa, Pseudomonas fluorescens Pf-5
MISRCSLLLRSLQAPLLTLLCLLPLATQAAEPTAAAPKAYLSLIIDDLGQNLPRDRRVLALPGPVTTAIMPDTPHAAEFAREAHRAGKIVILHMPMDPATGPFAWHPELPIEELQKRLEAAFQAVPYTSGINNHMGSRMTAQPQAMAWLMADLQRRHKFFVDSRTSAQTVAAAEAQKIGLASVSRDVFLDDERTEAAISQQLQTAIKLARKQGSAVMIGHPYPQTLAVLERELPRLKAQGIEWIDIKSMISLRSNKAMAGHGKNGVYR

SEQ ID NO: 64588 - DNA, 780 bp, Colwellia psychrerythraea 34H
  CDS (1)..(780): transl_table=11
gtgctaaatacttttttaaaaattatctctatacgttcttttataatactttatctaatgctttttagtgttcaaagcattgctcaagcgaaccaagttgctatcgtcattgatgatatggggtatcggtataccgacaaacatgcgttaactttacctggagcaattacctatgcttttctacctcataccacctatggtaaaaaacttgccatgcaagccaatagcactaatcatgatgtgctgattcacataccaatggaatctgaaaatagaaaaaaattaggtcctggtgcgctaacaagtaatatggatgaacaagcatttagtcaaagcttaactaagtccttcgctgaaattccctttgcgattggtattaataatcatatggggagctatctcacacaattatatcaacctatggcttggactatgacgtttttaaaacagcatgatttgttttttttagacagtaaaaccagtcctcattcacaagcacaacaagctgctatcgattttggcgtaccggttaaagcaaggcatatatttttagataatgaattaactgaaaagtatattagtcagcaatttaagcaactcattcatttcgctcaaaaacaccaaacagctattgctatcgcccatcctcatcccgaaactgtggcaacattaaataaactcattcctaccttaaagttacacggtattgagttagttccattatctcgtttatacccaacatcgatcaataaggtaattaactctacagcaactgagtaa

SEQ ID NO: 64589 - protein, 259 aa, Colwellia psychrerythraea 34H
MLNTFLKIISIRSFIILYLMLFSVQSIAQANQVAIVIDDMGYRYTDKHALTLPGAITYAFLPHTTYGKKLAMQANSTNHDVLIHIPMESENRKKLGPGALTSNMDEQAFSQSLTKSFAEIPFAIGINNHMGSYLTQLYQPMAWTMTFLKQHDLFFLDSKTSPHSQAQQAAIDFGVPVKARHIFLDNELTEKYISQQFKQLIHFAQKHQTAIAIAHPHPETVATLNKLIPTLKLHGIELVPLSRLYPTSINKVINSTATE

SEQ ID NO: 64590 - DNA, 783 bp, Pseudomonas syringae pv. phaseolicola 1448A
  CDS (1)..(783): transl_table=11
atgcgcgttctcgctctgttactgctgacactctcgatcactggcgctgcccatgcagcgccagccgaagacaacggcaagccgccgaaggcctatctcagcctgatcatcgacgacctgggtcagaacccggcgcgggatagccgtacactggcgctccccgggccggtaacgctggcgatcatgcctgacactccacacgccaccgaatttgcccgcgaggctcaccgcgcaggcaagacggtcatgctgcacatgccgatggacccggcgaccgggccttacgcctggcatcccgaactgcccttgcctgaactggaaagccgtctcaatgcggcgctgctgaaagtgccttatgcagccggcatcaataaccacatgggcagccggatgaccgccgaaccggtcgcgatggcctggttgatggccgaactgcaacgacgtcatctgtttttcgtggacagccgcaccagcgcgaaaaccgtggcagccgcagaggctcagcgcatcggcctcgcaagcgtctcacgcgacgtgtttctggacgacgagcgcacggccgaagccatcaaccgacaattgcagtcagccatcaaaatcgcccgcaagcatggctcggcagtggtcatcggtcacccctaccctgtcacgctggacgtactggaacgcgagttgcccaaactcaaggatcagggcgtcgaatggatcgacctgcgcagcatgatcagcgaacgcggcaatcaggcgagtgcggcgcatggcaagaatggggtgtatcgctga

SEQ ID NO: 64591 - protein, 260 aa, Pseudomonas syringae pv. phaseolicola 1448A
MRVLALLLLTLSITGAAHAAPAEDNGKPPKAYLSLIIDDLGQNPARDSRTLALPGPVTLAIMPDTPHATEFAREAHRAGKTVMLHMPMDPATGPYAWHPELPLPELESRLNAALLKVPYAAGINNHMGSRMTAEPVAMAWLMAELQRRHLFFVDSRTSAKTVAAAEAQRIGLASVSRDVFLDDERTAEAINRQLQSAIKIARKHGSAVVIGHPYPVTLDVLERELPKLKDQGVEWIDLRSMISERGNQASAAHGKNGVYR

SEQ ID NO: 64592 - DNA, 741 bp, Pseudoalteromonas haloplanktis TAC125
  CDS (1)..(741): transl_table=11
atgaaagtaattatagggctgatattgatgcttggttttgcgtcactcaatgctaaagccaagcaaatagcgatagtaatagacgacataggctatcaccagagagatttagaactgttaactttgcctggccaagtgtcgtattcaattttgcctcacacgccttatgcacaagcttttgccactttagccagtaaaacaaataaagagttattactgcatattcccatgcaagcacttaacggcaaggagcttggccctggcgcacttacgttaaatatgaataaagagcagatacagcaaatacttggcactgctttggccagtttaccgcaagttaaaggggttaataatcacatgggatcggcgctcacccagcaaagccaagctatgaggtggataatggaagtgcttaaaaagcgacatttgtactttttagatagccgcaccactgaattaagccaggcacaaaatgccgctaactttttaggtgttgaaaatattggccgtcatatttttttagataacataaccacaccagaacagttacaactgcgcctagatgagctaaaacaacacgctactgagcataagtttgccattgcaattgcccacccctaccctgaaacaatcgcgtttttacgccacgttttaccacagctcagcaaacaaggttttgaattagtacccgtatctaagctggtagagcgtaaatatatacaactggcagagaagtactaa

SEQ ID NO: 64593 - protein, 246 aa, Pseudoalteromonas haloplanktis TAC125
MKVIIGLILMLGFASLNAKAKQIAIVIDDIGYHQRDLELLTLPGQVSYSILPHTPYAQAFATLASKTNKELLLHIPMQALNGKELGPGALTLNMNKEQIQQILGTALASLPQVKGVNNHMGSALTQQSQAMRWIMEVLKKRHLYFLDSRTTELSQAQNAANFLGVENIGRHIFLDNITTPEQLQLRLDELKQHATEHKFAIAIAHPYPETIAFLRHVLPQLSKQGFELVPVSKLVERKYIQLAEKY

SEQ ID NO: 64594 - DNA, 777 bp, Pseudomonas fluorescens PfO-1
  CDS (1)..(777): transl_table=11
atgtccttgcgtttggtctttgtcctgctgtgctgtctggcgggtgctgctcatgcagaacctgccagacccacacctcaaaaagcctacctgacactgatcatcgacgacctggggcagaacctgccccgggatcgccgggtgctggccctgcccgggccggtcacgaccgcgatcatgcccgacaccccgcacgccaccgagtttgcccgcgaggcccatcgcgccggcaaggtcgtgatcctgcacatgccgatggacccggccactggcccgttcgcctggcatcccgaactgcccatcgaagaactcgagaaacggctgaacgccgcgttcaaaatggtcccctacaccgccggcatcaacaaccatatgggcagtcgcatgactgcgcagccggtggccatggcgtggttgatgggcgagttgcagcgccgccacaagttcttcgtcgacagccggaccagcgcccagactgtcgccgcgcaacaggcacagaagatcgatctggcaagtgtttcgcgggatgtatttctcgatgacgagcgcaccgaagcggcgatcctgactcaattgcagacggcaatcagcctggcgcacaagcagggttcagccgtgatgatcggacacccttatccacagacactggcggtgctggagcgggaactgccaaagttgaaagcccaaggcatcgagtggatcgacatcaagcagatgatcagcgtgcgcagcaatcgcgccacggccgcacacggcaaaaacggtgtctaccgataa

SEQ ID NO: 64595 - protein, 258 aa, Pseudomonas fluorescens PfO-1
MSLRLVFVLLCCLAGAAHAEPARPTPQKAYLTLIIDDLGQNLPRDRRVLALPGPVTTAIMPDTPHATEFAREAHRAGKVVILHMPMDPATGPFAWHPELPIEELEKRLNAAFKMVPYTAGINNHMGSRMTAQPVAMAWLMGELQRRHKFFVDSRTSAQTVAAQQAQKIDLASVSRDVFLDDERTEAAILTQLQTAISLAHKQGSAVMIGHPYPQTLAVLERELPKLKAQGIEWIDIKQMISVRSNRATAAHGKNGVYR

SEQ ID NO: 64596 - DNA, 1188 bp, Pelobacter carbinolicus DSM 2380
  CDS (1)..(1188): transl_table=11
atggctaccaaaaaaaagaccgttcgacgaaaacgccagccgcgaaaaaagcagccggaccgcaccttcaaggttttgctggcctcattgttccttgtgggatttctcgttgtttcccttgtgttgttgacttttgtccagcgaccaccgttgccaaatcggacccccgaggtttcgccgcccgtagcgaaacaaccgccagactcggccgatacgcgggatcaggttctgcgaacctcggtgcagatagagattgaacgtgccttgtggcgtcaggggatttcctttaccgggatggatgtcgtcaccgacgatcatgttatgcattatcatctgccgtcggtgtatccgggacaggcctggtatgacggattggttagggccttggagaagcagtcttcccggctgaagttcgcatttgctgatgctcctgctcctttggtgcgcgtttccgttaacggaattccaagtttcgctctgcatttcaagcgttcccggagcaaacctgccaaagtgcgcccaaaggcccggattgccatcgtggtggatgatctcggtcgcgatcttcgcatgttgcggcggctgctggccattgatctcgatctgaccatggcagtcatgcccgaggaaccgcatacgctgcaatcggcggaactggcgcatcgcgccggtcgcgaagtgctggtgcatatgcccatggaaccggaaagctatccgcgcaacaatcccggcccgggagcgttgctgctcgggcaggatcgtttggagattgagcggcgagtaacgcgcatgtttgaaaatgtgccccatgcagtgggcggcaacaatcatatggggtcgcgttttacccaatatgccgagggcttgcagattgttttcgaggtgatgaaaaaaaacggcttgttctttgtggacagtcgcacaagtcccggatcggtggcttttctcgaagctcgtcgcgccaggattcccgcggtttcaagggatattttcctcgataacagtcagaacgtcgatgccattgcccggcagatacgtgaagcggtgaagatggctcggtcccgtggcaaggtggtggccatctgtcatccttacccacagacggtggaggctctgcagcaggaagcggcgtttttacgccagcaggatgtcgaggtggttcctgtatcgcgcttgttgcggcattga

SEQ ID NO: 64597 - protein, 395 aa, Pelobacter carbinolicus DSM 2380
MATKKKTVRRKRQPRKKQPDRTFKVLLASLFLVGFLVVSLVLLTFVQRPPLPNRTPEVSPPVAKQPPDSADTRDQVLRTSVQIEIERALWRQGISFTGMDVVTDDHVMHYHLPSVYPGQAWYDGLVRALEKQSSRLKFAFADAPAPLVRVSVNGIPSFALHFKRSRSKPAKVRPKARIAIVVDDLGRDLRMLRRLLAIDLDLTMAVMPEEPHTLQSAELAHRAGREVLVHMPMEPESYPRNNPGPGALLLGQDRLEIERRVTRMFENVPHAVGGNNHMGSRFTQYAEGLQIVFEVMKKNGLFFVDSRTSPGSVAFLEARRARIPAVSRDIFLDNSQNVDAIARQIREAVKMARSRGKVVAICHPYPQTVEALQQEAAFLRQQDVEVVPVSRLLRH

SEQ ID NO: 64598 - DNA, 963 bp, Geobacter metallireducens GS-15
  CDS (1)..(963): transl_table=11
gtggctacatctcgaaatggcaaaatcaaggtaaacagaaaaaaaggcggacgtaattctcgtcctcttgttggtttcattattcttgcagtcctggttgttgcggcggtgttccttattgatggcctgcttaatcagaagcgcccagagaaaaaaccggaacctccaaaagtcgtggcacggcataagctcccgccccgggaatccgcggcggaaaaggaacccgttgtccatgaggactatacggcgacagtggtgccgccaccgactgagcggcatgtccgcccacgtcctgccggttccggaaatctcgctatcatcattgacgacatgggaaagggtatgcaagaagcccgatcgatcattgacatcggcgtaccggtgacgttctctattatcccggggcttccgaaggtgcgtcaggttgcccaagaggcacaacggcgcgggatcgaggcaatgatccatcttcccatggagccgaaggggtatccggagcgccgtctcgaggagaacggtcttcttctcagtcagagtaacgatgagattgtggtccggatgaacggttatttcaaggaagtcccccaggcggttggcgccaacaatcacatggggtcggcattcaccgaaaacaaagagaagatggcgatagtgctgagagtgctgaaggagaaggggctgttctttgtcgacagcaagacgtcggcaatatctgtgggagagtcgactgcacgagagatgggcttgagaaccgcgtcacgatccgtctttttggacaatattcaggatgttggatatatttcgaagcagatcaggcaggctgcttccatcgctcgcaaaaggggcagcgccattgccatctgccacccccatcccgccactatccaagccttagctgcagaactgccgaagttgcgggatgagggtgtcacccttgtccccgcgtcatccctggtacactga

SEQ ID NO: 64599 - protein, 320 aa, Geobacter metallireducens GS-15
MATSRNGKIKVNRKKGGRNSRPLVGFIILAVLVVAAVFLIDGLLNQKRPEKKPEPPKVVARHKLPPRESAAEKEPVVHEDYTATVVPPPTERHVRPRPAGSGNLAIIIDDMGKGMQEARSIIDIGVPVTFSIIPGLPKVRQVAQEAQRRGIEAMIHLPMEPKGYPERRLEENGLLLSQSNDEIVVRMNGYFKEVPQAVGANNHMGSAFTENKEKMAIVLRVLKEKGLFFVDSKTSAISVGESTAREMGLRTASRSVFLDNIQDVGYISKQIRQAASIARKRGSAIAICHPHPATIQALAAELPKLRDEGVTLVPASSLVH

SEQ ID NO: 64600 - DNA, 1467 bp, Desulfovibrio desulfuricans G20
  CDS (1)..(1467): transl_table=11
atgacgacgccgtcaggctccggtggcaattttatatcacgcatcaggcgtgttctggacagattcaggtcttccacggcacagcggtccggcggagcagattccgcgggcggcctgctggccaaccgttttgtgctggcagcggtggcgtttgcctgcggcgtgctgctgaccggcgtgctgcttcttgcgtacttcagtctttccggtacggctagcgcccctgccgacgctgaacaggcacagtcgggcgaggctctgccgtctgtccgcgatctgctcgatccttcgagccttccctatgaagaatcgctgggcagctcgctggatcagaccgtcaagcaggtggactatgctttgctgcgcacgctggaacggctggatctgccccgcagggcactggggctgcagcgggtcgaagtacggtcgcacaacggagaggagtatcatttccagcagctggagataagactcggcaacggtcatgatgattttattgccgggttgcgtacggctctggccacatgggttccggccgcgactttgcagcaggccgccggtggcgcatggcgcatttcgcttgacggtgtggtgacgcatgcactggcttttgccgtgctgcaggagcaggagccgcagcttccggtcgacggacagcacagaggcacatcagaggccggcacacccttgccggaggcgcaggatgatgccggcagccccgatgcagctgtcacgggccggcccgaaagcggagccgctgcaacgcagattcaggagcgggaaaacgacctgccccgtcttgccatagtcatagatgacataggtgaaagtatgcgggctgtggagcgtcttgtggcgctggaatatccggtgacgctttccatatggccgcgtgcaacctatgcccgccgcgccgcggattacggctggcagcacgggtgcgagataatgatccaccagcccatggagccggtgggctacccccgtgtgaatccgggaccgggagccttgtttgtctccatgacaccggatcagatacatactgtgctaggcgaaaatctgggtatggtgccccatgccgtaggcataaacaaccatatgggatcgcgctttacgcaggacgatgcgggagtgcaggccgtggtggatgaactgcgcggcagaaagctgtttgtgctggacagtgtgacgcatggcggttctgtgctgtaccgtaaggcggcggcagccggattgcatgcattccggcgttcggtgtttcttgatgtggtgcgtgacaaaaaaagcattatgcaccagctggacaaagctgccggcgtggcactgcgtcagggcacggccattgccatagggcatcccacgcctgaaacgctggccgcgctggaagagtggcagcgggtgcgcagccgcaagattcagattgtcagtgtggcggggcttgataaagtgcggcatcgcaggcaataa

SEQ ID NO: 64601 - protein, 488 aa, Desulfovibrio desulfuricans G20
MTTPSGSGGNFISRIRRVLDRFRSSTAQRSGGADSAGGLLANRFVLAAVAFACGVLLTGVLLLAYFSLSGTASAPADAEQAQSGEALPSVRDLLDPSSLPYEESLGSSLDQTVKQVDYALLRTLERLDLPRRALGLQRVEVRSHNGEEYHFQQLEIRLGNGHDDFIAGLRTALATWVPAATLQQAAGGAWRISLDGVVTHALAFAVLQEQEPQLPVDGQHRGTSEAGTPLPEAQDDAGSPDAAVTGRPESGAAATQIQERENDLPRLAIVIDDIGESMRAVERLVALEYPVTLSIWPRATYARRAADYGWQHGCEIMIHQPMEPVGYPRVNPGPGALFVSMTPDQIHTVLGENLGMVPHAVGINNHMGSRFTQDDAGVQAVVDELRGRKLFVLDSVTHGGSVLYRKAAAAGLHAFRRSVFLDVVRDKKSIMHQLDKAAGVALRQGTAIAIGHPTPETLAALEEWQRVRSRKIQIVSVAGLDKVRHRRQ

SEQ ID NO: 64602 - DNA, 1095 bp, Thiomicrospira denitrificans ATCC 33889
  CDS (1)..(1095): transl_table=11
atgtcaaaaagaaaaaaagccagccctaaaaaaagctcaaattttttaagttatactgtttggagtttagcgtttgtagcaatagttttaagttcgtttgttgctgggtattatataggccatgatagcgcaaaagatgacgctcttaaaaaagagcaatcaaaagagaaaacaaaacaatcaatgataaaaaaactagaacaagagagtattaaaaaaaagagccttgaagatgagcagagcgttagtgatagactaaaagaggttctaaaaaaagagcctgctgtagctgagacattaaaagattcaaatgagagtaataaaagtaatgacagcaatgtgacatcttctctaccaattaaagaggtagtctcagagtatgaaaatgcttcacatgagattgaagaggctgttttgcctaaagctgtagagcgtaaaatagtaaaaagtttaaagagaccaaagctagcaattattattgatgatgttagtgtaaagtcacatgtaaatgctatcaaaggtcttcatttacccataactatgtcatttttgccacctagtaaagctagaccatcttctcatattttagcatctcaagagagtttttatatggttcacttgccaatggaagcacaaagctttaaatcagaagagcctcttactctaagagttgatgattcaaatgaaaaaattgtacaaagagttgtggagataaaaaaactttttccaaaagtaaaatatataaataatcatacagggagcaaatttacagcagatgaggctgctatggataggctcatatccgcactcaagaaatcagatataatctttgttgatagcagaactacaggagagtcaaaagctcaaaaaatttcaaaaaaatatgcgttagagtatataggaagagatgtgtttttggatcataagatggataaagcatatatactctcacagattaaaaaagctattgaagtggcgaaaaaacatggaagtgctatagcaataggacacccacatgcaaacacaatcgcagctataaatgaatcaaagaaactttttgcagatgttgatttagttttagtaaataagctttaa

SEQ ID NO: 64603 - protein, 364 aa, Thiomicrospira denitrificans ATCC 33889
MSKRKKASPKKSSNFLSYTVWSLAFVAIVLSSFVAGYYIGHDSAKDDALKKEQSKEKTKQSMIKKLEQESIKKKSLEDEQSVSDRLKEVLKKEPAVAETLKDSNESNKSNDSNVTSSLPIKEVVSEYENASHEIEEAVLPKAVERKIVKSLKRPKLAIIIDDVSVKSHVNAIKGLHLPITMSFLPPSKARPSSHILASQESFYMVHLPMEAQSFKSEEPLTLRVDDSNEKIVQRVVEIKKLFPKVKYINNHTGSKFTADEAAMDRLISALKKSDIIFVDSRTTGESKAQKISKKYALEYIGRDVFLDHKMDKAYILSQIKKAIEVAKKHGSAIAIGHPHANTIAAINESKKLFADVDLVLVNKL

SEQ ID NO: 64604 - DNA, 1122 bp, Magnetospirillum magnetotacticum MS-1
  CDS (1)..(1122)
atgctgatgggcaacaaggtgccgctgtgggagcgtccctcggttttggtcggcttgatgattgccgttctggtggccggtgtcgggatcggtctggtcctgggcctgtggtcggggaagtcggccaagacgcagatggccggggccgagcaggcgcccgccccggttatctccgagacgacctcgccgcctccgcctccgccgccattgccttcggccaatgaggaggcggatgacggccgtccgctgttgcagccgccgccaccccggcccgatcccggctcgtccgaggcgctggaattcgggcatgcctccgatgtggtttctctggttcccgcgcctgcgcagcccccagccagtccagaggtcaaactgcctccggccggagcggcggtgtggctgcgcaatgcccttcccgtgcccaaaaccgggggcaagccggtcatcgccatcatcatcgacgatctgggcgtcgatcgccgccgcagcgagcgcatggcccagttgaaggggcctttgaccctgtcctacatgacctatgccgaggatgtggcgcgccaatcccatgatgccagggcgcatgggcacgaactgatggtccatgtgcccatgcagccgcaaagcgcttcctatgatcccggcgccgaggtgctggaagtaggcctgccgcccgaagagatccgccgccgtctggattggggcctgtcacgctttgacggctatgtggggatcaacaaccatatgggttcgcgtttcacctccgatgcggcgggcatgcgggtggtgatggccgagttgcgccgccgtggcctggccttcatcgattccgtgacctcggaacatacggtgggtgcggagacggcgcgccattacggtgtgcctttcgcggcgcgccatgtcttcctcgacaacgaccagggtgtggcacatgtgcgcgcccaattggccaagaccgaggcctatgcccgcaagcatggggccgccatcgccatcggccatccccatgacggcaccatcgaggccctggctgggtggctgccggggctggaagcccgcggcttcgcgctggttccggtcagcaccatcatccgcatgggcaacgggacgtcatcttccccttga

SEQ ID NO: 64605 - protein, 373 aa, Magnetospirillum magnetotacticum MS-1
MLMGNKVPLWERPSVLVGLMIAVLVAGVGIGLVLGLWSGKSAKTQMAGAEQAPAPVISETTSPPPPPPPLPSANEEADDGRPLLQPPPPRPDPGSSEALEFGHASDVVSLVPAPAQPPASPEVKLPPAGAAVWLRNALPVPKTGGKPVIAIIIDDLGVDRRRSERMAQLKGPLTLSYMTYAEDVARQSHDARAHGHELMVHVPMQPQSASYDPGAEVLEVGLPPEEIRRRLDWGLSRFDGYVGINNHMGSRFTSDAAGMRVVMAELRRRGLAFIDSVTSEHTVGAETARHYGVPFAARHVFLDNDQGVAHVRAQLAKTEAYARKHGAAIAIGHPHDGTIEALAGWLPGLEARGFALVPVSTIIRMGNGTSSSP

SEQ ID NO: 64606 - DNA, 762 bp, Pseudomonas syringae pv. syringae B728a
  CDS (1)..(762)
ttgctgaccctctcgatcactggcgctgcccatgcagcgccagccgagaacagcggcaaaccgtccaaggcctacctgagcctgatcatcgatgacctgggccagaatccgcagcgcgacagccgcacactggcgcttcccggcccggtcaccctggcaatcatgcccgacaccccgcatgccaccgagtttgcccgccaggcccatcgcgcaggcaaaacggtcatgctgcacatgcccatggaccccgcgaccggtccttacgcctggcaccccgagctgccactgcctgagctggaaagccgtctcaatgctgccctgctgaaagtgccgtacgcagccggtatcaacaaccacatgggcagccggatgaccgccgagccggtcgccatgacctggctgatggccgagctacagcgtcgtcacctgtttttcgtcgacagccgcaccagcgcgaaaaccgtggcggccgccgaagcgcagcgcatcggtctggccagcgtctcgcgtgacgtattcctggacgacgaacgcactgcagaagccatcacccgccaattgcagaccgcgataaaaatcgcccgcaaatatggctcggccgtggttatcggccacccctaccctgtcacgctggacgtactggaacgcgaactgcccaacctcaaagcgcaaggcgtcgaatggatcgacctgcgcagcatgatcggcgaacgcggcaatcaggcgagtgcggcgcatggcaagaacgggatttatcgctga

SEQ ID NO: 64607 - protein, 253 aa, Pseudomonas syringae pv. syringae B728a
MLTLSITGAAHAAPAENSGKPSKAYLSLIIDDLGQNPQRDSRTLALPGPVTLAIMPDTPHATEFARQAHRAGKTVMLHMPMDPATGPYAWHPELPLPELESRLNAALLKVPYAAGINNHMGSRMTAEPVAMTWLMAELQRRHLFFVDSRTSAKTVAAAEAQRIGLASVSRDVFLDDERTAEAITRQLQTAIKIARKYGSAVVIGHPYPVTLDVLERELPNLKAQGVEWIDLRSMIGERGNQASAAHGKNGIYR

SEQ ID NO: 64608 - DNA, 813 bp, Haemophilus somnus 2336
  CDS (1)..(813)
atggggctaatcctgagcattgtatcgtcttttatttatgctcaacataaactggcgattgtaattgatgatattggatatcgtcttaaggaagataatcagatttattctctgccaaaagaagtttctgttgccattattccttccgcacctcatgctaaacaacgtgatcaacaggcaaaacaacaaaacagagatattttaattcatttacctatgcaaccgcttaatcagcaaaaaattgaagatggcggaataaaattaggtatgtcgcagccggaagtttatcagcgagtcagaaatgctaaaagtattttacctaacgctataggtatgaataatcacatgggaagtgcggcgacagccgataaagatttaatgaacaaattaatgaccgcacttttgcaacaaaatttattctttcttgatagccgaaccattgggcgatcagttgcggggaaaatagcgagagagtttggtatacccactttggaacgtcatatttttcttgatgatagtgataaacttagtgatgttcaacgccaatggaatgccgccattcaatatgctcgtaaacggggaacggctattgtgattggacatccgagaaaaaatacgattgcagttttgcaaatggggataaaacaattaccaaaagatattcaattagtgggtattggcagtttgtggcgtaatgagaagataattcctcagaaaccttttatttatctgtttaatgatatacccgcaccgacatcgcaagcaccatttcaaactattcctttgttaagaggagtaccgaccgatatataa

SEQ ID NO: 64609 - protein, 270 aa, Haemophilus somnus 2336
MGLILSIVSSFIYAQHKLAIVIDDIGYRLKEDNQIYSLPKEVSVAIIPSAPHAKQRDQQAKQQNRDILIHLPMQPLNQQKIEDGGIKLGMSQPEVYQRVRNAKSILPNAIGMNNHMGSAATADKDLMNKLMTALLQQNLFFLDSRTIGRSVAGKIAREFGIPTLERHIFLDDSDKLSDVQRQWNAAIQYARKRGTAIVIGHPRKNTIAVLQMGIKQLPKDIQLVGIGSLWRNEKIIPQKPFIYLFNDIPAPTSQAPFQTIPLLRGVPTDI

SEQ ID NO: 64610 - DNA, 774 bp, Pseudomonas aeruginosa UCBPP-PA14
  CDS (1)..(774)
atgtcggcgttccgcgttgtcctgctgggcctgtgcctgctgttcaaccaggcccaggcccgccaggaccccgtcccctaccagcgcccgccgctgctgaccgtggtcatcgacgacctcgggcagaacctggcacgcgaccgccgggtcctcgacctgccccccggcgtaaccctggcaatcatcccggaaaccccgcatgccgccgaactggcccgcgaggcgcaccagcgcgggcgcacggtgatcctgcacatgccgatggacccggccggcggtccctacgcctggcggccggagctgacccaggaagagcgtgcgcggcggctggacgcggcgctggccaaggtgccgttcgtgcagggcctgaacaaccacgagggcagccgcatgaccgcggtgcgcccggcgatggcctggctcgccgaggaactccagcgtcgcggcctgtacctggtcgacagccgcaccagcgccgccaccgtggccgccagcgaggcgcagcggatcggcctggcgagcgtctcgcgcgatgtgttcctcgacaacgaagccacaccggaagcggtctccgcacaactgcaggccggcatcgccctggcccgcaagcagggttcggcgttgctcatcggccacccgcacaaggccaccctcgacgtgctggcgcgggagctgccgaagctgcgcgcccagggcatcgagctggtaccgccgcagatgctcatcggcgagcgcggcaaccgcaacgtcaacccacgccaggcgccgcactga

SEQ ID NO: 64611 - protein, 257 aa, Pseudomonas aeruginosa UCBPP-PA14
MSAFRVVLLGLCLLFNQAQARQDPVPYQRPPLLTVVIDDLGQNLARDRRVLDLPPGVTLAIIPETPHAAELAREAHQRGRTVILHMPMDPAGGPYAWRPELTQEERARRLDAALAKVPFVQGLNNHEGSRMTAVRPAMAWLAEELQRRGLYLVDSRTSAATVAASEAQRIGLASVSRDVFLDNEATPEAVSAQLQAGIALARKQGSALLIGHPHKATLDVLARELPKLRAQGIELVPPQMLIGERGNRNVNPRQAPH

SEQ ID NO: 64612 - DNA, 843 bp, Haemophilus influenzae R2846
  CDS (1)..(843)
atgaatattctgataaaaagtgcggtaaaaaatttcattgttttttctaccgcactttatacctctttttcttttgctcaaagtaaacttgctattgtgattgatgatgtaggctatcattccaaagaagatgcggcaatttttgcgatgccgcgtgaaatttccgtagcaattattcctgctgcgccctatgctcgagcacgtaatcaagaagcaaaatctcaaggtagagatattttaatccatatgccgatgcaaccagtaagtgcagtgaaaatagaagacggtgggctgcatttaggaatgtctgcagcacaagtaaatgatcgcgttaatacggctaaaaatattgtgcgtgatgccatcggtatgaacaatcatatggggagtgcagctacggcagatccccaattaatgacttatttaatgaccgcacttcaagaaaaacatttattctttttagatagtcgaacaataggaaaatctgtagctgggaaaatagcaaaagaacaaggcgtgcgttcattagatcgccatatatttttagatgatagtaacgaattcgcagacgttcaacgtcaatttaaagcagcaattcactatgccagaaaacacggctccgccattgcaataggtcatcctcgtgcaaatacaatagcggtgttacaagcaggtcttaacaatttaccagaagatatccaacttgtcggaatgggcaacttatggcgaaatgaaaaagttattccgcccaagccatttattttattattcagcgaagtgcctgcgccaacttctatagaaccttttgagcctgtaggagtattgcgtggaattccaaaataa

SEQ ID NO: 64613 - protein, 280 aa, Haemophilus influenzae R2846
MNILIKSAVKNFIVFSTALYTSFSFAQSKLAIVIDDVGYHSKEDAAIFAMPREISVAIIPAAPYARARNQEAKSQGRDILIHMPMQPVSAVKIEDGGLHLGMSAAQVNDRVNTAKNIVRDAIGMNNHMGSAATADPQLMTYLMTALQEKHLFFLDSRTIGKSVAGKIAKEQGVRSLDRHIFLDDSNEFADVQRQFKAAIHYARKHGSAIAIGHPRANTIAVLQAGLNNLPEDIQLVGMGNLWRNEKVIPPKPFILLFSEVPAPTSIEPFEPVGVLRGIPK

SEQ ID NO: 64614 - DNA, 843 bp, Haemophilus influenzae R2866
  CDS (1)..(843)
atgaatattttgataaaaagtgcggtaaaaaatttcattgttttttctaccgcactttatacctctttttcttttgctcaaagtaaacttgctattgtgattgatgatgtaggctatcatctcaaagaagatgcagcaatttttgcgatgccacgtgaaatttccgtagcaattattcctgctgcgccctatgctcgagcacgtaatcaagaagcaaaatctcaaggtagagatattttaatccatatgccgatgcaaccagtaagtgcagtgaaaatagaagacggtgggctgcatttaggaatgtctgcagcacaagtaaatgatcgcgttaatacggctaaaaatattgtgcgtgatgccatcggtatgaacaatcatatggggagtgcagctacggcagatccccaattaatgacttatttaatgaccgcacttcaagaaaaacatttattctttttagatagtcgaacaataggaaaatctgtagctggaaaaatagcaaaagaacaaggggtgcgttcattagatcgccatatatttttagatgatagtaacgaattcgcagacgttcaacgtcaatttaaagcagcaattcactatgctagaaaacacggctccgccattgcaataggtcatcctcgccaaaatacgattgcagttttacaagcaggacttcgtaatttacccgaagatattcaattagtcggaatgggaaatttatggcgaaatgaaaaagttattccgcccaagccatttattttattattcagcgaaatgcctgcaccaacttctatagaaccttttgagcctgtaggattattgcgtggaattccaaaataa

SEQ ID NO: 64615 - protein, 280 aa, Haemophilus influenzae R2866
MNILIKSAVKNFIVFSTALYTSFSFAQSKLAIVIDDVGYHLKEDAAIFAMPREISVAIIPAAPYARARNQEAKSQGRDILIHMPMQPVSAVKIEDGGLHLGMSAAQVNDRVNTAKNIVRDAIGMNNHMGSAATADPQLMTYLMTALQEKHLFFLDSRTIGKSVAGKIAKEQGVRSLDRHIFLDDSNEFADVQRQFKAAIHYARKHGSAIAIGHPRQNTIAVLQAGLRNLPEDIQLVGMGNLWRNEKVIPPKPFILLFSEMPAPTSIEPFEPVGLLRGIPK

SEQ ID NO: 64616 - DNA, 849 bp, Actinobacillus pleuropneumoniae serovar 1 str. 4074
  CDS (1)..(849)
atgtggaatttatttcaaagtaagcagtctattttttcggttttttggcaaattttgttgctgatttcaccgcttgctcaagcgggaaaattagcgattgtgatagatgatatcggctatcgtacaaaagaagataatgcgatttacgcattgcctaaagaagtgagtgtggcaatcattcccgttgcaccgtatgcgacggcgagagcgcaaaaagcctacgaacaaaaacgggacgtgttgatccatttaccgatgcaaccgaaaaacagacatcaaccgattgaatcgggggcgctaatggtcggggcaagtaaagaaaacgtcgctcgcttaattcaagccgctcgtaatcaagtgccttatgccatcggtttgaataaccatatgggaagcggtgcgacggcggatcgtcaaacgatggagcatttaatgacggagttgtctaaacaacaacttttctttcttgacagtaaaaccggtccgagcgttgcggcaaaagtcgcccgtgaattaggggtaaacgccttggaaagaaacttatttttagatgataacgatgcgttgcacgaagtgcagaatcagtttcatcttgctttacattacgctcgaaaacacggtagtgcgattttaatcggtcacccgcgtaaaaacagtatcgaggtcttagaaaaaggtttggcaaacttacccgaagatattcaattagtcagtatgggcagcttgtggcgtaatgatactgtcgtgccgaaaacaccgtttattatggtgtttgacgatatgcccgcgccgacttccgtcgccccttttaacgtcgtaccgctattaagaggcgtaccacaagattaa

SEQ ID NO: 64617 - protein, 282 aa, Actinobacillus pleuropneumoniae serovar 1 str. 4074
MWNLFQSKQSIFSVFWQILLLISPLAQAGKLAIVIDDIGYRTKEDNAIYALPKEVSVAIIPVAPYATARAQKAYEQKRDVLIHLPMQPKNRHQPIESGALMVGASKENVARLIQAARNQVPYAIGLNNHMGSGATADRQTMEHLMTELSKQQLFFLDSKTGPSVAAKVARELGVNALERNLFLDDNDALHEVQNQFHLALHYARKHGSAILIGHPRKNSIEVLEKGLANLPEDIQLVSMGSLWRNDTVVPKTPFIMVFDDMPAPTSVAPFNVVPLLRGVPQD

SEQ ID NO: 64618 - DNA, 630 bp, Bacillus cereus G9241
  CDS (1)..(630): transl_table=11
atgttatcacttcctattccactaactgttgctgttatgccttttcttccttccacaaaggaagatgcgatagcggctcataagaaaggacacgaagttattatacatatgccaatggagccgattaaaggtaaaaaagaatggcttggaccaaaagcaattacaactgatttaagcgacgaagaaataaacaaccgactcgaacaagcgattcaagaagtaccacatgcaattgggatgaataatcatatgggatcaaaagtgactgcggacgaaagaattgtacgacttatacttgcagcttgtaaaaaacacggtttattttatttagatagcaaaacaaatcctaagagtgtcgtcccaaaaatcgggaaagaattaggagtgccaattattgaaaatcaattattttttgatgacgtgtacacagcggcacatatttcaaaacaagcccaattactcattaaaaaacttcaagaaaaaccgattatggtagctatcggacatgttgggcctccaggtgaaattacatcacgtgttatagaaacttctattcctaaaattcgtgaacatgcagattttatttttttatccgatttagcattatctccgcctcctgtttcaaaataa

SEQ ID NO: 64619 - protein, 209 aa, Bacillus cereus G9241
MLSLPIPLTVAVMPFLPSTKEDAIAAHKKGHEVIIHMPMEPIKGKKEWLGPKAITTDLSDEEINNRLEQAIQEVPHAIGMNNHMGSKVTADERIVRLILAACKKHGLFYLDSKTNPKSVVPKIGKELGVPIIENQLFFDDVYTAAHISKQAQLLIKKLQEKPIMVAIGHVGPPGEITSRVIETSIPKIREHADFIFLSDLALSPPPVSK

SEQ ID NO: 64620 - DNA, 1299 bp, Rhodospirillum rubrum
  CDS (1)..(1299)
atgcttgatcatcccgaagaccggggagtcctcgatcgcttcgcctttttcgtcgcccgcatggcccccctgaccctggttctggtcgccctcgccaccttggcggtcggattgggcattggtttcgccgttggccgactggcccagggcgacaaggcggcgcctcccgcgcccaccgccctggcggcgatcggtccgctgcccgttgctccggcggccggcgaggcggcccatcagtatcaaccgccgccgctgccccgtcccgccgagaccgcgcccccccttccggccgacgtcgcccccccggtgcaaacggcgcccgccccctcggagacgccggccggcgaaaagggcgcgcttccggccgaatttcgcgacctgctggccagcgacggtccgggcttcgtcatggaggaacgccttcccgacgatgcctatgttcacaagccccaggtcaagccgaccgtcaagaccgccgccctggccccggtcccgcgctttcccgagggaccggcggagtccagcgggctgccctggaagacctatggcgtggcggcgggcaaatggagcaagccggcgatcgccctggtgatcgacgatatggggctggaccgggtgcgtacggaaaaggtccgcaagctggccggacctttgaccctggcctatctcgcctatgccgacgggctggccggacagatgcgcgggggccgcaaggccggccacgagatcttgatgcatatgccgatggagccccttgacgccaaggtcaatcccggacccggggcgttgaaggtcggtttgtccgatgacgagatcctgacccgcctgcgccgcaatcttgacggcggcgccgaattcgtcggtatcaacaaccacatgggcagccgcttcaccgccgacagccggggcatgaccctggtcatgggcgaattgaaaaagcgcgggctgctgtggctggattcgatgacctcggccaattcggtggggctgaccttggccgaaatggccggcgttccccatatcggtcgcacggtgtttttggataacctcaacgatcaggccgcggtcgcccgccagctcgccaagcttgaggccgccgcccgccagcacggcgtggcggtgggcatcggccacccccgcgacggcaccatcggcgcgctgagcgtctggttgcccgccctggccgccaagggcatcaccctggtgccgatcagcgccctggtgacgaccaaggacgccgagctcgcccatgcgcggcccagcggcaagacagcctcgacatccccgtcaaccgactga

SEQ ID NO: 64621 - protein, 432 aa, Rhodospirillum rubrum
MLDHPEDRGVLDRFAFFVARMAPLTLVLVALATLAVGLGIGFAVGRLAQGDKAAPPAPTALAAIGPLPVAPAAGEAAHQYQPPPLPRPAETAPPLPADVAPPVQTAPAPSETPAGEKGALPAEFRDLLASDGPGFVMEERLPDDAYVHKPQVKPTVKTAALAPVPRFPEGPAESSGLPWKTYGVAAGKWSKPAIALVIDDMGLDRVRTEKVRKLAGPLTLAYLAYADGLAGQMRGGRKAGHEILMHMPMEPLDAKVNPGPGALKVGLSDDEILTRLRRNLDGGAEFVGINNHMGSRFTADSRGMTLVMGELKKRGLLWLDSMTSANSVGLTLAEMAGVPHIGRTVFLDNLNDQAAVARQLAKLEAAARQHGVAVGIGHPRDGTIGALSVWLPALAAKGITLVPISALVTTKDAELAHARPSGKTASTSPSTD

SEQ ID NO: 64622 - DNA, 621 bp, Geobacter metallireducens GS-15
  CDS (1)..(621): transl_table=11
atgcaagaagcccgatcgatcattgacatcggcgtaccggtgacgttctctattatcccggggcttccgaaggtgcgtcaggttgcccaagaggcacaacggcgcgggatcgaggcaatgatccatcttcccatggagccgaaggggtatccggagcgccgtctcgaggagaacggtcttcttctcagtcagagtaacgatgagattgtggtccggatgaacggttatttcaaggaagtcccccaggcggttggcgccaacaatcacatggggtcggcattcaccgaaaacaaagagaagatggcgatagtgctgagagtgctgaaggagaaggggctgttctttgtcgacagcaagacgtcggcaatatctgtgggagagtcgactgcacgagagatgggcttgagaaccgcgtcacgatccgtctttttggacaatattcaggatgttggatatatttcgaagcagatcaggcaggctgcttccatcgctcgcaaaaggggcagcgccattgccatctgccacccccatcccgccactatccaagccttagctgcagaactgccgaagttgcgggatgagggtgtcacccttgtccccgcgtcatccctggtacactga

SEQ ID NO: 64623 - protein, 206 aa, Geobacter metallireducens GS-15
MQEARSIIDIGVPVTFSIIPGLPKVRQVAQEAQRRGIEAMIHLPMEPKGYPERRLEENGLLLSQSNDEIVVRMNGYFKEVPQAVGANNHMGSAFTENKEKMAIVLRVLKEKGLFFVDSKTSAISVGESTAREMGLRTASRSVFLDNIQDVGYISKQIRQAASIARKRGSAIAICHPHPATIQALAAELPKLRDEGVTLVPASSLVH

SEQ ID NO: 64624 - DNA, 987 bp, Desulfuromonas acetoxidans DSM 684
  CDS (1)..(987): transl_table=11
atgactcagaaaaaacgtaaaaaagcgccgacaaaaaagaagacagccgcaaaaaaaaaccataacaaccgcctgtcctggctcagtcacccgttaaccgcgctggcgtttctgctgctattgctgcttgtcggcggctatattattacccgctggtcgctccccgagccagtgccacaacagcagccacagccggtcatcacctatccaatggaagagtatcctgcagaagtagacaagccgcaaccgccccagatcactccgccggatcatgtccccaaggtagccatcatcatggatgatatcggcatcaatcgcgcagccgcgcttgacgccctgcaattgcagatgccgctggccctggctatcattcctggcgaagcccattcgacggagattatgaatctggcttatcagcagcacagcgagattttgatccatatcccgatggaaccagtcagttatcccaaaaacaatccaggccccttggggctctttgttcatcaatctgacagtcagatcaaacggcggattgacgatattattaccgccctcccctatgccattggcggcaataaccatatgggctctgagtttacccagcatgctgacaagttgcgcccggtgctgctggccctgaagcaatcagggctgttctttgtcgacagcctcaccagcaaagattccgtcgcctaccaacaggcgcaaaaactgggtctgagctgtgcattgcgcgatgtttttctcgacaatgtgcgccaggtcgaaccaattctttttcaactcgaccgcttggtcaccttggcccaccgtcacggcagtgctatcgccatctgccacccgtacccgcaaacaattgaggcgttgcagcagtttattgccgacccacaacgttttgatgttgaaatcgttccaatcagccaacttgtccatccacctgtgccaagctctgacaaacacactgccgccccggccgttcatcattaa

SEQ ID NO: 64625 - protein, 328 aa, Desulfuromonas acetoxidans DSM 684
MTQKKRKKAPTKKKTAAKKNHNNRLSWLSHPLTALAFLLLLLLVGGYIITRWSLPEPVPQQQPQPVITYPMEEYPAEVDKPQPPQITPPDHVPKVAIIMDDIGINRAAALDALQLQMPLALAIIPGEAHSTEIMNLAYQQHSEILIHIPMEPVSYPKNNPGPLGLFVHQSDSQIKRRIDDIITALPYAIGGNNHMGSEFTQHADKLRPVLLALKQSGLFFVDSLTSKDSVAYQQAQKLGLSCALRDVFLDNVRQVEPILFQLDRLVTLAHRHGSAIAICHPYPQTIEALQQFIADPQRFDVEIVPISQLVHPPVPSSDKHTAAPAVHH

SEQ ID NO: 64626 - DNA, 756 bp, Shewanella baltica OS155
  CDS (1)..(756): transl_table=11
gtgcgcttactttattccttggccctattggccctaagcatttctcaaagtcatgctgcccagattgcgctcattattgatgacataggttatcgtcataccgatcaagccgtgctggcactgcccagcacagtgacgctctctgtgttgcctcatactcctcttggcgaagaactcgccaatgctggccataaaaagggccacgaaatcatgctgcatctgcctatgcaagcacttaatggtaaggcgttagggctgggtggattgaccaatactatgactgaggcacaaatccgcgccagtgttgtcgatgcaattaacagcgttccttttgctaaaggtgccaataaccacatggggagcttactgactcaactcgatgatcctatgctttggattatggaaaccctcaaacaaaagcatctgtattttatcgatagtatgacaacaagattcactaaggcgggagagacagcggatcagttgggcgtgccgttattaaaacgccaactgtttctagacaatgataccagtgctaaagcactcgaaagacaatttaacttaatgataagtcaggcacatactcaaggtaacctagtggcgattgcccatccttatccagaaaccatgcgcttcttaaaggccaatctacaaagactaaaaaccgaggggattgatctagtacctgcatcaagcttactccccatcggcattgcacacaaaaatggaactaatccagctgtaacactgagatag

SEQ ID NO: 64627 - protein, 251 aa, Shewanella baltica OS155
MRLLYSLALLALSISQSHAAQIALIIDDIGYRHTDQAVLALPSTVTLSVLPHTPLGEELANAGHKKGHEIMLHLPMQALNGKALGLGGLTNTMTEAQIRASVVDAINSVPFAKGANNHMGSLLTQLDDPMLWIMETLKQKHLYFIDSMTTRFTKAGETADQLGVPLLKRQLFLDNDTSAKALERQFNLMISQAHTQGNLVAIAHPYPETMRFLKANLQRLKTEGIDLVPASSLLPIGIAHKNGTNPAVTLR

SEQ ID NO: 64628 - DNA, 546 bp, Shewanella amazonensis SB2B
  CDS (1)..(546): transl_table=11
atgctccacctccccatgcaatcattgaacgccagacctttgggtcagggcgggcttaccagtgatatggatgaacaggaaatcaagcgcaaagtggatgatgccatggtgagaattccctttgccaagggggcaaataaccacatgggtagcatgttgacacagctcgacagccatatgctgtgggtgatggagcggctgaaacacaacaatttgtattttgtcgacagcttaacgaccaggtacagcaaggccggggctaaagccgaacaggtgggagtgcctttacttaaacgccacgtgtttctcgataatgacaccagtaaacgcggcctggaaaagcaattcaaacttatgatggagcaggctcaccagcagggatttgtagtggctatcgctcaccctcatcccgcaacggtaaaattcctcaatgccaacctacaccggctccgggatgaagggataaatctggtacctacgtctgagctgctgccatatcgcctcgcccagaagcaagggactagcccagctgtaagattgaaatag

SEQ ID NO: 64629 - protein, 181 aa, Shewanella amazonensis SB2B
MLHLPMQSLNARPLGQGGLTSDMDEQEIKRKVDDAMVRIPFAKGANNHMGSMLTQLDSHMLWVMERLKHNNLYFVDSLTTRYSKAGAKAEQVGVPLLKRHVFLDNDTSKRGLEKQFKLMMEQAHQQGFVVAIAHPHPATVKFLNANLHRLRDEGINLVPTSELLPYRLAQKQGTSPAVRLK

SEQ ID NO: 64630 - DNA, 1542 bp, Magnetococcus sp. MC-1
  CDS (1)..(1542): transl_table=11
ttgaaccctctccaacatgtcacctctgacactggacaacacggtggggtccgctgggatttcctggcgggcaccctcttggtggttggtctggtgggatttcttgcctacctttgggtagctggtccttgggctcaactggagcctgagtataacctacatgcttgggcagaaggttcgttgcccagggcagagttgcggcatgccgttgccagtgcagcggttggccgcacggatgggcttgagcatggcattgttacagcggctttgcagcttaacgcgcgggcggatagcaagagcccagtgcgtggtggggaggctgagcccattgaaagggtgccaagcaaccccgacacgggccaggccgaagagcggctgggtaaggcggttaagggagagcctacaataaccccgactgaggtgccagagagagcacagccgagccaagccaacactcaaggggtcgccgccgatagccaagttgaagaagaggccgatacggttctaaaggcgacacccagcgaggcgagcagcgagcctgccaccaaggctgcaacggatctggagcaggcaaaacccacccccgcagagctggaagagcaacccagcgtagagatagaagcggatggcgaaaagggtggtctagggccgtctgccacaccagcgacacagccgttggtgcccagcgaaacggccaaagcccatggggatgacaaatctcaccccaaatccgagagcaagtcggacattctctacgaagagcatctctccgaagatttggataagcccgaaccccccgctgtggtagaaaaaaagcccgtacctgccaaacatagccacatggtcaagattgccgtcatcattgatgatcttggctataatggtggggtagggcggggcattgtctccttaccggcagatattaccctagcggtcttgccgggcgggccttactcccgtcagctggtgaatatggcccacaaaaaggggcaggagattatactgcaccaacccatgcagccccagggctatccccgtgttaacccaggccctggcgccctgctagagggtatggatgcggatgaaattgcggaggttttaaaccacaatttagagcgctttcctgaagttgtgggtattaataaccatatgggttctgccttgaccgaaaatcgcgtcatcatgaatgatgtgatgaaggtgttggttaaacgggagctctactttattgacagccgtacctcgccccgttcggtggcgtatcgtgcggcgctctcccatggtgtgccgcgtgccaagcgctcggtttttctggataacaaacgcaccgttgccgccattttaaagcgcttgcaagaggccgaagagatcgccaaacggagcggttcggccatcgccattgggcacccttatggggtgacgttgcaagcactcaagcagtggttgccgggcttacaagctcggggtattgtggtggtgcgggcctccaatctgctggtacccgaatcctcacgaaaatggtttaaaccggccagtccctag

SEQ ID NO: 64631 - protein, 513 aa, Magnetococcus sp. MC-1
MNPLQHVTSDTGQHGGVRWDFLAGTLLVVGLVGFLAYLWVAGPWAQLEPEYNLHAWAEGSLPRAELRHAVASAAVGRTDGLEHGIVTAALQLNARADSKSPVRGGEAEPIERVPSNPDTGQAEERLGKAVKGEPTITPTEVPERAQPSQANTQGVAADSQVEEEADTVLKATPSEASSEPATKAATDLEQAKPTPAELEEQPSVEIEADGEKGGLGPSATPATQPLVPSETAKAHGDDKSHPKSESKSDILYEEHLSEDLDKPEPPAVVEKKPVPAKHSHMVKIAVIIDDLGYNGGVGRGIVSLPADITLAVLPGGPYSRQLVNMAHKKGQEIILHQPMQPQGYPRVNPGPGALLEGMDADEIAEVLNHNLERFPEVVGINNHMGSALTENRVIMNDVMKVLVKRELYFIDSRTSPRSVAYRAALSHGVPRAKRSVFLDNKRTVAAILKRLQEAEEIAKRSGSAIAIGHPYGVTLQALKQWLPGLQARGIVVVRASNLLVPESSRKWFKPASP

SEQ ID NO: 64632 - DNA, 738 bp, Shewanella denitrificans OS-217
  CDS (1)..(738): transl_table=11
atgtttattcagcccgtatttggggcaaaacttgcgatcatcattgacgatataggctatcgtcaaaccgatgaagccgtattgtctctaccaaataccatcactctctctgtattgcctcataccccattaggacaaaagttagctcaagatggccataaaaaaggtcatgaaatcatgctgcatttacccatgcaagcgctcaatggcaaagagttaggcccaggtggcctcaccaatgtcatgacagaagggcaaattaaacagcagctccattctgccgttagcagcataccttttgctaaaggggcgaataatcatatgggcagtttactgactcagatgcaggatccaatgcgctgggtaatggaaagtctgaaacaaaacaacttatactttgtcgatagcatgacaacccgcttcaccaaggccactgccagcgcacagtcattgggggtgcccactttaaagcggcagatatttcttgataatgatatcagtgaggccgcgctgcaacgtcagtttaatttgatcatggttaaggcgaaacaagagcaacaagtcatagccattgcccacccacatccagaaaccatacgctttcttaaagccaatttagctcgacttgagcaagcgggaatagaattagtgcacacctcacacttgttgcctgaaatcgatgcaaaccaattaatggcaagtggaagtaacgctaattcaagcttaatattgaaatag

SEQ ID NO: 64633 - protein, 245 aa, Shewanella denitrificans OS-217
MFIQPVFGAKLAIIIDDIGYRQTDEAVLSLPNTITLSVLPHTPLGQKLAQDGHKKGHEIMLHLPMQALNGKELGPGGLTNVMTEGQIKQQLHSAVSSIPFAKGANNHMGSLLTQMQDPMRWVMESLKQNNLYFVDSMTTRFTKATASAQSLGVPTLKRQIFLDNDISEAALQRQFNLIMVKAKQEQQVIAIAHPHPETIRFLKANLARLEQAGIELVHTSHLLPEIDANQLMASGSNANSSLILK

SEQ ID NO: 64634 - DNA, 717 bp, Shewanella frigidimarina NCIMB 400
  CDS (1)..(717): transl_table=11
atgcccgctacagcgactaaattagccattatcattgacgatattggttatcgcctaactgacgaagcagcattgtcattaccaagctcgatcactttatcggtattacctcatactccgctaggacaaaaacttgcgcaagatggttatcataaaggtcatgaaataatgttacacctgccaatgcaagccttaaatggcaaagcgttaggaccaggaggattaaccaatgacatgaatgaggcacaaattaaacaacagttacaaagcgcgttctctaatatcccatttgctaaaggggcgaataatcatatgggcagtttactgactcaaatggatgaaccgatgttatgggtaatgcagagtttaaaacaacagcagttattttttgtcgatagctttaccactaaatacaccaaagccagcagcaaagctatgcagcttggagtgccatcactgagaagacatatatttttagataacgacattggtgagcgtgcacttgaacggcaattccaacaaatgattacgcagtcgaaacaacaaggtaagctggttgttattgcgcatccttacccagaaaccattcgatttttaaacgctaatttagctcgtttaaacgataatgacatcacattagtaccaacatctcaattatttgatgacgtgaatgtggcagtagcaagtcatcctaatccaactgcaacactgaaatag

SEQ ID NO: 64635 - protein, 238 aa, Shewanella frigidimarina NCIMB 400
MPATATKLAIIIDDIGYRLTDEAALSLPSSITLSVLPHTPLGQKLAQDGYHKGHEIMLHLPMQALNGKALGPGGLTNDMNEAQIKQQLQSAFSNIPFAKGANNHMGSLLTQMDEPMLWVMQSLKQQQLFFVDSFTTKYTKASSKAMQLGVPSLRRHIFLDNDIGERALERQFQQMITQSKQQGKLVVIAHPYPETIRFLNANLARLNDNDITLVPTSQLFDDVNVAVASHPNPTATLK

SEQ ID NO: 64636 - DNA, 1293 bp, Syntrophobacter fumaroxidans MPOB
  CDS (1)..(1293): transl_table=11
atgccgtcaaggtcgggaccggctcgaagaggagcctctaaagggcgtggtgtatcctcgcgcaaaggtggagggcgctcgccccggaaaaccctgaggagcgccgggaaagccacccggggaaagtcattctccgcgggtatgccgcggtcccgttttctcccgctgctgaccgtctggtttctggccgttctggctcttgcgtccctgctctactggaacggcgggaccgaaaaaccgcctccgaagccggccgcaaacaaggcaacctccacggggcaatcctccgtcccgaaacctcgaatggccgatccgcccgccaaacagccggaagccggccccgtcgccggcagtcgaacgccttctccgaaaggcggagaaccgggcgggaaggagcctggaacgcgagagcccgccaggacgaccgcgccggcgggaaaaccgctcatcgagcctccgcccccgtttcacagtcgagacatccccatcgaccaaccgaaggagccggctcgcaaacctgattcgataacgctttcggcgctcagaccgggtgttccccccggcacggcgcctcccccgccttcgcctgtacccgcccccgtggcgaaggtggccatcgtcatcgatgatttcggtcagaacctggaagtcgcaaagaagttcctgagcatccccttgccgctctcgtttgcgatcctgccaaatcagcgccacaccgccgaaatcgctgaactggcacatgcgcaccaccgcgaagtgctgctccacctccccatggagccacagggatatcccaagatggatcccggatcgggggcacttctcacctccatgtccaggggcaggctccggcgcactcttctcgccgccctcgattccactccttattttatcggagtgaacaatcacatgggctccaagttcaccgagaacaccccttccatgagagtcgtcatgtcggagctccggcacaggaagctcttctttctggacagcgccaccaccggagacagcgtcggtttcgcgctggcccgggagtacggcatcccggccagaaaacgcgacatttttctcgaccacaccctgacggatgaggccgtgcagtcccaggtcgatcagctcatcaggaaggcgaagatcgaaggaaccgctctggccatcggccatccacacgaggtgaccttgaaggcactcatcgaaggggtggaccgttttaaggaggagaacgtcgccgtggttccttcgagcgaattgatgatcgtcccctcgcgccgggttggaggaagggattga

SEQ ID NO: 64637 - protein, 430 aa, Syntrophobacter fumaroxidans MPOB
MPSRSGPARRGASKGRGVSSRKGGGRSPRKTLRSAGKATRGKSFSAGMPRSRFLPLLTVWFLAVLALASLLYWNGGTEKPPPKPAANKATSTGQSSVPKPRMADPPAKQPEAGPVAGSRTPSPKGGEPGGKEPGTREPARTTAPAGKPLIEPPPPFHSRDIPIDQPKEPARKPDSITLSALRPGVPPGTAPPPPSPVPAPVAKVAIVIDDFGQNLEVAKKFLSIPLPLSFAILPNQRHTAEIAELAHAHHREVLLHLPMEPQGYPKMDPGSGALLTSMSRGRLRRTLLAALDSTPYFIGVNNHMGSKFTENTPSMRVVMSELRHRKLFFLDSATTGDSVGFALAREYGIPARKRDIFLDHTLTDEAVQSQVDQLIRKAKIEGTALAIGHPHEVTLKALIEGVDRFKEENVAVVPSSELMIVPSRRVGGRD

SEQ ID NO: 64638 - DNA, 1029 bp, Pelobacter propionicus DSM 2379
  CDS (1)..(1029): transl_table=11
gtgtctaaaatcagaccaaaccgtaagaaccagagccggggcggcggcccaacctatgccgccctggccatcctggccgttgtcattctcgccgtcatcggttacctgctgctcaccccgcgcaagcgcccgttccagccgctgtccccgccggtggccgggaaagagtcccggcccaaggtgcaccgtcccggtcagcgggcggacctgccggcgcctccccgggttacaccggaaacgctccccgcgacaccgccgtccgtgcctcccgaaacgcctgtaaaaccgcccctgaaaccggagtatccggcggaaccgccgtcagaggtggagaaggcgcccctgcccgccgtggtgccggggggcaaggggaggctggccatcattatcgacgatatgggggccggcatgcgggaagcccgctcccttgccgccatcggcgtgccgctgacgtttgcgatcatccccggtttgcgcagttgtcgtgaggtggccgcctttgccgcgggaaacggcattgaaaccatgatccatctgccgatgcagtccaaggggtggccgcagcagcggctggaatccaacggcctcttggttgccatggaggaagccgacatcagggaacggatggaaggttttgccagggatgttccccatgccgtgggagccaacaaccatatgggctcggagttcaccgagcatgaaccgcagatgtccacggtgctgggggtgttgaaggggagggggctcttcttcatcgacagtgtcaccaccccccggagcgtggggcagcgtctggcgcgggagatgggagtgcgatcggggcggcgcagcgtgttcctggataacgagcagaacggtgcctacataagggggcagctgaaccaagcggtgcgtcaggccaggaaaaacggcggcgccatagccatctgccatccccatccggctacaattgcaaccctggcagctgcgctcccgacattacagcagcagggggtcaccctggtgcccgcctcacggctcgtgagatga

SEQ ID NO: 64639 - protein, 342 aa, Pelobacter propionicus DSM 2379
MSKIRPNRKNQSRGGGPTYAALAILAVVILAVIGYLLLTPRKRPFQPLSPPVAGKESRPKVHRPGQRADLPAPPRVTPETLPATPPSVPPETPVKPPLKPEYPAEPPSEVEKAPLPAVVPGGKGRLAIIIDDMGAGMREARSLAAIGVPLTFAIIPGLRSCREVAAFAAGNGIETMIHLPMQSKGWPQQRLESNGLLVAMEEADIRERMEGFARDVPHAVGANNHMGSEFTEHEPQMSTVLGVLKGRGLFFIDSVTTPRSVGQRLAREMGVRSGRRSVFLDNEQNGAYIRGQLNQAVRQARKNGGAIAICHPHPATIATLAAALPTLQQQGVTLVPASRLVR

SEQ ID NO: 64640 - DNA, 885 bp, Actinobacillus succinogenes 130Z
  CDS (1)..(885): transl_table=11
atgagccgtttattcccgcttccatccgtcaaaagtgcggtcaaaaaaattaccgttttttcgaccgcacttttctccttgtctgtttcggcacaaccagcccgatttgttgcggctcaaccgcacaaacttgccatcgtaatcgatgatataggttatcatccgaaagaagacgcacaaattctcgctatgccgaaagcggtttcggtggcgattattcccgttgcgccttatgcggcacagcgcaaccgacaagcgtggcagcaaggacgggatattttaatccatatgccgatgcagcccgtgaataatatgaaaatcgaagaaggcggtttatcggtcggcatgtcgcaacaggaagtggaacaacgggttcaacgcgccaaacagatcgtcagccatgctatcggcatgaacaatcatatgggcagcgccgctaccgccgatcccacattaatgacccgtttgatgcgtattttgcagcgacaggggctgttctttttggacagtcgaaccatcggaaaaagcgtcgccggcaaaatagcgaagctggagggcgtgagtgtactggaacgtcatgtttttctggatgacagtgataatttcggcgatgttcagcgtcaattccaacgggcattacaacatgcccgtcaacacggcgtagcgattgttatcggccacccgcgtaaaaataccatcgcggtactgcaggcggaattacggcatttaccggcggatatccaattagtcggtatgggacagctgtggcgcaacgaaaaagtcacgccgccgaaaccgtttattttactgttcagcgatttaccggcgcctacttcgcaaccgccgtttaaatacgaacctctgctgcgcggcgtgccgcaataa

SEQ ID NO: 64641 - protein, 294 aa, Actinobacillus succinogenes 130Z
MSRLFPLPSVKSAVKKITVFSTALFSLSVSAQPARFVAAQPHKLAIVIDDIGYHPKEDAQILAMPKAVSVAIIPVAPYAAQRNRQAWQQGRDILIHMPMQPVNNMKIEEGGLSVGMSQQEVEQRVQRAKQIVSHAIGMNNHMGSAATADPTLMTRLMRILQRQGLFFLDSRTIGKSVAGKIAKLEGVSVLERHVFLDDSDNFGDVQRQFQRALQHARQHGVAIVIGHPRKNTIAVLQAELRHLPADIQLVGMGQLWRNEKVTPPKPFILLFSDLPAPTSQPPFKYEPLLRGVPQ

SEQ ID NO: 64642 - DNA, 771 bp, Bacillus thuringiensis serovar israelensis ATCC 35646
  CDS (1)..(771): transl_table=11
atgcgaaaatatacgattacattgttcatcattgttttgtttttaccgtccttcttatttcctattcaagcaaatgctcatacaaataaagttgctattgtcattgatgatttcggcaataatatgaaggggactaatcaaatgttatcacttcccattccgctcactgttgctgttatgccttttcttccttccacaaaagaagatgcaatagctgcccataaaaaaggccatgaagttattatacatatgccaatggaacctattaaaggtaaaaaagaatggcttggaccgaaagcaattacaaccgatttaagcgatgaagaaataaacaaccgacttgaacaagcgattcaagaagttccgcatgcaattggaatgaacaatcatatggggtcaaaagtaacagcggatgaaagaattgttcgccttatacttgctgcttgtaaaaaacacggtttattttacttagatagtaaaactaatcctaatagtgtcgtcccaaaaatcggaaaagaattaggagttcctattattgaaaaccaactattttttgatgatgtgtatacagcaggacatatttcaaaacaagcccaattactcatcaaaaaaattcaagaaaaacctattatggtagctatcgggcatgtgggccccccaggtgaaattacatcacgagttattgaaacttctatccctaaaattcgtgagcatgcagactttatttttttatctgatctagcattatccccgcctcctgtttcaaaataa

SEQ ID NO: 64643 - protein, 256 aa, Bacillus thuringiensis serovar israelensis ATCC 35646
MRKYTITLFIIVLFLPSFLFPIQANAHTNKVAIVIDDFGNNMKGTNQMLSLPIPLTVAVMPFLPSTKEDAIAAHKKGHEVIIHMPMEPIKGKKEWLGPKAITTDLSDEEINNRLEQAIQEVPHAIGMNNHMGSKVTADERIVRLILAACKKHGLFYLDSKTNPNSVVPKIGKELGVPIIENQLFFDDVYTAGHISKQAQLLIKKIQEKPIMVAIGHVGPPGEITSRVIETSIPKIREHADFIFLSDLALSPPPVSK

SEQ ID NO: 64644 - DNA, 948 bp, Pseudoalteromonas atlantica T6c
  CDS (1)..(948): transl_table=11
atggccacaatcaagctttactgcatcaggccggtgataccgtggccgctggtgagcccattgcgcttgttggtcaaagtggcgggcaaacctcccctaatttatattttgaaattcgctacaagggcgaccctgttaaccccacgcaatggattaagctttaatgggcgctctggtcatatgttgaacttttcattccgcctctggtgcatatcgctcttgctgactttgctcccgacttcggcggcgctaagcgcgcagatcgctattatcattgatgacgttggtaacaacagtcatcgagatgcagcagccttggggttacccattaacgttgctatttcgattttgcctcacaagcatctaagccaaaaatacgccctgatggcgcacgagcagcaccgagaattcctactgcacatgccgatggagtcgatggcgggtatcaagcaagagtcaaacgtgttgttggccagtatgagcgataagcggattgtgcaaaccttaaatgatgcgtttgccagtgtgcccaatgcactgggattgaataatcatatggggagtcgtttaacacagttagaaaccccgatgcgcaccaccatgagctacttacatcgtcacgggctcatttttgtcgacagtcgcacaacggcattgacccgagcagaagctattgccaagcaaacgaaggtgccagcactgcggcgacatgtattcttggataacgacttatccgaagcaaaaatagagcgccagtttaatatattggtcaaaagagcgcgtaaatacgggcgctctctggcgattggtcaccctcatatgcagacgattgcctacctgaaaaaaaggctaccaacgttagcccaagacgatgtacagttaattcccctcagtgctatgttgacgccccaagtggataacgctaaaccgctgcatataggtgattag

SEQ ID NO: 64645 - protein, 315 aa, Pseudoalteromonas atlantica T6c
MATIKLYCIRPVIPWPLVSPLRLLVKVAGKPPLIYILKFATRATLLTPRNGLSFNGRSGHMLNFSFRLWCISLLLTLLPTSAALSAQIAIIIDDVGNNSHRDAAALGLPINVAISILPHKHLSQKYALMAHEQHREFLLHMPMESMAGIKQESNVLLASMSDKRIVQTLNDAFASVPNALGLNNHMGSRLTQLETPMRTTMSYLHRHGLIFVDSRTTALTRAEAIAKQTKVPALRRHVFLDNDLSEAKIERQFNILVKRARKYGRSLAIGHPHMQTIAYLKKRLPTLAQDDVQLIPLSAMLTPQVDNAKPLHIGD

SEQ ID NO: 64646 - DNA, 861 bp, Alkaliphilus metalliredigenes QYMF
  CDS (1)..(861): transl_table=11
atgaagaaaaaaggctatattttttacatttcaaaacaaaatttaaattttatacttgtaacctgtcttgtgctaggtttttttactgggggaatgaggattcaaagaaatgagcaaaatcccttgtggatgagtagagaggcaagtgtaattgaggagactgtagcagagacaaaggggatcgtcgcgattgtcattgatgattttggcaataatggtagcggcactgatgaaatgatgaacattatccaaccccttaccttcgcagtcattccctttttaccatactcacaagaagaagctaaaagagctaataaggctggacatgaagtgattgtacatattcctatggaacctaaaaaaggaaatccaaagtggttaggagacaggggcattacatcgaatctaacttcagaggaggtacatagcattgtcttagaagccatagaggatgttcagtatgccgtaggagcaaacaatcatatggggtcaaaaataacagaggacaagaggattatggaagcagtcatgcaagtgttaaaggccaatgatatgtatatgattgacagcaagacaagtcagacatccatagtcaaagaagttgcagatcaatataatgttccggttttagaaagagctatatttttagataatgagaaaaatgtagaggcaattaagagacagattgaaaaattagctgttgtggcattagagagtggaagtgctgtggcaattggtcatgtaggacctgagggagggagaataacagccgaggctatcaagcagatgctcccttacttacaagaaaaaggaatcgagattatgccagcttccaaattactaaataaacccagacaatag

SEQ ID NO: 64647 - protein, 286 aa, Alkaliphilus metalliredigenes QYMF
MKKKGYIFYISKQNLNFILVTCLVLGFFTGGMRIQRNEQNPLWMSREASVIEETVAETKGIVAIVIDDFGNNGSGTDEMMNIIQPLTFAVIPFLPYSQEEAKRANKAGHEVIVHIPMEPKKGNPKWLGDRGITSNLTSEEVHSIVLEAIEDVQYAVGANNHMGSKITEDKRIMEAVMQVLKANDMYMIDSKTSQTSIVKEVADQYNVPVLERAIFLDNEKNVEAIKRQIEKLAVVALESGSAVAIGHVGPEGGRITAEAIKQMLPYLQEKGIEIMPASKLLNKPRQ

SEQ ID NO: 64648 - DNA, 744 bp, Shewanella putrefaciens CN-32
  CDS (1)..(744): transl_table=11
gtgcgtttattttatatctttattgtcttcatcttatatgttgcgccatcttacgcgactaaaattgcactgatcatcgatgacataggctatcgtcaaacagatgaagcagtattgtcactgcctcacacagtaactctttcagtgttacctcatacgcctctaggtgaaaatctcgcaaaagtgggtcaccgtaaagggcatgaaataatgctgcatttaccaatgcaagctattaacggtaaagcattaggtcccggaggcttaaccaagggtatggatgaagcagagatccgcgctaacgtatcgagtgcgattgcgaatatcccttttgctaagggtgcaaataaccatatggggagtttattaacacaactcgattcacacatgctttgggttatggaatgcctaaagcagaatcaactgtattttgtggatagtatgactacaccattttctaaagcgggagagaaagcagatcaattaggtatcccaagtttgaaacgccaactctttctcgataacaacgtcagtaaaaaagcccttgaaaagcaatttaatctcatgattagcaatgcacacatgcaaggaagcctagtggtaatagctcatccgtatcctgaaaccattcgcttcttacaagcgaatttaccactacttgaagcagaaggaatagatctggtacccgtatcagatttattgcctattgatatagctcaggaaaatagactaatccaactgtaa

SEQ ID NO: 64649 - protein, 247 aa, Shewanella putrefaciens CN-32
MRLFYIFIVFILYVAPSYATKIALIIDDIGYRQTDEAVLSLPHTVTLSVLPHTPLGENLAKVGHRKGHEIMLHLPMQAINGKALGPGGLTKGMDEAEIRANVSSAIANIPFAKGANNHMGSLLTQLDSHMLWVMECLKQNQLYFVDSMTTPFSKAGEKADQLGIPSLKRQLFLDNNVSKKALEKQFNLMISNAHMQGSLVVIAHPYPETIRFLQANLPLLEAEGIDLVPVSDLLPIDIAQENRLIQL

SEQ ID NO: 64650 - DNA, 819 bp, Marinobacter aquaeolei VT8
  CDS (1)..(819): transl_table=11
gtgactttgcgttctaccctcgcgctgctggcgcttctggccatcagccctgtcgctgcgtttgcgtcagggccgggtgaaccccaacagcccaccattgccatcattattgatgacatggggcacaaccggcacgagggcgagcggctggcaaggcttgaccagcccctgacactggcctttctgccttaccggcgccatacagttcccttggcgaagctggcccacgcccaatccaaggaaatcatgttgcacgccccgatggccaatacccgcaacttcggcctcggcccgggcggcctgaccccggacatggacgaactggccatcgccaccactctgcgccgggcactgcagtccattccctttgtcagcggtgtgaacaatcacatgggcagcctgctcacccagcaactggaacccatggactgggtaatgaaagagctggaccgctacccggtgtatttcgtcgacagccgcaccattgccaattccatcgccggcagtgtggccgatgcctacaacatcccgagcctgacgcgcgatgtgtttctcgatcacgaacagacggaagagtttgtcgacaaacagttcaaactgctgattcagaccgccagggaaaaaggcacggccatcggtatcggacacccgcacaaggtcaccgtggattatctggagaagcacctgccgatgctggatgaacagggcattgccatcgccacggtcagtggtctctgggccatgcgtaacggtaatcgggagatgtttgcggaaggtgagaagcaggccattcggcctgcctatgcacgcagcaattaa

SEQ ID NO: 64651 - protein, 272 aa, Marinobacter aquaeolei VT8
MTLRSTLALLALLAISPVAAFASGPGEPQQPTIAIIIDDMGHNRHEGERLARLDQPLTLAFLPYRRHTVPLAKLAHAQSKEIMLHAPMANTRNFGLGPGGLTPDMDELAIATTLRRALQSIPFVSGVNNHMGSLLTQQLEPMDWVMKELDRYPVYFVDSRTIANSIAGSVADAYNIPSLTRDVFLDHEQTEEFVDKQFKLLIQTAREKGTAIGIGHPHKVTVDYLEKHLPMLDEQGIAIATVSGLWAMRNGNREMFAEGEKQAIRPAYARSN

SEQ ID NO: 64652 - DNA, 1029 bp, Yersinia bercovieri ATCC 43970
  CDS (1)..(1029)
ttgcgctatttcaacgcacgcctatttatcatcgtcagcaccctcgtgatcgccaacgccgcacaggcgggcaaactttcaatcgtgattgatgactttggttatcgcccccagaatgaaaacaaggtgttgcagatgccgctgcctatttcagtcgctatcctgcctaatgccccctacgcccgagagatggctgtcaaagcccataatcaagggcgtgaaattctgattcacctgcccatggcccccctgagcaagcagccattggagcgcgatacattgcagccatcaatgagtagcgaagagatccagcgcatcatccgccaggcggtgaataatgtcccttatgcgaaggggatgaataaccatatgggcagcgcgatgacctccagtttgccgggtatgcagagagtgatgcaggcgctggaacactatcagctctatttcctcgacagtgtgaccatcggcaatagtcaagccagcagagccgccgaaggcactggcgtcaaagtgattaagcgcaaagtctttctggatgactcacaaaatgaagccgcgatccgccagcagtttaaccgcgcagtagaactggcgcgccgaaatggctccgccattgctatcgggcatccccatcccgctaccattaaagtgctgcaacagatgttgcctcagttgccgtctgacattgtattggtcaaacctagcgcactgctgaatgaaccggtaaacaataatagtggcagtagcacggtctcaccgggcaagtcaaaaccgcgcgaaccggcgaaaaatgatcgcctgaaagccatcaagcagtgcagtgcgaaagccagctatgtgcctgagaaaatctacgccggcaggatgtttagcgtcattggcgagagcttgatgcaaagtccggctgtaagctttattcagcgctattttacctcgtcagcacccatcgcgccggttgatgaaccaaaagtagatgcaccaaaaatagatattccaaaagtggagaagccaaaaacggataatccgtaa

SEQ ID NO: 64653 - protein, 342 aa, Yersinia bercovieri ATCC 43970
MRYFNARLFIIVSTLVIANAAQAGKLSIVIDDFGYRPQNENKVLQMPLPISVAILPNAPYAREMAVKAHNQGREILIHLPMAPLSKQPLERDTLQPSMSSEEIQRIIRQAVNNVPYAKGMNNHMGSAMTSSLPGMQRVMQALEHYQLYFLDSVTIGNSQASRAAEGTGVKVIKRKVFLDDSQNEAAIRQQFNRAVELARRNGSAIAIGHPHPATIKVLQQMLPQLPSDIVLVKPSALLNEPVNNNSGSSTVSPGKSKPREPAKNDRLKAIKQCSAKASYVPEKIYAGRMFSVIGESLMQSPAVSFIQRYFTSSAPIAPVDEPKVDAPKIDIPKVEKPKTDNP

SEQ ID NO: 64654 - DNA, 1059 bp, Yersinia mollaretii ATCC 43969
  CDS (1)..(1059)
ttgcgctatttcaacacacgccgatttatcatcgtaagcaccctactgatcgccaacgccgcacaggcgggcaaactttccatcgttattgatgactttggttatcgccctcagaatgaaaacaaggtgttacagatgccgctacctatttcggtcgccattctgcctaatgccccttatgcccgagagatggcggtcaaagcccataatcagggccgtgaaatcctgattcatctgccaatggcccccctaagcaagcagccgttggagcgcgatacattgcagccgtcaatgagtagcgaagagattcagcgcattattcgccaggcggtcagtaacgtcccttatgcaaaaggcatgaataaccatatgggtagcgcgatgacctccagtttgccgggtatgcagaaagtgatgcaggcgctggagcactatcagctctatttcctcgacagcgtgaccatcggcaatagccaagcgagcagagcggctgaagggactggcgtcaaagtgattaagcgtaaagtctttttggatgactcacaaaatgaagccgcgatccgccagcagtttaaccgcgcagtcgaactggcgcgtcgaaatggctctgccattgctatcgggcacccgcatccggccaccattaaagtgctgcaacagatgctgcctcagttgccgtctgacatcgtattagtccggccgagtgcgctgctcaatgagccacagcaaaataacagtggcgcagtctcgccgggtaaatcaaagccacgtgaaccggttcgcctgaaagccatcaagcaatgtcatgcaaaagccagttatacaccagagaaaatctatgctggcaggatgtttagcgttattggcgagagtctgatggaaagcccggcgatgaactttattcagcgctattttacgccgtcagcacctgtagagccgattgataaactgaatattggtgagccgattattgataaatcgactattgataaaccgaaaatcgatgaactgaaaatagaggctccaacagcggaaaaatcaaaagtggataatccataa

SEQ ID NO: 64655 - protein, 352 aa, Yersinia mollaretii ATCC 43969
MRYFNTRRFIIVSTLLIANAAQAGKLSIVIDDFGYRPQNENKVLQMPLPISVAILPNAPYAREMAVKAHNQGREILIHLPMAPLSKQPLERDTLQPSMSSEEIQRIIRQAVSNVPYAKGMNNHMGSAMTSSLPGMQKVMQALEHYQLYFLDSVTIGNSQASRAAEGTGVKVIKRKVFLDDSQNEAAIRQQFNRAVELARRNGSAIAIGHPHPATIKVLQQMLPQLPSDIVLVRPSALLNEPQQNNSGAVSPGKSKPREPVRLKAIKQCHAKASYTPEKIYAGRMFSVIGESLMESPAMNFIQRYFTPSAPVEPIDKLNIGEPIIDKSTIDKPKIDELKIEAPTAEKSKVDNP

SEQ ID NO: 64656 - DNA, 1014 bp, Yersinia frederiksenii ATCC 33641
  CDS (1)..(1014)
ttgcgttatttcaacacacgtcggtttatcatagtaagcaccctactcatcgccaatgccgcacaggcgggcaaactttcaattgttattgatgactttggttatcgcccgcagaatgaaaataaggtattacagatgccgctaccgatttcggtagcaatcctgcctaatgccccttacgccaaagagatggcggtcaaagctcataatcaagggcgtgaaatcctgattcacctgccgatggcgccgctgagcaaacagccattagagcgcgatactttacagccatccatgagcagcgaagaaatccagcgtatcattcgtcaggcggtgaataatgttccctacgcgaccggtatgaataatcatatgggtagcgcaatgacctccagcttgcctggtatgcagaaagttatgcagacgctggagcattatcagctctatttcctcgacagcgtgaccatcggtaatagtcaggccagcaaggcggccgaagggactggcgtcaaagtaattaagcgaaaagtctttttggatgactcacaaaacgaagcggcgattcgccagcaatttaaccgcgcagtagatttggcgcgtcgcaatggctccgcgattgctatcggccacccacatccagccactattaaagtgctacaacaaatgttgccccagttgcctgctgatatcgtattagtcaggccaagtgcactgcttaatgagccggtaagcaataataatggtagcagcggcgtctcaccaggcaagacaaaaccgcactttccagcgaaaggtgaacgtctgaaagctatcaagcagtgccatgcaaaagccagctatgtaccagaaaaggtctatgccgataggatgtttattgttattggtgagagcctgatacagagcccggcggtagcatttgtgcagcggtattggcaacaatatttcccgccagcaccggtaatgcctgaaagtgaaaaaacagagccaccggcaagcaaatcaacaactcaaaaatag

SEQ ID NO: 64657 - protein, 337 aa, Yersinia frederiksenii ATCC 33641
MRYFNTRRFIIVSTLLIANAAQAGKLSIVIDDFGYRPQNENKVLQMPLPISVAILPNAPYAKEMAVKAHNQGREILIHLPMAPLSKQPLERDTLQPSMSSEEIQRIIRQAVNNVPYATGMNNHMGSAMTSSLPGMQKVMQTLEHYQLYFLDSVTIGNSQASKAAEGTGVKVIKRKVFLDDSQNEAAIRQQFNRAVDLARRNGSAIAIGHPHPATIKVLQQMLPQLPADIVLVRPSALLNEPVSNNNGSSGVSPGKTKPHFPAKGERLKAIKQCHAKASYVPEKVYADRMFIVIGESLIQSPAVAFVQRYWQQYFPPAPVMPESEKTEPPASKSTTQK

SEQ ID NO: 64658 - DNA, 756 bp, Shewanella sp. PV-4
  CDS (1)..(756): transl_table=11
gtgcgcttattactcttattagctgtcttatttaccacaccacactgcttcgccgcccaggtctccatcatcattgacgacataggttatcgtcagactgacgaggcggtgttggcattgccaagcgacatcaccctctccgtattgccccatacccctctgggcgaaaggcttgccgccatcgcccacgacaagggccacgagatcatgttgcacctgcccatgcaggcattaaatggcaaggagatgggccctggcggactgaccaatcagatgagcgaacaggctctcaagcgggcggtcgatgacgcctttaagagtgtcccctacgccaaaggtgtcaacaaccatatggggagtctgctcacacaactagacgcgcccatgacctggctaatggagagcctgaagcagcaagacaactactttgtcgacagcatgaccaccaggtacagcaaagccagcgacgcagccaacaggctggggattccgctattgagaagacaactctttctggataacgatgtatcgccgcaggggcttgagagacaatttaaccagctgatccagctggcaaacaaggaggggcaacttatagtgatcgcccacccctatcccgagaccatcagcttcttaaaggcgaatctatccagactctcggacgaaggcatcgccttggtaaatacatccaggctcttgccctatcgcctcgcacagaaggaacccgcggccagcgacaaggcgcatttaagatag

SEQ ID NO: 64659 - protein, 251 aa, Shewanella sp. PV-4
MRLLLLLAVLFTTPHCFAAQVSIIIDDIGYRQTDEAVLALPSDITLSVLPHTPLGERLAAIAHDKGHEIMLHLPMQALNGKEMGPGGLTNQMSEQALKRAVDDAFKSVPYAKGVNNHMGSLLTQLDAPMTWLMESLKQQDNYFVDSMTTRYSKASDAANRLGIPLLRRQLFLDNDVSPQGLERQFNQLIQLANKEGQLIVIAHPYPETISFLKANLSRLSDEGIALVNTSRLLPYRLAQKEPAASDKAHLR

SEQ ID NO: 64660 - DNA, 756 bp, Shewanella sp. ANA-3
  CDS (1)..(756): transl_table=11
gtgcgtctattttacatattggccctttgggctctgagcattgcgccaagcaatgcggcccaaatcgccttgatcatcgatgatattggctatcgccacaccgacgaagccgtgctgtcactcccaagcgcagtcaccttgtcggtactgccacacacgccgctcagtaataaattagccaaagccgcgcacgccaaaggccacgagattatgctgcacttacccatgcaggcactcaatggcaaagccttaggtgttggtggtttaactaataatatgagcgaagcacagatacgtagcagtgtacttgctgccatcgccagtgtgccctttgctaaaggcgccaacaatcatatgggaagcctactaacgcagctcgatgatcctatgctgtgggtgatggacacgttaaagcagaaacagctctactttgtcgatagtatgacaaccaagttcactaaggcgggagataaggcagattcgctcggcgtgccactgctacgacgcaaactctttctcgataatgacgtcagtgccgcagcattggaaaaacagtttaatttgatgataagtcaggctcactcgcaaggcagtctggtagctatcgcccatccttaccccgaaaccattcacttcttaaaaacgaacttagcgcgcctaaaggcggaagggattgagctagtgccgacgtcaagcttgttgcccatcgaactagcccatgagaaaggcactaatccaactgtaagacagaaatag

SEQ ID NO: 64661 - protein, 251 aa, Shewanella sp. ANA-3
MRLFYILALWALSIAPSNAAQIALIIDDIGYRHTDEAVLSLPSAVTLSVLPHTPLSNKLAKAAHAKGHEIMLHLPMQALNGKALGVGGLTNNMSEAQIRSSVLAAIASVPFAKGANNHMGSLLTQLDDPMLWVMDTLKQKQLYFVDSMTTKFTKAGDKADSLGVPLLRRKLFLDNDVSAAALEKQFNLMISQAHSQGSLVAIAHPYPETIHFLKTNLARLKAEGIELVPTSSLLPIELAHEKGTNPTVRQK

SEQ ID NO: 64662 - DNA, 756 bp, Shewanella sp. MR-7
  CDS (1)..(756): transl_table=11
gtgcgtctattttacatattggccctttgggctctgagcattgcgccaagtaatgcggcccaaatcgccttgatcatcgatgatattggctatcgccacaccgacgaagccgtgctgtcactcccaagcgcagtcaccttgtcggtactgccacatacgccgcttagcaataaattggccaaagcagcgcacgccaaagggcacgagattatgctgcacttacccatgcaggcactcaatggtaaagccttaggtgttggtggtttaacgaataatatgagcgaaacacagatacgtagcagtgtacttgcagccatcgccagtgtgccctttgctaaaggcgccaacaatcatatgggaagcctgctaacgcagctcgatgatcctatgttgtgggtgatggaaacgctaaagcagaagcagctctactttgtcgatagtatgaccaccaagttcactaaggcgggagataaggcggattcgctcggcgtgccactgctacgacgccaactctttctcgataatgacgtcagtgccgcagcattggaaaaacagtttaatttgatgataagtcaggctcactcgcaaggcagtctagttgctatcgcccatccttacccagaaaccattcacttcttaaaaacaaacttagcgcgcctaaaggcggaagggattgagctagtgccgacgtcaagcttgttgcccatcgaactagcccatgagaaagggactaatccaactgtaagacagagatag

SEQ ID NO: 64663 - protein, 251 aa, Shewanella sp. MR-7
MRLFYILALWALSIAPSNAAQIALIIDDIGYRHTDEAVLSLPSAVTLSVLPHTPLSNKLAKAAHAKGHEIMLHLPMQALNGKALGVGGLTNNMSETQIRSSVLAAIASVPFAKGANNHMGSLLTQLDDPMLWVMETLKQKQLYFVDSMTTKFTKAGDKADSLGVPLLRRQLFLDNDVSAAALEKQFNLMISQAHSQGSLVAIAHPYPETIHFLKTNLARLKAEGIELVPTSSLLPIELAHEKGTNPTVRQR

SEQ ID NO: 64664 - DNA, 795 bp, Alkalilimnicola ehrlichei MLHE-1
  CDS (1)..(795): transl_table=11
atggctgcccggacgcgccgagcccctgccggccacctgatcctcctgctctgcggcctgggggccctgctgctgggccaggcgcaggcccggtcggccgatgagccggtgcgggtggcggtggtgatcgacgatctgggggatcacctggccagcggccaacgcacggttgatctgcccgggccggtgacctgttccgttctaccccacaccccccacgcccggcgcctggccgaggcctgccaccgcagcggcaaggaggtcatgctgcacatgccgatgcaggcgaaaaacggcgccgatcgagggccgggcggggtggacatccacatggaccggacggcggtggaggcggcggtccgcaaagacctggacgcggtgccccatgcccgcggggtcaataaccacatgggcagtctctatacacgccacccgggcaacctgcgttgggtcatggacgcactgcggggggagggcgactattacttcgtggacagccggaccacggcacgcagtgtggcggaacaggtggcgcgggaggccggggtgcccgccacccggcggcatgtcttcctggaccacgaccgtgatccggagatgatccgccaccacctcgaacggctggtgcggcacgcgcgccggcatggctacgggctggccatcggccacccctacccggagaccctggcggtgctggaggaggtactgccggagtgggcccgggccggtatcaaactggtgccggcctcgcggctggtggagttgtatggtcaggaggaggagaacgtgccatga

SEQ ID NO: 64665 - protein, 264 aa, Alkalilimnicola ehrlichei MLHE-1
MAARTRRAPAGHLILLLCGLGALLLGQAQARSADEPVRVAVVIDDLGDHLASGQRTVDLPGPVTCSVLPHTPHARRLAEACHRSGKEVMLHMPMQAKNGADRGPGGVDIHMDRTAVEAAVRKDLDAVPHARGVNNHMGSLYTRHPGNLRWVMDALRGEGDYYFVDSRTTARSVAEQVAREAGVPATRRHVFLDHDRDPEMIRHHLERLVRHARRHGYGLAIGHPYPETLAVLEEVLPEWARAGIKLVPASRLVELYGQEEENVP

SEQ ID NO: 64666 - DNA, 756 bp, Shewanella sp. MR-4
  CDS (1)..(756): transl_table=11
gtgcgtttattttatatattggccctttgggccctgtgcattgcgtcaagcaatgcagcccaaatcgccttgatcatcgatgatattggctatcgccacaccgacgaagccgtgctgtcactcccaagcgcagtcaccttgtcggtactgccacacacgccgctcagcaataaattagccaaagccgcgcacgccaagggccacgagattatgctgcacttacccatgcaggcactcaatggtaaagccttaggtgttggtggtttaacgaataatatgagcgaagcacagatacgtagcagtgtacttgctgccatcgccagtgtgccctttgctaaaggcgccaacaatcatatgggaagcctactaacgcagctcgatgatcctatgttgtgggtgatggaaacgctaaagcagaagcagctctactttgtcgacagtatgacaaccaagttcactaaggcgggagataaggcagattcgctcagcgtgccactgctacgacgtcaactctttctcgataatgacgtcagtgccgcagcattggaaaaacagtttaatttgatgataagtcaggctcactcgcaaggcagtttagtggctatcgcccatccttaccccgaaaccattcacttcttaaaaacaaacttagcgcgcctaaaggcggaagggattgagctagtgccgacgtcaagcttgttgcccatcgaactagcccatgagaaaggcactaatccaactgtaagacagaaatag

SEQ ID NO: 64667 - protein, 251 aa, Shewanella sp. MR-4
MRLFYILALWALCIASSNAAQIALIIDDIGYRHTDEAVLSLPSAVTLSVLPHTPLSNKLAKAAHAKGHEIMLHLPMQALNGKALGVGGLTNNMSEAQIRSSVLAAIASVPFAKGANNHMGSLLTQLDDPMLWVMETLKQKQLYFVDSMTTKFTKAGDKADSLSVPLLRRQLFLDNDVSAAALEKQFNLMISQAHSQGSLVAIAHPYPETIHFLKTNLARLKAEGIELVPTSSLLPIELAHEKGTNPTVRQK

SEQ ID NO: 64668 - DNA, 843 bp, Haemophilus influenzae
  CDS (1)..(843): transl_table=11
atgaatattctgataaaaagtgcggtaaaaaatttcattgttttttctaccgcactttatgcctctttttcttttgctcaaagtaaacttgctattgtgattgatgatgtaggctatcatctcaaagaagatgcggcaatttttgcgatgccacgtgaaatttccgtagcaattattcctgctgcgccctatgctcgagcacgtaatcaagaagcaaaatctcaaggtagagatattttaatccatatgccgatgcaaccagtaagtgcagtgaaaatagaagacggtgggctgcatttaggaatgtctgcagcacaagtaaatgatcgcgttaatacggctaaaaatattgtgcgtgatgccatcggtatgaacaatcatatggggagtgcagcaacggcagatccccaattaatgacttatttaatgaccgcacttcaagaaaaacatttattctttttagatagtcgaacaataggaaaatctgtagctgggaaaatagcaaaagaacaaggcgtgcgttcattagatcgccatatatttttagatgatagtaacgaattcgcagacgttcaacgtcaatttaaagcagcaattcactatgctagaaaacacggctccgccattgcaataggtcatcctcgccaaaatacgattgcagttttacaagcaggacttcgtaatttacccgaagatattcaattagtcggaatgggaaatttatggcgaaatgaaaaagttattccgcccaagccatttattttattattcagcgaagtgcctgcgccaacttctatagaaccttttgagcctgtaggattattgcgtggaattccaaaataa

SEQ ID NO: 64669 - protein, 280 aa, Haemophilus influenzae
MNILIKSAVKNFIVFSTALYASFSFAQSKLAIVIDDVGYHLKEDAAIFAMPREISVAIIPAAPYARARNQEAKSQGRDILIHMPMQPVSAVKIEDGGLHLGMSAAQVNDRVNTAKNIVRDAIGMNNHMGSAATADPQLMTYLMTALQEKHLFFLDSRTIGKSVAGKIAKEQGVRSLDRHIFLDDSNEFADVQRQFKAAIHYARKHGSAIAIGHPRQNTIAVLQAGLRNLPEDIQLVGMGNLWRNEKVIPPKPFILLFSEVPAPTSIEPFEPVGLLRGIPK

SEQ ID NO: 64670 - DNA, 843 bp, Haemophilus influenzae
  CDS (1)..(843)
atgaatattctgataaaaagtgcggtaaaaaatttcattgttttttctaccgcactttatacctctttttcttttgctcaaagtaaacttgctattgtgattgatgatgtaggctatcatctcaaagaagatgcagcaatttttgcgatgccacgtgaaatttccgtagcaattattcctgcagcgccctatgctcgagcacgtaatcaagaagcaaaatctcaaggtagagatattttaatccatatgccgatgcaaccagtaagtgcagtgaaaatagaagacggtgggctgcatttaggaatgtctgcggcacaagtaaatgatcgcgttaatacggctaaaaatattgtgcgtgatgccatcggtatgaacaatcatatggggagtgcagctacggcagatccccaattaatgacttatttaatgaccgcacttcaagaaaaacacttgttctttttagatagtcgaacaataggaaaatctgtagctgggaaaatagcaaaagaacaaggcgtgcgttcattagatcgccatatatttttagatgatagtaacgaattcgcagacgttcaacgtcaatttaaagcagcaattcactatgctagaaaacacggctccgccattgcaataggtcatcctcgtccaaatacgattgctgttttacaagcaggtcttcgtaatttacccgaagatattcaattagtcggaatgggcaacttatggcgtaatgaaaaagtaatcccgcccaagccatttattttattattcagcgaagtgcctgcaccaacttctatagaaccttttgagcctgtaggattattgcgtggaattccaaaataa

SEQ ID NO: 64671 - protein, 280 aa, Haemophilus influenzae
MNILIKSAVKNFIVFSTALYTSFSFAQSKLAIVIDDVGYHLKEDAAIFAMPREISVAIIPAAPYARARNQEAKSQGRDILIHMPMQPVSAVKIEDGGLHLGMSAAQVNDRVNTAKNIVRDAIGMNNHMGSAATADPQLMTYLMTALQEKHLFFLDSRTIGKSVAGKIAKEQGVRSLDRHIFLDDSNEFADVQRQFKAAIHYARKHGSAIAIGHPRPNTIAVLQAGLRNLPEDIQLVGMGNLWRNEKVIPPKPFILLFSEVPAPTSIEPFEPVGLLRGIPK

SEQ ID NO: 64672 - DNA, 22 bp, Artificial sequence
  Primer sequence
atgctggcgatgccttccgcta

SEQ ID NO: 64673 - DNA, 25 bp, Artificial sequence
  Primer sequence
ttaatttgcgctagcgttaaacttc

SEQ ID NO: 64674 - protein, 204 aa, Artificial sequence
  Consensus
  Variant (4)..(4): Xaa in position 4 is any amino acid
  Variant (6)..(18): Xaa in position 6 to 18 is any amino acid
  Variant (19)..(26): Xaa in position 19 to 26 is any or no amino acid
  Variant (28)..(29): Xaa in position 28 to 29 is any amino acid
  Variant (31)..(37): Xaa in position 31 to 37 is any amino acid
  Variant (38)..(38): Xaa in position 38 is any or no amino acid
  Variant (40)..(42): Xaa in position 40 to 42 is any amino acid
  Variant (44)..(45): Xaa in position 44 to 45 is any amino acid
  Variant (46)..(48): Xaa in position 46 to 48 is any or no amino acid
  Variant (50)..(50): Xaa in position 50 is any amino acid
  Variant (53)..(81): Xaa in position 53 to 81 is any amino acid
  Variant (82)..(87): Xaa in position 82 to 87 is any or no amino acid
  Variant (89)..(89): Xaa in position 89 is any amino acid
  Variant (91)..(91): Xaa in position 91 is any amino acid
  Variant (93)..(93): Xaa in position 93 is any amino acid
  Variant (100)..(101): Xaa in position 100 to 101 is any amino acid
  Variant (103)..(107): Xaa in position 103 to 107 is any amino acid
  Variant (109)..(114): Xaa in position 109 to 114 is any amino acid
  Variant (116)..(119): Xaa in position 116 to 119 is any amino acid
  Variant (120)..(120): Xaa in position 120 is any or no amino acid
  Variant (122)..(124): Xaa in position 122 to 124 is any amino acid
  Variant (127)..(127): Xaa in position 127 is any amino acid
  Variant (129)..(136): Xaa in position 129 to 136 is any amino acid
  Variant (137)..(137): Xaa in position 137 is any or no amino acid
  Variant (139)..(141): Xaa in position 139 to 141 is any amino acid
  Variant (143)..(147): Xaa in position 143 to 147 is any amino acid
  Variant (149)..(150): Xaa in position 149 to 150 is any amino acid
  Variant (154)..(163): Xaa in position 154 to 163 is any amino acid
  Variant (164)..(164): Xaa in position 164 is any or no amino acid
  Variant (166)..(172): Xaa in position 166 to 172 is any amino acid
  Variant (174)..(176): Xaa in position 174 to 176 is any amino acid
  Variant (178)..(181): Xaa in position 178 to 181 is any amino acid
  Variant (183)..(183): Xaa in position 183 is any amino acid
  Variant (186)..(188): Xaa in position 186 to 188 is any amino acid
  Variant (189)..(192): Xaa in position 189 to 192 is any or no amino acid
  Variant (194)..(195): Xaa in position 194 to 195 is any amino acid
  Variant (196)..(196): Xaa in position 196 is any or no amino acid
  Variant (198)..(203): Xaa in position 198 to 203 is any amino acid
IDDXGXXXXXXXXXXXXXXXXXXXXXPXXPXXXXXXXXAXXXGXXXXXHXPMXXXXXXXXXXXXXXXXXXXXXXXXXXXXXXXXXXXPXAXGXNNHMGSXXTXXXXXMXXXXXXLXXXXXLXXXDSXTXXXXXXXXXAXXXGXXXXXRXXFLDXXXXXXXXXXXQXXXXXXXAXXXGXXXXIXHPXXXXXXXTXXXLXXXXXXL

SEQ ID NO: 64675 - protein, 10 aa, Artificial sequence
  Consensus
  Variant (2)..(4): Xaa in position 2 to 4 is any amino acid
  Variant (5)..(5): Xaa in position 5 is Ile, Leu or Met
  Variant (6)..(6): Xaa in position 6 is Ile, Leu, Met or Val
  Variant (8)..(8): Xaa in position 8 is any amino acid
  Variant (10)..(10): Xaa in position 10 is Leu or Met
GXXXXXHXPX

SEQ ID NO: 64676 - protein, 13 aa, Artificial sequence
  Consensus
  Variant (2)..(2): Xaa in position 2 is any amino acid
  Variant (3)..(3): Xaa in position 3 is Ala, Gly or Ile
  Variant (4)..(4): Xaa in position 4 is any amino acid
  Variant (11)..(12): Xaa in position 11 to 12 is any amino acid
  Variant (13)..(13): Xaa in position 13 is Ser, Thr or Val
AXXXNNHMGSXXX

SEQ ID NO: 64677 - protein, 8 aa, Artificial sequence
  Consensus
  Variant (2)..(3): Xaa in position 2 to 3 is any amino acid
  Variant (4)..(4): Xaa in position 4 is Ile, Leu or Val
  Variant (7)..(7): Xaa in position 7 is any amino acid
LXXXDSXT

SEQ ID NO: 64678 - protein, 9 aa, Artificial sequence
  Consensus
  Variant (2)..(2): Xaa in position 2 is any amino acid
  Variant (3)..(3): Xaa in position 3 is Ala, Leu or Val
  Variant (4)..(5): Xaa in position 4 to 5 is any amino acid
  Variant (7)..(7): Xaa in position 7 is Ala, Cys or Gly
  Variant (9)..(9): Xaa in position 9 is Ile, Pro or Val
GXXXXIXHX

SEQ ID NO: 64679 - DNA, 1431 bp, Escherichia coli; identical to SEQ ID NO: 14875
  CDS (1)..(1431)

SEQ ID NO: 64680 - protein, 476 aa, Escherichia coli; identical to SEQ ID NO: 14876

SEQ ID NO: 64681 - DNA, 1638 bp, Fusobacterium nucleatum subsp. nucleatum ATCC 25586; identical to SEQ ID NO: 14877
  CDS (1)..(1638): transl_table=11

SEQ ID NO: 64682 - protein, 545 aa, Fusobacterium nucleatum subsp. nucleatum ATCC 25586; identical to SEQ ID NO: 14878

SEQ ID NO: 64683 - DNA, 1392 bp, Clostridium tetani E88; identical to SEQ ID NO: 14879
  CDS (1)..(1392): transl_table=11

SEQ ID NO: 64684 - protein, 463 aa, Clostridium tetani E88; identical to SEQ ID NO: 14880

SEQ ID NO: 64685 - DNA, 1380 bp, Bacteroides thetaiotaomicron VPI-5482; identical to SEQ ID NO: 14881
  CDS (1)..(1380): transl_table=11

SEQ ID NO: 64686 - protein, 459 aa, Bacteroides thetaiotaomicron VPI-5482; identical to SEQ ID NO: 14882

SEQ ID NO: 64687 - DNA, 1380 bp, Porphyromonas gingivalis W83; identical to SEQ ID NO: 14883
  CDS (1)..(1380): transl_table=11

SEQ ID NO: 64688 - protein, 459 aa, Porphyromonas gingivalis W83; identical to SEQ ID NO: 14884

SEQ ID NO: 64689 - DNA, 1449 bp, Rhodopseudomonas palustris CGA009; identical to SEQ ID NO: 14885
  CDS (1)..(1449): transl_table=11

SEQ ID NO: 64690 - protein, 482 aa, Rhodopseudomonas palustris CGA009; identical to SEQ ID NO: 14886

SEQ ID NO: 64691 - DNA, 1380 bp, Treponema denticola ATCC 35405; identical to SEQ ID NO: 14887
  CDS (1)..(1380): transl_table=11

SEQ ID NO: 64692 - protein, 459 aa, Treponema denticola ATCC 35405; identical to SEQ ID NO: 14888

SEQ ID NO: 64693 - DNA, 1380 bp, Treponema denticola ATCC 35405; identical to SEQ ID NO: 14889
  CDS (1)..(1380): transl_table=11

SEQ ID NO: 64694 - protein, 459 aa, Treponema denticola ATCC 35405; identical to SEQ ID NO: 14890

SEQ ID NO: 64695 - DNA, 1617 bp, Entamoeba histolytica HM-1:IMSS; identical to SEQ ID NO: 14891
  CDS (1)..(1617)

SEQ ID NO: 64696 - protein, 538 aa, Entamoeba histolytica HM-1:IMSS; identical to SEQ ID NO: 14892

SEQ ID NO: 64697 - DNA, 1389 bp, Desulfovibrio vulgaris subsp. vulgaris str. Hildenborough; identical to SEQ ID NO: 14893
  CDS (1)..(1389): transl_table=11

SEQ ID NO: 64698 - protein, 462 aa, Desulfovibrio vulgaris subsp. vulgaris str. Hildenborough; identical to SEQ ID NO: 14894

SEQ ID NO: 64699 - DNA, 1377 bp, Propionibacterium acnes KPA171202; identical to SEQ ID NO: 14895
  CDS (1)..(1377): transl_table=11

SEQ ID NO: 64700 - protein, 458 aa, Propionibacterium acnes KPA171202; identical to SEQ ID NO: 14896

SEQ ID NO: 64701 - DNA, 1365 bp, Symbiobacterium thermophilum IAM 14863; identical to SEQ ID NO: 14897
  CDS (1)..(1365): transl_table=11

SEQ ID NO: 64702 - protein, 454 aa, Symbiobacterium thermophilum IAM 14863; identical to SEQ ID NO: 14898

SEQ ID NO: 64703 - DNA, 1416 bp, Symbiobacterium thermophilum IAM 14863; identical to SEQ ID NO: 14899
  CDS (1)..(1416): transl_table=11

SEQ ID NO: 64704 - protein, 471 aa, Symbiobacterium thermophilum IAM 14863; identical to SEQ ID NO: 14900

SEQ ID NO: 64705 - DNA, 1443 bp, Photobacterium profundum SS9; identical to SEQ ID NO: 14901
  CDS (1)..(1443): transl_table=11

SEQ ID NO: 64706 - protein, 480 aa, Photobacterium profundum SS9; identical to SEQ ID NO: 14902

SEQ ID NO: 64707 - DNA, 1467 bp, Photobacterium profundum SS9; identical to SEQ ID NO: 14903
  CDS (1)..(1467): transl_table=11

SEQ ID NO: 64708 - protein, 488 aa, Photobacterium profundum SS9; identical to SEQ ID NO: 14904

SEQ ID NO: 64709 - DNA, 1401 bp, Photobacterium profundum SS9; identical to SEQ ID NO: 14905
  CDS (1)..(1401): transl_table=11

SEQ ID NO: 64710 - protein, 466 aa, Photobacterium profundum SS9; identical to SEQ ID NO: 14906

SEQ ID NO: 64711 - DNA, 1344 bp, Haloarcula marismortui ATCC 43049; identical to SEQ ID NO: 14907
  CDS (1)..(1344): transl_table=11

SEQ ID NO: 64712 - protein, 447 aa, Haloarcula marismortui ATCC 43049; identical to SEQ ID NO: 14908

SEQ ID NO: 64713 - DNA, 1449 bp, Azoarcus sp. EbN1; identical to SEQ ID NO: 14909
  CDS (1)..(1449): transl_table=11

SEQ ID NO: 64714 - protein, 482 aa, Azoarcus sp. EbN1; identical to SEQ ID NO: 14910

SEQ ID NO: 64715 - DNA, 1404 bp, Nostoc punctiforme PCC 73102; identical to SEQ ID NO: 14911
  CDS (1)..(1404)

SEQ ID NO: 64716 - protein, 467 aa, Nostoc punctiforme PCC 73102; identical to SEQ ID NO: 14912

SEQ ID NO: 64717 - DNA, 1416 bp, Haemophilus somnus 129PT; identical to SEQ ID NO: 14913
  CDS (1)..(1416)

SEQ ID NO: 64718 - protein, 471 aa, Haemophilus somnus 129PT; identical to SEQ ID NO: 14914

SEQ ID NO: 64719 - DNA, 1569 bp, Fusobacterium nucleatum subsp. vincentii ATCC 49256; identical to SEQ ID NO: 14915
  CDS (1)..(1569): transl_table=11

SEQ ID NO: 64720 - protein, 522 aa, Fusobacterium nucleatum subsp. vincentii ATCC 49256; identical to SEQ ID NO: 14916

SEQ ID NO: 64721 - DNA, 1383 bp, Fusobacterium nucleatum subsp. vincentii ATCC 49256; identical to SEQ ID NO: 14917
  CDS (1)..(1383): transl_table=11

SEQ ID NO: 64722 - protein, 460 aa, Fusobacterium nucleatum subsp. vincentii ATCC 49256; identical to SEQ ID NO: 14918

SEQ ID NO: 64723 - DNA, 1182 bp, Haemophilus influenzae 86-028NP; identical to SEQ ID NO: 14919
  CDS (1)..(1182)

SEQ ID NO: 64724 - protein, 393 aa, Haemophilus influenzae 86-028NP; identical to SEQ ID NO: 14920

SEQ ID NO: 64725 - DNA, 1347 bp, Solibacter usitatus Ellin6076; identical to SEQ ID NO: 14921
  CDS (1)..(1347): transl_table=11

SEQ ID NO: 64726 - protein, 448 aa, Solibacter usitatus Ellin6076; identical to SEQ ID NO: 14922

SEQ ID NO: 64727 - DNA, 1374 bp, Desulfitobacterium hafniense DCB-2; identical to SEQ ID NO: 14923
  CDS (1)..(1374): transl_table=11

SEQ ID NO: 64728 - protein, 457 aa, Desulfitobacterium hafniense DCB-2; identical to SEQ ID NO: 14924

SEQ ID NO: 64729 - DNA, 1389 bp, Desulfitobacterium hafniense DCB-2; identical to SEQ ID NO: 14925
  CDS (1)..(1389): transl_table=11

SEQ ID NO: 64730 - protein, 462 aa, Desulfitobacterium hafniense DCB-2; identical to SEQ ID NO: 14926

SEQ ID NO: 64731 - DNA, 1443 bp, uncultured bacterium; identical to SEQ ID NO: 14927
  CDS (1)..(1443)

SEQ ID NO: 64732 - protein, 480 aa, uncultured bacterium; identical to SEQ ID NO: 14928

SEQ ID NO: 64733 - DNA, 1365 bp, Symbiobacterium thermophilum; identical to SEQ ID NO: 14929
  CDS (1)..(1365)

SEQ ID NO: 64734 - protein, 454 aa, Symbiobacterium thermophilum; identical to SEQ ID NO: 14930

SEQ ID NO: 64735 - DNA, 1365 bp, Symbiobacterium thermophilum; identical to SEQ ID NO: 14897
  CDS (1)..(1365)

SEQ ID NO: 64736 - protein, 454 aa, Symbiobacterium thermophilum; identical to SEQ ID NO: 14898

SEQ ID NO: 64737 - DNA, 1386 bp, Chromobacterium violaceum; identical to SEQ ID NO: 14933
  CDS (1)..(1386): transl_table=11

SEQ ID NO: 64738 - protein, 461 aa, Chromobacterium violaceum; identical to SEQ ID NO: 14934

SEQ ID NO: 64739 - DNA, 1419 bp, Clostridium tetani; identical to SEQ ID NO: 14935
  CDS (1)..(1419): transl_table=11

SEQ ID NO: 64740 - protein, 472 aa, Clostridium tetani; identical to SEQ ID NO: 14936

SEQ ID NO: 64741 - DNA, 1389 bp, Enterobacter aerogenes; identical to SEQ ID NO: 14937
  CDS (1)..(1389): transl_table=11

SEQ ID NO: 64742 - protein, 462 aa, Enterobacter aerogenes; identical to SEQ ID NO: 14938

SEQ ID NO: 64743 - DNA, 1419 bp, Haemophilus influenzae; identical to SEQ ID NO: 14939
  CDS (1)..(1419): transl_table=11

SEQ ID NO: 64744 - protein, 472 aa, Haemophilus influenzae; identical to SEQ ID NO: 14940

SEQ ID NO: 64745 - DNA, 1347 bp, Halobacterium salinarium; identical to SEQ ID NO: 14941
  CDS (1)..(1347)

SEQ ID NO: 64746 - protein, 448 aa, Halobacterium salinarium; identical to SEQ ID NO: 14942

SEQ ID NO: 64747 - DNA, 1416 bp, Pasteurella multocida; identical to SEQ ID NO: 14943
  CDS (1)..(1416): transl_table=11

SEQ ID NO: 64748 - protein, 471 aa, Pasteurella multocida; identical to SEQ ID NO: 14944

SEQ ID NO: 64749 - DNA, 1401 bp, Photorhabdus luminescens; identical to SEQ ID NO: 14945
  CDS (1)..(1401): transl_table=11

SEQ ID NO: 64750 - protein, 466 aa, Photorhabdus luminescens; identical to SEQ ID NO: 14946

SEQ ID NO: 64751 - DNA, 1398 bp, Proteus inconstans; identical to SEQ ID NO: 14947
  CDS (1)..(1398): transl_table=11

SEQ ID NO: 64752 - protein, 465 aa, Proteus inconstans; identical to SEQ ID NO: 14948

SEQ ID NO: 64753 - DNA, 1404 bp, Proteus vulgaris; identical to SEQ ID NO: 14949
  CDS (1)..(1404): transl_table=11

SEQ ID NO: 64754 - protein, 467 aa, Proteus vulgaris; identical to SEQ ID NO: 14950

SEQ ID NO: 64755 - DNA, 1365 bp, Rhodobacter capsulatus; identical to SEQ ID NO: 14951
  CDS (1)..(1365): transl_table=11

SEQ ID NO: 64756 - protein, 454 aa, Rhodobacter capsulatus; identical to SEQ ID NO: 14952

SEQ ID NO: 64757 - DNA, 1389 bp, Thermoanaerobacter tengcongensis; identical to SEQ ID NO: 14953
  CDS (1)..(1389): transl_table=11

SEQ ID NO: 64758 - protein, 462 aa, Thermoanaerobacter tengcongensis; identical to SEQ ID NO: 14954

SEQ ID NO: 64759 - DNA, 1419 bp, Vibrio cholerae; identical to SEQ ID NO: 14955
  CDS (1)..(1419): transl_table=11

SEQ ID NO: 64760 - protein, 472 aa, Vibrio cholerae; identical to SEQ ID NO: 14956

SEQ ID NO: 64761 - DNA, 1401 bp, Vibrio parahaemolyticus; identical to SEQ ID NO: 14957
  CDS (1)..(1401): transl_table=11

SEQ ID NO: 64762 - protein, 466 aa, Vibrio parahaemolyticus; identical to SEQ ID NO: 14958

SEQ ID NO: 64763 - DNA, 1422 bp, Vibrio vulnificus; identical to SEQ ID NO: 14959
  CDS (1)..(1422): transl_table=11

SEQ ID NO: 64764 - protein, 473 aa, Vibrio vulnificus; identical to SEQ ID NO: 14960

SEQ ID NO: 64765 - DNA, 1371 bp, Citrobacter freundii; identical to SEQ ID NO: 14961
  CDS (1)..(1371): transl_table=11

SEQ ID NO: 64766 - protein, 456 aa, Citrobacter freundii; identical to SEQ ID NO: 14962

SEQ ID NO: 64767 - DNA, 1383 bp, Clostridium tetani; identical to SEQ ID NO: 14963
  CDS (1)..(1383)

SEQ ID NO: 64768 - protein, 460 aa, Clostridium tetani; identical to SEQ ID NO: 14964

SEQ ID NO: 64769 - DNA, 1371 bp, Enterobacter agglomerans; identical to SEQ ID NO: 14965
  CDS (1)..(1371): transl_table=11

SEQ ID NO: 64770 - protein, 456 aa, Enterobacter agglomerans; identical to SEQ ID NO: 14966

SEQ ID NO: 64771 - DNA, 1383 bp, Fusobacterium nucleatum; identical to SEQ ID NO: 14967
  CDS (1)..(1383): transl_table=11

SEQ ID NO: 64772 - protein, 460 aa, Fusobacterium nucleatum; identical to SEQ ID NO: 14968

SEQ ID NO: 64773 - DNA, 1377 bp, Pasteurella multocida; identical to SEQ ID NO: 14969
  CDS (1)..(1377): transl_table=11

SEQ ID NO: 64774 - protein, 458 aa, Pasteurella multocida; identical to SEQ ID NO: 14970

SEQ ID NO: 64775 - DNA, 1377 bp, Symbiobacterium sp; identical to SEQ ID NO: 14971
  CDS (1)..(1377): transl_table=11

SEQ ID NO: 64776 - protein, 458 aa, Symbiobacterium sp; identical to SEQ ID NO: 14972

SEQ ID NO: 64777 - DNA, 27 bp, Artificial sequence
  Primer sequence
atgaaggattatgtaatggaaaacttt

SEQ ID NO: 64778 - DNA, 26 bp, Artificial sequence
  Primer sequence
ttaaacttctttaagttttgcggtga

SEQ ID NO: 64779 - protein, 533 aa, Artificial sequence; identical to SEQ ID NO: 14975
  Consensus
  Variant (2)..(2): Xaa in position 2 is any amino acid
  Variant (7)..(7): Xaa in position 7 is any amino acid
  Variant (10)..(10): Xaa in position 10 is any amino acid
  Variant (12)..(18): Xaa in position 12 to 18 is any amino acid
  Variant (20)..(22): Xaa in position 20 to 22 is any amino acid
  Variant (24)..(25): Xaa in position 24 to 25 is any amino acid
  Variant (27)..(28): Xaa in position 27 to 28 is any amino acid
  Variant (30)..(30): Xaa in position 30 is any amino acid
  Variant (32)..(32): Xaa in position 32 is any amino acid
  Variant (34)..(34): Xaa in position 34 is any amino acid
  Variant (36)..(37): Xaa in position 36 to 37 is any amino acid
  Variant (49)..(49): Xaa in position 49 is any amino acid
  Variant (53)..(54): Xaa in position 53 to 54 is any amino acid
  Variant (56)..(56): Xaa in position 56 is any or no amino acid
  Variant (61)..(61): Xaa in position 61 is any amino acid
  Variant (70)..(71): Xaa in position 70 to 71 is any amino acid
  Variant (73)..(74): Xaa in position 73 to 74 is any amino acid
  Variant (76)..(78): Xaa in position 76 to 78 is any amino acid
  Variant (80)..(80): Xaa in position 80 is any amino acid
  Variant (83)..(83): Xaa in position 83 is any amino acid
  Variant (86)..(88): Xaa in position 86 to 88 is any amino acid
  Variant (89)..(134): Xaa in position 89 to 134 is any or no amino acid
  Variant (137)..(137): Xaa in position 137 is any amino acid
  Variant (145)..(145): Xaa in position 145 is any amino acid
  Variant (147)..(150): Xaa in position 147 to 150 is any amino acid
  Variant (153)..(160): Xaa in position 153 to 160 is any amino acid
  Variant (161)..(170): Xaa in position 161 to 170 is any or no amino acid
  Variant (172)..(173): Xaa in position 172 to 173 is any amino acid
  Variant (175)..(175): Xaa in position 175 is any amino acid
  Variant (178)..(179): Xaa in position 178 to 179 is any amino acid
  Variant (181)..(184): Xaa in position 181 to 184 is any amino acid
  Variant (187)..(190): Xaa in position 187 to 190 is any amino acid
  Variant (192)..(195): Xaa in position 192 to 195 is any amino acid
  Variant (197)..(202): Xaa in position 197 to 202 is any amino acid
  Variant (203)..(210): Xaa in position 203 to 210 is any or no amino acid
  Variant (214)..(215): Xaa in position 214 to 215 is any amino acid
  Variant (218)..(218): Xaa in position 218 is any amino acid
  Variant (221)..(223): Xaa in position 221 to 223 is any amino acid
  Variant (225)..(227): Xaa in position 225 to 227 is any amino acid
  Variant (229)..(230): Xaa in position 229 to 230 is any amino acid
  Variant (231)..(231): Xaa in position 231 is any or no amino acid
  Variant (233)..(234): Xaa in position 233 to 234 is any amino acid
  Variant (236)..(238): Xaa in position 236 to 238 is any amino acid
  Variant (241)..(241): Xaa in position 241 is any amino acid
  Variant (243)..(244): Xaa in position 243 to 244 is any amino acid
  Variant (252)..(252): Xaa in position 252 is any amino acid
  Variant (256)..(259): Xaa in position 256 to 259 is any amino acid
  Variant (261)..(263): Xaa in position 261 to 263 is any amino acid
  Variant (265)..(265): Xaa in position 265 is any amino acid
  Variant (267)..(267): Xaa in position 267 is any amino acid
  Variant (269)..(270): Xaa in position 269 to 270 is any amino acid
  Variant (273)..(273): Xaa in position 273 is any amino acid
  Variant (275)..(276): Xaa in position 275 to 276 is any amino acid
  Variant (283)..(285): Xaa in position 283 to 285 is any amino acid
  Variant (287)..(288): Xaa in position 287 to 288 is any amino acid
  Variant (290)..(292): Xaa in position 290 to 292 is any amino acid
  Variant (295)..(296): Xaa in position 295 to 296 is any amino acid
  Variant (298)..(299): Xaa in position 298 to 299 is any amino acid
  Variant (301)..(301): Xaa in position 301 is any amino acid
  Variant (303)..(303): Xaa in position 303 is any amino acid
  Variant (307)..(309): Xaa in position 307 to 309 is any amino acid
  Variant (316)..(316): Xaa in position 316 is any amino acid
  Variant (323)..(323): Xaa in position 323 is any amino acid
  Variant (325)..(327): Xaa in position 325 to 327 is any amino acid
  Variant (329)..(330): Xaa in position 329 to 330 is any amino acid
  Variant (331)..(348): Xaa in position 331 to 348 is any or no amino acid
  Variant (351)..(357): Xaa in position 351 to 357 is any amino acid
  Variant (359)..(360): Xaa in position 359 to 360 is any amino acid
  Variant (363)..(364): Xaa in position 363 to 364 is any amino acid
  Variant (370)..(370): Xaa in position 370 is any amino acid
  Variant (375)..(375): Xaa in position 375 is any amino acid
  Variant (379)..(379): Xaa in position 379 is any amino acid
  Variant (382)..(382): Xaa in position 382 is any amino acid
  Variant (384)..(388): Xaa in position 384 to 388 is any amino acid
  Variant (391)..(392): Xaa in position 391 to 392 is any amino acid
  Variant (395)..(395): Xaa in position 395 is any amino acid
  Variant (398)..(398): Xaa in position 398 is any amino acid
  Variant (401)..(403): Xaa in position 401 to 403 is any amino acid
  Variant (405)..(407): Xaa in position 405 to 407 is any amino acid
  Variant (410)..(413): Xaa in position 410 to 413 is any amino acid
  Variant (414)..(414): Xaa in position 414 is any or no amino acid
  Variant (416)..(416): Xaa in position 416 is any or no amino acid
  Variant (421)..(421): Xaa in position 421 is any amino acid
  Variant (426)..(429): Xaa in position 426 to 429 is any amino acid
  Variant (431)..(433): Xaa in position 431 to 433 is any or no amino acid
  Variant (436)..(439): Xaa in position 436 to 439 is any amino acid
  Variant (443)..(444): Xaa in position 443 to 444 is any amino acid
  Variant (446)..(448): Xaa in position 446 to 448 is any amino acid
  Variant (451)..(453): Xaa in position 451 to 453 is any amino acid
  Variant (457)..(458): Xaa in position 457 to 458 is any amino acid
  Variant (460)..(460): Xaa in position 460 is any amino acid
  Variant (462)..(467): Xaa in position 462 to 467 is any amino acid
  Variant (468)..(470): Xaa in position 468 to 470 is any or no amino acid
  Variant (472)..(479): Xaa in position 472 to 479 is any or no amino acid
  Variant (481)..(482): Xaa in position 481 to 482 is any amino acid
  Variant (485)..(485): Xaa in position 485 is any amino acid
  Variant (489)..(490): Xaa in position 489 to 490 is any amino acid
  Variant (493)..(494): Xaa in position 493 to 494 is any amino acid
  Variant (498)..(498): Xaa in position 498 is any amino acid
  Variant (500)..(505): Xaa in position 500 to 505 is any amino acid
  Variant (507)..(512): Xaa in position 507 to 512 is any amino acid
  Variant (514)..(514): Xaa in position 514 is any amino acid
  Variant (515)..(515): Xaa in position 515 is any or no amino acid
  Variant (518)..(521): Xaa in position 518 to 521 is any amino acid
  Variant (524)..(525): Xaa in position 524 to 525 is any amino acid
  Variant (526)..(527): Xaa in position 526 to 527 is any or no amino acid
  Variant (530)..(530): Xaa in position 530 is any amino acid
  Variant (532)..(532): Xaa in position 532 is any amino acid

SEQ ID NO: 64780 - protein, 85 aa, Artificial sequence; identical to SEQ ID NO: 14976
  Consensus
  Variant (2)..(2): Xaa in position 2 is Pro or Ser
  Variant (3)..(4): Xaa in position 3 to 4 is any amino acid
  Variant (5)..(5): Xaa in position 5 is Ile, Leu or Met
  Variant (6)..(8): Xaa in position 6 to 8 is any amino acid
  Variant (10)..(10): Xaa in position 10 is any amino acid
  Variant (11)..(18): Xaa in position 11 to 18 is any or no amino acid
  Variant (20)..(25): Xaa in position 20 to 25 is any amino acid
  Variant (26)..(26): Xaa in position 26 is Ala, Ser or Val
  Variant (27)..(28): Xaa in position 27 to 28 is any amino acid
  Variant (30)..(30): Xaa in position 30 is any amino acid
  Variant (32)..(32): Xaa in position 32 is any amino acid
  Variant (33)..(33): Xaa in position 33 is Ile or Leu
  Variant (34)..(34): Xaa in position 34 is any amino acid
  Variant (35)..(35): Xaa in position 35 is Ala, Gly or Ser
  Variant (36)..(39): Xaa in position 36 to 39 is any amino acid
  Variant (49)..(49): Xaa in position 49 is Ala, Gly, Asn, Ser or Thr
  Variant (51)..(51): Xaa in position 51 is Ile, Met or Val
  Variant (52)..(52): Xaa in position 52 is Ser or Thr
  Variant (53)..(53): Xaa in position 53 is Asp, Asn, Gln or Ser
  Variant (54)..(56): Xaa in position 54 to 56 is any amino acid
  Variant (57)..(57): Xaa in position 57 is Ala, Gly or Ser
  Variant (58)..(58): Xaa in position 58 is Ala or Gly
  Variant (59)..(59): Xaa in position 59 is Ile, Leu, Met or Val
  Variant (60)..(60): Xaa in position 60 is Phe, Ile, Leu or Met
  Variant (61)..(61): Xaa in position 61 is any amino acid
  Variant (65)..(65): Xaa in position 65 is Ala or Ser
  Variant (67)..(67): Xaa in position 67 is Ala or Ser
  Variant (69)..(69): Xaa in position 69 is Ala, Gly or Ser
  Variant (70)..(70): Xaa in position 70 is any amino acid
  Variant (71)..(71): Xaa in position 71 is Asn or Ser
  Variant (72)..(72): Xaa in position 72 is Phe, Trp or Tyr
  Variant (73)..(74): Xaa in position 73 to 74 is any amino acid
  Variant (75)..(75): Xaa in position 75 is Phe, Leu or Met
  Variant (76)..(78): Xaa in position 76 to 78 is any amino acid
  Variant (79)..(79): Xaa in position 79 is Ala, Gly, Ile or Val
  Variant (80)..(83): Xaa in position 80 to 83 is any amino acid
  Variant (84)..(84): Xaa in position 84 is Asp, Gly, Asn or Pro
  Variant (85)..(85): Xaa in position 85 is Phe or Tyr

SEQ ID NO: 64781 - protein, 41 aa, Artificial sequence; identical to SEQ ID NO: 14977
  Consensus
  Variant (2)..(2): Xaa in position 2 is Ala or Thr
  Variant (7)..(7): Xaa in position 7 is Ala or Gly
  Variant (10)..(10): Xaa in position 10 is any amino acid
  Variant (11)..(15): Xaa in position 11 to 15 is any or no amino acid
  Variant (17)..(40): Xaa in position 17 to 40 is any amino acid
  Variant (41)..(41): Xaa in position 41 is Ala, Glu, Gly, Gln or Thr

SEQ ID NO: 64782 - protein, 100 aa, Artificial sequence; identical to SEQ ID NO: 14978
  Consensus
  Variant (2)..(13): Xaa in position 2 to 13 is any amino acid
  Variant (14)..(17): Xaa in position 14 to 17 is any or no amino acid
  Variant (19)..(19): Xaa in position 19 is Cys, Asn, Ser or Val
  Variant (21)..(22): Xaa in position 21 to 22 is any amino acid
  Variant (27)..(27): Xaa in position 27 is Ile or Val
  Variant (29)..(29): Xaa in position 29 is Ile, Leu or Met
  Variant (30)..(30): Xaa in position 30 is any amino acid
  Variant (32)..(32): Xaa in position 32 is Ile, Leu or Met
  Variant (33)..(33): Xaa in position 33 is any amino acid
  Variant (34)..(34): Xaa in position 34 is Ala, Asp, Glu, Gly or Ser
  Variant (35)..(37): Xaa in position 35 to 37 is any amino acid
  Variant (38)..(38): Xaa in position 38 is Ile, Leu, Met or Val
  Variant (39)..(39): Xaa in position 39 is Ala, Cys or Thr
  Variant (40)..(43): Xaa in position 40 to 43 is any amino acid
  Variant (44)..(44): Xaa in position 44 is Ile or Val
  Variant (45)..(45): Xaa in position 45 is any amino acid
  Variant (46)..(46): Xaa in position 46 is Phe, Ile, Leu, Met or Val
  Variant (47)..(48): Xaa in position 47 to 48 is any amino acid
  Variant (50)..(50): Xaa in position 50 is Ala, Ser or Val
  Variant (51)..(51): Xaa in position 51 is Ala, Cys or Thr
  Variant (53)..(53): Xaa in position 53 is any amino acid
  Variant (54)..(54): Xaa in position 54 is Ala, Cys, Ser or Val
  Variant (57)..(57): Xaa in position 57 is Ala or Cys
  Variant (58)..(58): Xaa in position 58 is His, Trp or Tyr
  Variant (60)..(60): Xaa in position 60 is Ile or Val
  Variant (61)..(62): Xaa in position 61 to 62 is any amino acid
  Variant (63)..(63): Xaa in position 63 is Asp, Gln or Arg
  Variant (64)..(64): Xaa in position 64 is Asp or Glu
  Variant (65)..(68): Xaa in position 65 to 68 is any amino acid
  Variant (69)..(69): Xaa in position 69 is Asp, Glu, Gly, Asn or Ser
  Variant (70)..(71): Xaa in position 70 to 71 is any amino acid
  Variant (72)..(72): Xaa in position 72 is Ile, Leu, Pro or Val
  Variant (73)..(73): Xaa in position 73 is any amino acid
  Variant (74)..(74): Xaa in position 74 is Asp, Glu, Gln, Ser or Thr
  Variant (75)..(75): Xaa in position 75 is Ile or Val
  Variant (76)..(77): Xaa in position 76 to 77 is any amino acid
  Variant (78)..(78): Xaa in position 78 is Asp, Glu or Lys
  Variant (79)..(83): Xaa in position 79 to 83 is any amino acid
  Variant (84)..(84): Xaa in position 84 is Asp or Glu
  Variant (85)..(88): Xaa in position 85 to 88 is any amino acid
  Variant (90)..(90): Xaa in position 90 is Ala, Gly or Ser
  Variant (94)..(94): Xaa in position 94 is Ala, Cys, Gly, Pro or Thr
  Variant (95)..(95): Xaa in position 95 is Phe, Ile, Leu or Met
  Variant (96)..(96): Xaa in position 96 is Ala, Leu or Val
  Variant (97)..(97): Xaa in position 97 is Asn, Pro or Gln
  Variant (98)..(98): Xaa in position 98 is Ile or Met

SEQ ID NO: 64783 - protein, 84 aa, Artificial sequence; identical to SEQ ID NO: 14979
  Consensus
  Variant (2)..(4): Xaa in position 2 to 4 is any amino acid
  Variant (8)..(8): Xaa in position 8 is Leu or Met
  Variant (9)..(9): Xaa in position 9 is Ala, Glu, Asn, Ser or Thr
  Variant (11)..(11): Xaa in position 11 is any amino acid
  Variant (12)..(12): Xaa in position 12 is Ala or Asp
  Variant (13)..(13): Xaa in position 13 is Ile, Leu or Met
  Variant (14)..(16): Xaa in position 14 to 16 is any amino acid
  Variant (18)..(18): Xaa in position 18 is any amino acid
  Variant (20)..(20): Xaa in position 20 is Phe, Ile or Leu
  Variant (21)..(31): Xaa in position 21 to 31 is any amino acid
  Variant (33)..(33): Xaa in position 33 is Ile or Val
  Variant (34)..(34): Xaa in position 34 is any amino acid
  Variant (36)..(39): Xaa in position 36 to 39 is any amino acid
  Variant (40)..(40): Xaa in position 40 is Ala, Gly, Asn or Val
  Variant (41)..(42): Xaa in position 41 to 42 is any amino acid
  Variant (44)..(46): Xaa in position 44 to 46 is any amino acid
  Variant (47)..(47): Xaa in position 47 is Asp, Glu, Gly or Asn
  Variant (48)..(48): Xaa in position 48 is Ile or Val
  Variant (49)..(49): Xaa in position 49 is Ala, Ile, Leu, Pro or Val
  Variant (50)..(52): Xaa in position 50 to 52 is any amino acid
  Variant (53)..(53): Xaa in position 53 is Ala or Pro
  Variant (54)..(54): Xaa in position 54 is any amino acid
  Variant (56)..(56): Xaa in position 56 is any or no amino acid
  Variant (58)..(58): Xaa in position 58 is Ala, Gly or Thr
  Variant (59)..(60): Xaa in position 59 to 60 is any amino acid
  Variant (61)..(61): Xaa in position 61 is Ile, Leu or Val
  Variant (62)..(62): Xaa in position 62 is Asp or Glu
  Variant (63)..(63): Xaa in position 63 is Ala, Gly or Thr
  Variant (64)..(67): Xaa in position 64 to 67 is any amino acid
  Variant (68)..(68): Xaa in position 68 is Glu, Asn, Pro or Thr
  Variant (69)..(75): Xaa in position 69 to 75 is any amino acid
  Variant (76)..(76): Xaa in position 76 is Gly, Ile or Pro
  Variant (77)..(77): Xaa in position 77 is Ala, Asp, Gly or Ser
  Variant (78)..(80): Xaa in position 78 to 80 is any amino acid
  Variant (81)..(81): Xaa in position 81 is Ala, Cys, Gly, Asn, Ser, Thr or Val
  Variant (82)..(83): Xaa in position 82 to 83 is any amino acid
  Variant (84)..(84): Xaa in position 84 is Ile, Leu or Val

SEQ ID NO: 64784 - DNA, 714 bp, Escherichia coli
  CDS (1)..(714)
atgcgcaagatcacacaggcaatcagtgccgtttgcttattgttcgctctaaacagttccgctgttgccctggcctcatctccttcaccgcttaaccctgggactaacgttgccaggcttgctgaacaggcaccaattcattgggtttcggtcgcacaaattgaaaatagcctcgcagggcgtccgccaatggcggtggggtttgatatcgatgacacggtacttttttccagtccggggttctggcgcggcaaaaaaaccttctcgccagaaagcgaagattatctgaaaaatcctgtgttctgggaaaaaatgaataatggctgggatgaattcagcattccaaaagaggtcgctcgccagctgattgatatgcatgtacgccgcggtgacgcgatcttctttgtgactggtcgtagcccgacgaaaacagaaacggtttcaaaaacgctggcggataattttcatattcctgccaccaacatgaatccggtaatctttgcgggcgataaaccagggcaaaatacaaaatcgcaatggctgcaggataaaaatatccgaattttttatggcgattccgataacgatattaccgccgcacgcgatgtcggcgctcgtggtatccgcattctgcgcgcctccaactctacctacaaacccttgccacaagcgggtgcgtttggtgaagaggtgatcgtcaattcagaatactga

SEQ ID NO: 64785 - protein, 237 aa, Escherichia coli
MRKITQAISAVCLLFALNSSAVALASSPSPLNPGTNVARLAEQAPIHWVSVAQIENSLAGRPPMAVGFDIDDTVLFSSPGFWRGKKTFSPESEDYLKNPVFWEKMNNGWDEFSIPKEVARQLIDMHVRRGDAIFFVTGRSPTKTETVSKTLADNFHIPATNMNPVIFAGDKPGQNTKSQWLQDKNIRIFYGDSDNDITAARDVGARGIRILRASNSTYKPLPQAGAFGEEVIVNSEY

SEQ ID NO: 64786 - DNA, 732 bp, Streptococcus pyogenes MGAS10394
  CDS (1)..(732): transl_table=11
atgaaaaaagaatttaccagtatcctgtttacagttagtttttgtggaatcatagcattgcctgtcgaagctagtggccctaaagttccttatacacaagaaggtataacggccatttcaaatcaggcaacagtaaaattgatttctattgctgatatcgcgagcagtttagaaggacaaaaacctataacggttagttttgatatcgatgatactttgttatttactagccaatattttcagtacggcaaagaatatataactccaggctcatttgattttttgcataagcaaaaattttgggacttagtcgctaaacggggagatcaggattctattccaaaagagtatgcaaagcaactaatcgcaatgcatcaaaaacgaggagataaaattgtctttattactggccgaactcgaggatcgatgtataaaaaaggtgagattgataaaacagctaagtcactggctaaagattttaagttagacaagccaatagctatcaattatacaggagataaagctgtgaagccgtatcagtatgataaaacatattatataaagaaaaacggctcacaaattcattacggagatagtgatgaagatataaatgctgccaaagaggcaggtgcaagacctattcgcattttaagagctcctaattcaaccaatcttcctttgccaaaagctggaggatacggagaagaggttttagaaaattcggcttattag

SEQ ID NO: 64787 - protein, 243 aa, Streptococcus pyogenes MGAS10394
MKKEFTSILFTVSFCGIIALPVEASGPKVPYTQEGITAISNQATVKLISIADIASSLEGQKPITVSFDIDDTLLFTSQYFQYGKEYITPGSFDFLHKQKFWDLVAKRGDQDSIPKEYAKQLIAMHQKRGDKIVFITGRTRGSMYKKGEIDKTAKSLAKDFKLDKPIAINYTGDKAVKPYQYDKTYYIKKNGSQIHYGDSDEDINAAKEAGARPIRILRAPNSTNLPLPKAGGYGEEVLENSAY

SEQ ID NO: 64788 - DNA, 708 bp, Haemophilus influenzae 86-028NP
  CDS (1)..(708): transl_table=11
atgaaaaacggcataaaattatctgtcatcgcacttttaactgcagctgcagttccagcgatggcaggcaaaacagaaccttatactcaatctggcactaatgctcgtgaaatgttacaagagcaagcaattcattggattagtgttgatcaaatcaaacaaagtttagaaggtaaagcaccaattaatgtaagctttgatattgatgataccgtgcttttcagtagcccttgcttttaccacggacaacaaaaattctcaccaggtaaacacgattatttgaaaaaccaagatttctggaatgaagtaaatgcaggttgcgataaatattctattcctaaacaaattgccatagatttaattaatatgcaccaagcacgtggcgaccaagtttactttttcactggccgtactgctggcaaagtggatggtgtaaccccaattttagaaaaaacgttcaatattaagaatatgcacccagttgaatttatgggcagccgtgaacgtacaacaaaatataacaaaacgcctgcaatcatttcacataaagtgagtattcactatggcgacagcgatgatgatgtactagcagctaaagaagcaggtgttcgtggtattcgtttaatgcgtgccgcaaactctacttatcaaccaatgccaactttaggcggctatggcgaagaagtgttaatcaattcaagctattaa

SEQ ID NO: 64789 - protein, 235 aa, Haemophilus influenzae 86-028NP
MKNGIKLSVIALLTAAAVPAMAGKTEPYTQSGTNAREMLQEQAIHWISVDQIKQSLEGKAPINVSFDIDDTVLFSSPCFYHGQQKFSPGKHDYLKNQDFWNEVNAGCDKYSIPKQIAIDLINMHQARGDQVYFFTGRTAGKVDGVTPILEKTFNIKNMHPVEFMGSRERTTKYNKTPAIISHKVSIHYGDSDDDVLAAKEAGVRGIRLMRAANSTYQPMPTLGGYGEEVLINSSY

SEQ ID NO: 64790 - DNA, 738 bp, Streptococcus agalactiae A909
  CDS (1)..(738): transl_table=11
atgaagaaagtgttagtgagtagtcttttggttttagggattacgataacgttacaaacagtagttgaggctaaggggccaaaagtagcttatacacaagagggaatgactgctctttcggacacaaataaagataaagtcactactatttctattgacgagattcaaaaaagcttagaaggtaagaagccgattactgttagttttgatattgatgatacactgcttttcagtagtcaatattttcaatatggtaaagaatatgtaactcctggatcgtttgattttcttcataaacaaaaattctgggatcttgttgcaaaacgaggagatcaagattccattcccaaagaatatgctaaaaaattaattgctatgcatcaaaaacgaggagataaaattgtttttataacaggtaggacaagagggtcaatgtataaggagggcgaggttgataaaacagctaaagccttagctaaagattttaaattagacaaaccaattgctgtaaattatacaggcgataaacctaaaaagccatacaaatatgataaatcatattatattaagaaatatggttcagacattcattatggagatagtgatgacgatattcatgcagctagggaggccggtgctagaccaattagaattttaagagcacctaattctacaaatctacctttaccagaagctggaggctacggtgaagaggttctcgaaaattcagcttactag

SEQ ID NO: 64791 - protein, 245 aa, Streptococcus agalactiae A909
MKKVLVSSLLVLGITITLQTVVEAKGPKVAYTQEGMTALSDTNKDKVTTISIDEIQKSLEGKKPITVSFDIDDTLLFSSQYFQYGKEYVTPGSFDFLHKQKFWDLVAKRGDQDSIPKEYAKKLIAMHQKRGDKIVFITGRTRGSMYKEGEVDKTAKALAKDFKLDKPIAVNYTGDKPKKPYKYDKSYYIKKYGSDIHYGDSDDDIHAAREAGARPIRILRAPNSTNLPLPEAGGYGEEVLENSAY

SEQ ID NO: 64792 - DNA, 708 bp, Haemophilus influenzae R2846
  CDS (1)..(708)
atgaaaaacgtcatgaaattatctgtaatcgcacttttaactgcagctgcagttcctgcgatggcaggcaaaacagaaccttatactcaatctagcactaatgctcgtgaaatgttacaagagcaagcaattcattggattagtgttgatcaaatcaaacaaagtttagaaggtaaagcaccaattaatgtaagctttgatattgatgataccgtgcttttcagtagcccttgcttttaccacggacaacaaaaattctcaccaggtaaacacgattatttgaaaaaccaagatttctggaatgaagtaaatgcaggttgcgataaatattctattcctaaacaaattgccatagatttaattaatatgcaccaagcacgtggcgaccaagtttactttttcactggccgtactgctggcaaagtggatggtgtaacaccaattttagaaaaaacgttcaatattaagaatatgcacccagttgaatttatgggcagccgtgaacgtacaacaaaatataacaaaacgcctgcaatcatttcacataaagtgagtattcactatggcgatagcgatgatgatgtgctagcagctaaagaagcgggtgttcgtggtattcgtttaatgcgtgccgcaaactctacttatcaaccaatgccaactttaggcggctatggcgaagaagtgttaatcaattcaagctattaa

SEQ ID NO: 64793 - protein, 235 aa, Haemophilus influenzae R2846
MKNVMKLSVIALLTAAAVPAMAGKTEPYTQSSTNAREMLQEQAIHWISVDQIKQSLEGKAPINVSFDIDDTVLFSSPCFYHGQQKFSPGKHDYLKNQDFWNEVNAGCDKYSIPKQIAIDLINMHQARGDQVYFFTGRTAGKVDGVTPILEKTFNIKNMHPVEFMGSRERTTKYNKTPAIISHKVSIHYGDSDDDVLAAKEAGVRGIRLMRAANSTYQPMPTLGGYGEEVLINSSY

SEQ ID NO: 64794 - DNA, 708 bp, Haemophilus influenzae R2866
  CDS (1)..(708)
atgaaaaacgtcatgaaattatctgtaatcgcacttttaactgcagctgcagttccagcgatggcaggcaaaacagaaccttatactcaatctggcactaatgctcgtgaaatgttacaagagcaagcaattcattggattagtgttgatcaaatcaaacaaagtttagaaggtaaagcaccaattaatgtaagctttgatattgatgataccgtgcttttcagtagcccttgcttttaccacggacaacaaaaattctcaccaggtaaacacgattatttgaaaaaccaagatttctggaatgaagtaaatgcaggttgcgataaatattctattcctaaacaaattgccatagatttaattaatatgcaccaagcacgtggcgaccaagtttactttttcactggccgtactgctggcaaagtggatggtgtaacaccaattttagaaaaaacgttcaatattaagaatatgcacccagttgaatttatgggcagccgtgaacgtacaacaaaatataacaaaacgcctgcaatcatttcacataaagtgagtattcactatggcgacagcgatgatgatgtactagcagctaaagaagcaggtgttcgtggtattcgtttaatgcgtgccgcaaactctacttatcaaccaatgccaactttaggcggctatggcgaagaagtgttaatcaattcaagctattaa

SEQ ID NO: 64795 - protein, 235 aa, Haemophilus influenzae R2866
MKNVMKLSVIALLTAAAVPAMAGKTEPYTQSGTNAREMLQEQAIHWISVDQIKQSLEGKAPINVSFDIDDTVLFSSPCFYHGQQKFSPGKHDYLKNQDFWNEVNAGCDKYSIPKQIAIDLINMHQARGDQVYFFTGRTAGKVDGVTPILEKTFNIKNMHPVEFMGSRERTTKYNKTPAIISHKVSIHYGDSDDDVLAAKEAGVRGIRLMRAANSTYQPMPTLGGYGEEVLINSSY

SEQ ID NO: 64796 - DNA, 708 bp, Haemophilus influenzae 86-028NP
  misc_feature (637)..(637): n is a, c, g, or t
  CDS (1)..(708)
atgaaaaacggcataaaattatctgtcatcgcacttttaactgcagctgcagttccagcgatggcaggcaaaacagaaccttatactcaatctggcactaatgctcgtgaaatgttacaagagcaagcaattcattggattagtgttgatcaaatcaaacaaagtttagaaggtaaagcaccaattaatgtaagctttgatattgatgataccgtgcttttcagtagcccttgcttttaccacggacaacaaaaattctcaccaggtaaacacgattatttgaaaaaccaagatttctggaatgaagtaaatgcaggttgcgataaatattctattcctaaacaaattgccatagatttaattaatatgcaccaagcacgtggcgaccaagtttactttttcactggccgtactgctggcaaagtggatggtgtaaccccaattttagaaaaaacgttcaatattaagaatatgcacccagttgaatttatgggcagccgtgaacgtacaacaaaatataacaaaacgcctgcaatcatttcacataaagtgagtattcactatggcgacagcgatgatgatgtactagcagctaaagaagcaggtgttcgtggtattcgtttaatgcgtgccgcanactctacttatcaaccaatgccaactttaggcggctatggcgaagaagtgttaatcaattcaagctattaa

SEQ ID NO: 64797 - protein, 235 aa, Haemophilus influenzae 86-028NP
  misc_feature (213)..(213): Xaa can be any naturally occuring amino acid
MKNGIKLSVIALLTAAAVPAMAGKTEPYTQSGTNAREMLQEQAIHWISVDQIKQSLEGKAPINVSFDIDDTVLFSSPCFYHGQQKFSPGKHDYLKNQDFWNEVNAGCDKYSIPKQIAIDLINMHQARGDQVYFFTGRTAGKVDGVTPILEKTFNIKNMHPVEFMGSRERTTKYNKTPAIISHKVSIHYGDSDDDVLAAKEAGVRGIRLMRAAXSTYQPMPTLGGYGEEVLINSSY

SEQ ID NO: 64798 - DNA, 687 bp, Paracoccus denitrificans PD1222
  CDS (1)..(687): transl_table=11
atgtcgaaacgactgaccatgatcgcgctgctgcttgccgcctggcccgcgctggcagatgacgcctcgaacctcaatcccggggtcaccacctcggagctgctggcgaccgcgccggtgcattgggtctcggtcccgcagatcgcggccagccttgagggacagccgccgatggccgtgggcttcgacgtggacgatacggtgctgttctccacgccctgcttctattacggcaagaacaggtattcgcccggttccgaggattacctcaagatggacgagttctggaccgacatccacaccaacaactgcgaccagtattcgatgccgaaagaggttgcgcgcgaattgctggacatgcatgtggcgcgcggcgacgacatctatttcatcaccggccggaccaagggcagcggcgaggaaaccctgaccgcgacgctgcaaaagaccttcgaccttgaaaagatgcatgacgtggtctttaccgcctcgtcggaaaacaaggtgcagttcctgaaggatcacgggctgaagatctattacggcgacgccgacagcgacatgcgtgcggcgcttgaggcggggatccggcctatccgcgtcatgcgggcgcaaaactccagctacaagcccgacccgcgcaacggcagtttcggcgaagaggtcatcgtcaattcgacccagtag

SEQ ID NO: 64799 - protein, 228 aa, Paracoccus denitrificans PD1222
MSKRLTMIALLLAAWPALADDASNLNPGVTTSELLATAPVHWVSVPQIAASLEGQPPMAVGFDVDDTVLFSTPCFYYGKNRYSPGSEDYLKMDEFWTDIHTNNCDQYSMPKEVARELLDMHVARGDDIYFITGRTKGSGEETLTATLQKTFDLEKMHDVVFTASSENKVQFLKDHGLKIYYGDADSDMRAALEAGIRPIRVMRAQNSSYKPDPRNGSFGEEVIVNSTQ

SEQ ID NO: 64800 - DNA, 525 bp, Shigella boydii BS512
  CDS (1)..(525)
atggcggtggggtttgatatcgatgacacggtacttttttccagcccgggcttctggcgcggcaaaaaaaacttctcgccagaaagcgaagattatctgaaaaatcctgtgttctgggaaaaaatgaacaatggctgggatgaattcagcattccaaaagaggtcgctcgccagctgattgatatgcatgtacgccgcggtgacgcgatcttctttgtgactggtcgtagtccgacgaaaacagaaacggtttcaaaaacgctggcggataattttcatattcctgccaccaacatgaatccggtgatctttgcgggcgataaaccagggcaaaatacaaaatcgcaatggctgcaggataaaaatatccgaattttttatggcgattctgataatgatattaccgccgcacgcgatgtcggcgctcgtggtatccgcattctgcgcgcctccaactctacctacaaacccttgccacaagcgggtgcgtttggtgaagaggtgatcgtcaattcagaatactga

SEQ ID NO: 64801 - protein, 174 aa, Shigella boydii BS512
MAVGFDIDDTVLFSSPGFWRGKKNFSPESEDYLKNPVFWEKMNNGWDEFSIPKEVARQLIDMHVRRGDAIFFVTGRSPTKTETVSKTLADNFHIPATNMNPVIFAGDKPGQNTKSQWLQDKNIRIFYGDSDNDITAARDVGARGIRILRASNSTYKPLPQAGAFGEEVIVNSEY

SEQ ID NO: 64802 - DNA, 525 bp, Escherichia coli B7A
  CDS (1)..(525)
atggcggtggggtttgatatcgatgacacggtacttttttccagcccgggcttctggcgcggcaaaaaaaccttctcaccagaaagcgaagattatctgaaaaatcctgtgttctgggaaaaaatgaacaatggctgggatgaattcagcattccaaaagaggtcgctcgccagctgattgatatgcatgtacgccgcggtgacgcgatcttctttgtgactggtcgtagcccgacgaaaacagaaacggtttcaaaaacgctggcggataattttcatattcctgtcaccaacatgaatccggtgatctttgcgggcgataaaccagggcaaaatacaaaatcgcaatggctgcaggataaaaatatccgaattttttatggcgattccgataacgatattaccgccgcacgcgatgtcggcgcttgtggtatccgcattctgcgcgcctccaactctacctacaaacccttgccacaagcgggtgcgtttggtgaagaggtgatcgtcaattcagaatactga

SEQ ID NO: 64803 - protein, 174 aa, Escherichia coli B7A
MAVGFDIDDTVLFSSPGFWRGKKTFSPESEDYLKNPVFWEKMNNGWDEFSIPKEVARQLIDMHVRRGDAIFFVTGRSPTKTETVSKTLADNFHIPVTNMNPVIFAGDKPGQNTKSQWLQDKNIRIFYGDSDNDITAARDVGACGIRILRASNSTYKPLPQAGAFGEEVIVNSEY

SEQ ID NO: 64804 - DNA, 693 bp, Escherichia coli E22
  CDS (1)..(693)
atgcgcaagatcacacaggcaatcagtgccgtttgcttattgtttgctctaaacagttccgctgttgccctggcctcatctccttcaccgcttaaccctgggactaacgttgccaggcttgctgaacaggcacccattcattgggtttcggtcgcacaaattgaaaatagcctcgcagggcgtccgccaatggcggtggggtttgatatcgatgacacggtacttttttccagtccgggcttctggcgcggcaaaaaaaccttctcgccagaaagcgaagattatctgaaaaatcctgtgttctgggaaaaaatgaacaatggctgggatgaattcagcattccaaaagaggtcgctcgccagctgattgatatgcatgtacgccgcggtgacgcgatcttctttgtgactggtcgtagtccgacgaaaacagaaacggtttcaaaaacgctggcggataattttcatattcctgccaccaacatgaatccggtgatctttgcgggcgataaaccagggcaaaatacaaaatcgcaatggctgcaggataaaaatatccgaatttttatggcgattctgataatgatattaccgccgcacgcgatgtcggcgctcgtggtatccgcattctgcgcgcctccaactctacctacaaacccttgccacaagcgggtgcgtttggtgaagaggtga

SEQ ID NO: 64805 - protein, 230 aa, Escherichia coli E22
MRKITQAISAVCLLFALNSSAVALASSPSPLNPGTNVARLAEQAPIHWVSVAQIENSLAGRPPMAVGFDIDDTVLFSSPGFWRGKKTFSPESEDYLKNPVFWEKMNNGWDEFSIPKEVARQLIDMHVRRGDAIFFVTGRSPTKTETVSKTLADNFHIPATNMNPVIFAGDKPGQNTKSQWLQDKNIRIFMAILIMILPPHAMSALVVSAFCAPPTLPTNPCHKRVRLVKR

SEQ ID NO: 64806 - DNA, 732 bp, Actinobacillus succinogenes 130Z
  CDS (1)..(732): transl_table=11
atgtcattgattaaatcaagcgtttttatgttcagtatgctgactatcgctgtatctgcaaatgcgaaagggcctaaggtgagttacgatcatgcgggtattaccgctatcgatcataaaaatgaagcacaggtaaaatgggtttcggcggaatccattcaaaaagaattaaagggtaaaccgcctattacggtgagttttgatattgatgataccgtattggtttcttcacaatgtttctattacggcaaacaaactttttcaccggatagtctggattatttacataatcaggcatattgggattttgtagcggacggctgtgacaattattcgattccgaaagaatctgcaaaaaaattaattgatatgcaccaagcacgcggtgatcaggtcatttttattaccggccgtacgccgcatcgattacataaagcagggcaaatggatcaattagcccgcattctcgaacgtgcgtttcatattaaaaatatgaaaccgatcaactatacccatgacaaaccgattgcaccgtataaatacgataaaacccgttttatggttgaaaaccgcgtcagcattcattatggcgacagcaacgatgatatattggctgcacgtgaagccggaattcgcggcatccgtgttattcgatcggcaaccagcactaaccgcccgttaccgctgaacggcggttacggcgaagaagtggtcgaggattcgtcatattaa

SEQ ID NO: 64807 - protein, 243 aa, Actinobacillus succinogenes 130Z
MSLIKSSVFMFSMLTIAVSANAKGPKVSYDHAGITAIDHKNEAQVKWVSAESIQKELKGKPPITVSFDIDDTVLVSSQCFYYGKQTFSPDSLDYLHNQAYWDFVADGCDNYSIPKESAKKLIDMHQARGDQVIFITGRTPHRLHKAGQMDQLARILERAFHIKNMKPINYTHDKPIAPYKYDKTRFMVENRVSIHYGDSNDDILAAREAGIRGIRVIRSATSTNRPLPLNGGYGEEVVEDSSY

SEQ ID NO: 64808 - DNA, 525 bp, Escherichia coli 53638
  CDS (1)..(525)
atggcggtggggtttgatatcgatgacacggtacttttttccagtccgggcttctggcgcggcaaaaaaaccttctcgccagaaagcgaagattatctgaaaaatcctgtgttctgggaaaaaatgaacaatggctgggatgaattcagcattccaaaagaggtcgctcgccagctgattgatatgcatgtacgccgcggtgacgcgatcttctttgtgactggtcgtagcccgacgaaaacagaaacggtttcaaaaacgctggcggataattttcatattcctgccaccagcatgaatccggtgatctttgcgggcgataaaccagggcaaaatacaaaatcgcaatggctgcaggataaaaatatccgaattttttatggcgattccgataacgatattaccgccgcacgcgatgtcggcgctcgtggtatccgcattctgcgcgcctccaactctacctacaaacccttgccacaagcgggtgcgtttggtgaagaggtgatcgtcaattcagaatactga

SEQ ID NO: 64809 - protein, 174 aa, Escherichia coli 53638
MAVGFDIDDTVLFSSPGFWRGKKTFSPESEDYLKNPVFWEKMNNGWDEFSIPKEVARQLIDMHVRRGDAIFFVTGRSPTKTETVSKTLADNFHIPATSMNPVIFAGDKPGQNTKSQWLQDKNIRIFYGDSDNDITAARDVGARGIRILRASNSTYKPLPQAGAFGEEVIVNSEY

SEQ ID NO: 64810 - DNA, 714 bp, Salmonella typhimurium
  CDS (1)..(714): transl_table=11
atgaaaaaaataaccctggcgctgagtgccgtctgtttgttgtttacgctaaaccattccgcgaatgcgttagtatcttccccttcgacgctcaatccgggcactaatgttgcaaaactcgcggaacaagcgcctgtccattgggtctctgtcgcccagattgaaaacagcctcaccggacgcccgccgatggcggtcggctttgatattgacgacaccgtgttattttccagccctggattctggcgcggaaagaaaacctactccccggacagcgacgattatctgaaaaatccggccttttgggaaaaaatgaacaacggctgggatgagttcagtattccaaaagaagcggcccgacagctcattgatatgcatgttcgccgtggcgacagtatttactttgtcactggtcgtagtcagacgaaaacggaaaccgtgtcgaaaacgctggcggataacttccatattccggcggcgaatatgaatccggtgattttcgccggcgataaaccggaacaaaatacgaaagtacagtggctgcaggagaagaacatgcgtatcttctacggcgattcggataacgatattaccgcggcccgtgattgtggtatccgcggtattcgcatcctgcgcgcggctaactccacctacaaaccgctgccgcaggcaggagcgtttggcgaggaagtcattgtcaactcggagtactaa

SEQ ID NO: 64811 - protein, 237 aa, Salmonella typhimurium
MKKITLALSAVCLLFTLNHSANALVSSPSTLNPGTNVAKLAEQAPVHWVSVAQIENSLTGRPPMAVGFDIDDTVLFSSPGFWRGKKTYSPDSDDYLKNPAFWEKMNNGWDEFSIPKEAARQLIDMHVRRGDSIYFVTGRSQTKTETVSKTLADNFHIPAANMNPVIFAGDKPEQNTKVQWLQEKNMRIFYGDSDNDITAARDCGIRGIRILRAANSTYKPLPQAGAFGEEVIVNSEY

SEQ ID NO: 64812 - DNA, 714 bp, Klebsiella pneumoniae
  CDS (1)..(714): transl_table=11
atgcgcaaacttactctcgcccttgcggcggcttctctcctgttcacgctgaacagcgccgtagtagcgcgcgcctccacgccacagccgctgtgggtcggcaccaacgtggcccagctggccgagcaggcgccgatccactgggtttcggtggcgcaaattgagaacagcctgctggggcgtccgccgatagccgtcggctttgatatcgatgacaccgttctcttctccagtcctgggttctcgcgcgggcaaaaaaccttctcccccggcagtgaggattacctgaaaaacccgcagttctgggaaaaaatgaacaacggctgggacgaattcagcatgccaaaagaggtcgcgcgccacctgattgccatgcatgtgaagcgtggcgacagcatctggtttgtgaccggccgcagccagaccaaaacagaaaccgtttctaaaaccctgcaggatgattttcttatcccggccgccaatatgaacccggtgattttcgctggcgataagccgggtcagaataccaagacccagtggctgcaggcgaagcagataaaggttttctatggcgactcggataacgatattaccgccgcccgcgaggcgggcgcccgcgggatccgcgtgctgcgtgccgccaactcctcctataagccgctgccgatggccggcgcgctgggcgaagaagtgatcgtcaattccgaatactga

SEQ ID NO: 64813 - protein, 237 aa, Klebsiella pneumoniae
MRKLTLALAAASLLFTLNSAVVARASTPQPLWVGTNVAQLAEQAPIHWVSVAQIENSLLGRPPIAVGFDIDDTVLFSSPGFSRGQKTFSPGSEDYLKNPQFWEKMNNGWDEFSMPKEVARHLIAMHVKRGDSIWFVTGRSQTKTETVSKTLQDDFLIPAANMNPVIFAGDKPGQNTKTQWLQAKQIKVFYGDSDNDITAAREAGARGIRVLRAANSSYKPLPMAGALGEEVIVNSEY

SEQ ID NO: 64814 - DNA, 711 bp, Morganella morganii
  CDS (1)..(711): transl_table=11
atgcgtaaactgaccctcaccctgagtgccctggcactcgctctgagcctcaacagtgtggctgatgccaaagtgtacatgccggaaaaagtcagtgacggcgtgaccgttgctcagctggcagaacagcatgccattcactggatttcggttgaacagattgaagagagcctgaaagggcagccgatggcggtgggctttgatattgacgacactgtcttattctcaagcccgggcttttaccgcggcaaactggaatactccccgaacgactacagttatctgaaaaacccggaattctgggaaaaaatgaataatgagtgggataaattcagtatgccgaaaaaatccggtatggaactggttcagatgcacctgaaacgtggtgataccgtttatttcatcaccgggcgcagcaaaaccaaaacagaaacggtcaccaaatatgttcaggaagggctgcgtatcccggcagataaaatgaacccggttatttttgccggtgatgaggaagggcagaataataaagtcagctggatgcgtgatcacaaactgaaaatttattacggtgatgcggatgccgatattgccgcagcacgggaactgaatatccgcggtatccgggtattacgcgcttcgaactcctcgtatcagccgctgccgaaagccggtcagttcggcgaggaagtggttattaattccgaatattaa

SEQ ID NO: 64815 - protein, 236 aa, Morganella morganii
MRKLTLTLSALALALSLNSVADAKVYMPEKVSDGVTVAQLAEQHAIHWISVEQIEESLKGQPMAVGFDIDDTVLFSSPGFYRGKLEYSPNDYSYLKNPEFWEKMNNEWDKFSMPKKSGMELVQMHLKRGDTVYFITGRSKTKTETVTKYVQEGLRIPADKMNPVIFAGDEEGQNNKVSWMRDHKLKIYYGDADADIAAARELNIRGIRVLRASNSSYQPLPKAGQFGEEVVINSEY

SEQ ID NO: 64816 - DNA, 714 bp, Salmonella typhi
  CDS (1)..(714): transl_table=11
atgaaaaaaataaccctggcgctgagcgccgtctgtttattgtttacgctaaaccattccgcgaatgcgttagtatcttccccttcgacgctcaatccgggcactaatgttgcaaaactcgcggaacaagcacctgtccattgggtctctgtcgcccagattgaaaacagcctgaccggacgcccgccgatggcggtcggctttgatattgacgacaccgtgttattttccagccccggattctggcgcggaaagaaaacctattccccggacagcgacgattatctgaaaaatccggccttttgggaaaaaatgaacaacggctgggatgagttcagtattccaaaagaagtggcccgacagctcattgatatgcatgttcgccgtggcgacagtatttactttgtcactggtcgtagtcagacgaaaacggaaactgtgtcgaaaacgctggcggataacttccatattccggcggcgaatatgaatccggtgattttcgccggcgataaaccgggacaaaatacgaaagtccagtggctgcaggagaagaacatgcgtatcttctacggcgattcggataacgatattaccgcagctcgtgattgtggtatccgcggtattcgtatcctgcgcgcggctaactccacctacaaaccgctgccgcaggcaggagcgtttggcgaggaagtcattgtcaactcggagtactaa

SEQ ID NO: 64817 - protein, 237 aa, Salmonella typhi
MKKITLALSAVCLLFTLNHSANALVSSPSTLNPGTNVAKLAEQAPVHWVSVAQIENSLTGRPPMAVGFDIDDTVLFSSPGFWRGKKTYSPDSDDYLKNPAFWEKMNNGWDEFSIPKEVARQLIDMHVRRGDSIYFVTGRSQTKTETVSKTLADNFHIPAANMNPVIFAGDKPGQNTKVQWLQEKNMRIFYGDSDNDITAARDCGIRGIRILRAANSTYKPLPQAGAFGEEVIVNSEY

SEQ ID NO: 64818 - DNA, 714 bp, Salmonella typhimurium
  CDS (1)..(714): transl_table=11
atgaaaaaaataaccctggcgctgagtgccgtctgtttgttgtttacgctaaaccattccgcgaatgcgttagtatcttccccttcgacgctcaatccgggcactaatgttgcaaaactcgcggaacaagcgcctgtccattgggtctctgtcgcccagattgaaaacagcctcaccggacgcccgccgatggcggtcggctttgatattgacgacaccgtgttattttccagccccggattctggcgcggaaagaaaacctactccccggacagcgacgattatctgaaaaatccggccttttgggaaaaaatgaacaacggctgggatgagttcagtattccaaaagaagtggcccgacagctcattgatatgcatgttcgccgtggcgacagtatttactttgtcactggtcgtagtcagacgaaaacggaaaccgtgtcgaaaacgctggcggataacttccatattccggcggcgaatatgaatccggtgattttcgccggcgataaaccggaacaaaatacgaaagtacagtggctgcaggagaagaacatgcgtatcttctacggcgattcggataacgatattaccgcggcccgtgattgtggtatccgcggtattcgcatcctgcgcgcggctaactccacctacaaaccgctgccgcaggcaggagcgtttggcgaggaagtcattgtcaactcggagtactaa

SEQ ID NO: 64819 - protein, 237 aa, Salmonella typhimurium
MKKITLALSAVCLLFTLNHSANALVSSPSTLNPGTNVAKLAEQAPVHWVSVAQIENSLTGRPPMAVGFDIDDTVLFSSPGFWRGKKTYSPDSDDYLKNPAFWEKMNNGWDEFSIPKEVARQLIDMHVRRGDSIYFVTGRSQTKTETVSKTLADNFHIPAANMNPVIFAGDKPEQNTKVQWLQEKNMRIFYGDSDNDITAARDCGIRGIRILRAANSTYKPLPQAGAFGEEVIVNSEY

SEQ ID NO: 64820 - DNA, 23 bp, Artificial sequence
  Primer sequence
atgcgcaagatcacacaggcaat

SEQ ID NO: 64821 - DNA, 27 bp, Artificial sequence
  Primer sequence
ttagtattctgaattgacgatcacctc

SEQ ID NO: 64822 - protein, 196 aa, Artificial sequence
  Consensus
  Variant (2)..(4): Xaa in position 2 to 4 is any amino acid
  Variant (6)..(8): Xaa in position 6 to 8 is any amino acid
  Variant (10)..(10): Xaa in position 10 is any amino acid
  Variant (12)..(13): Xaa in position 12 to 13 is any amino acid
  Variant (14)..(16): Xaa in position 14 to 16 is any or no amino acid
  Variant (18)..(18): Xaa in position 18 is any amino acid
  Variant (31)..(31): Xaa in position 31 is any amino acid
  Variant (33)..(34): Xaa in position 33 to 34 is any amino acid
  Variant (36)..(39): Xaa in position 36 to 39 is any amino acid
  Variant (42)..(44): Xaa in position 42 to 44 is any amino acid
  Variant (50)..(51): Xaa in position 50 to 51 is any amino acid
  Variant (54)..(60): Xaa in position 54 to 60 is any amino acid
  Variant (61)..(61): Xaa in position 61 is any or no amino acid
  Variant (63)..(64): Xaa in position 63 to 64 is any amino acid
  Variant (69)..(70): Xaa in position 69 to 70 is any amino acid
  Variant (72)..(73): Xaa in position 72 to 73 is any amino acid
  Variant (76)..(76): Xaa in position 76 is any amino acid
  Variant (79)..(80): Xaa in position 79 to 80 is any amino acid
  Variant (84)..(86): Xaa in position 84 to 86 is any amino acid
  Variant (88)..(88): Xaa in position 88 is any amino acid
  Variant (92)..(101): Xaa in position 92 to 101 is any amino acid
  Variant (102)..(108): Xaa in position 102 to 108 is any or no amino acid
  Variant (110)..(112): Xaa in position 110 to 112 is any amino acid
  Variant (114)..(114): Xaa in position 114 is any amino acid
  Variant (116)..(131): Xaa in position 116 to 131 is any amino acid
  Variant (132)..(135): Xaa in position 132 to 135 is any or no amino acid
  Variant (137)..(146): Xaa in position 137 to 146 is any amino acid
  Variant (148)..(148): Xaa in position 148 is any amino acid
  Variant (154)..(154): Xaa in position 154 is any amino acid
  Variant (156)..(157): Xaa in position 156 to 157 is any amino acid
  Variant (160)..(162): Xaa in position 160 to 162 is any amino acid
  Variant (164)..(164): Xaa in position 164 is any amino acid
  Variant (166)..(166): Xaa in position 166 is any amino acid
  Variant (169)..(170): Xaa in position 169 to 170 is any amino acid
  Variant (173)..(173): Xaa in position 173 is any amino acid
  Variant (176)..(178): Xaa in position 176 to 178 is any amino acid
  Variant (180)..(180): Xaa in position 180 is any amino acid
  Variant (182)..(183): Xaa in position 182 to 183 is any amino acid
  Variant (185)..(186): Xaa in position 185 to 186 is any amino acid
  Variant (191)..(192): Xaa in position 191 to 192 is any amino acid
  Variant (195)..(195): Xaa in position 195 is any amino acid
SXXXIXXXLXGXXXXXVXFDIDDTVLFSSPXFXXGXXXXSPXXXDYLKNXXFWXXXXXXXXDXXSIPKXXAXXLIXMHXXRGDXXXFXTGRXXXXXXXXXXXXXXXXXLXXXFXIXXXXXXXXXXXXXXXXXXXXKXXXXXXXXXXIXYGDSDXDXXAAXXXGXRXIRXXRAXNSXXXPXPXXGXXGEEVXXNSXY

SEQ ID NO: 64823 - protein, 19 aa, Artificial sequence
  Consensus
  Variant (2)..(2): Xaa in position 2 is Gly or Ser
  Variant (5)..(5): Xaa in position 5 is Ile or Val
  Variant (13)..(13): Xaa in position 13 is Ser or Thr
  Variant (15)..(15): Xaa in position 15 is Cys or Gly
  Variant (17)..(18): Xaa in position 17 to 18 is any amino acid
VXFDXDDTVLFSXPXFXXG

SEQ ID NO: 64824 - protein, 19 aa, Artificial sequence
  Consensus
  Variant (2)..(2): Xaa in position 2 is Pro or Gln
  Variant (3)..(3): Xaa in position 3 is any amino acid
  Variant (4)..(4): Xaa in position 4 is Phe or Tyr
  Variant (6)..(6): Xaa in position 6 is Asp, Glu or Asn
  Variant (7)..(7): Xaa in position 7 is any amino acid
  Variant (8)..(8): Xaa in position 8 is Met or Val
  Variant (9)..(9): Xaa in position 9 is Ala or Asn
  Variant (10)..(10): Xaa in position 10 is Ala, Asp or Asn
  Variant (11)..(11): Xaa in position 11 is Glu or Gly
  Variant (12)..(12): Xaa in position 12 is any amino acid
  Variant (14)..(14): Xaa in position 14 is any amino acid
  Variant (15)..(15): Xaa in position 15 is Phe or Tyr
  Variant (17)..(17): Xaa in position 17 is Ile or Met
NXXXWXXXXXXXDXXSXPK

SEQ ID NO: 64825 - protein, 18 aa, Artificial sequence
  Consensus
  Variant (3)..(3): Xaa in position 3 is Ala, Asp or Asn
  Variant (6)..(7): Xaa in position 6 to 7 is any amino acid
  Variant (11)..(11): Xaa in position 11 is any amino acid
  Variant (12)..(12): Xaa in position 12 is Ile or Val
  Variant (13)..(13): Xaa in position 13 is any amino acid
  Variant (15)..(15): Xaa in position 15 is Phe, Ile or Val
LIXMHXXRGDXXXFXTGR

SEQ ID NO: 64826 - DNA, 1113 bp, Saccharomyces cerevisiae; identical to SEQ ID NO: 1363
  CDS (1)..(1113)

SEQ ID NO: 64827 - protein, 370 aa, Saccharomyces cerevisiae; identical to SEQ ID NO: 1364

SEQ ID NO: 64828 - DNA, 1086 bp, Deinococcus radiodurans; identical to SEQ ID NO: 1327
  CDS (1)..(1086)

SEQ ID NO: 64829 - protein, 361 aa, Deinococcus radiodurans; identical to SEQ ID NO: 1328

SEQ ID NO: 64830 - DNA, 1071 bp, Salmonella enterica subsp. enterica serovar Typhi; identical to SEQ ID NO: 2245
  CDS (1)..(1071)

SEQ ID NO: 64831 - protein, 356 aa, Salmonella enterica subsp. enterica serovar Typhi; identical to SEQ ID NO: 2246

SEQ ID NO: 64832 - DNA, 1071 bp, Yersinia pestis; identical to SEQ ID NO: 2247
  CDS (1)..(1071)

SEQ ID NO: 64833 - protein, 356 aa, Yersinia pestis; identical to SEQ ID NO: 2248

SEQ ID NO: 64834 - DNA, 1047 bp, Yersinia pestis; identical to SEQ ID NO: 1331
  CDS (1)..(1047)

SEQ ID NO: 64835 - protein, 348 aa, Yersinia pestis; identical to SEQ ID NO: 1332

SEQ ID NO: 64836 - DNA, 1053 bp, Escherichia coli; identical to SEQ ID NO: 2251
  CDS (1)..(1053)

SEQ ID NO: 64837 - protein, 350 aa, Escherichia coli; identical to SEQ ID NO: 1580

SEQ ID NO: 64838 - DNA, 1071 bp, Escherichia coli; identical to SEQ ID NO: 1333
  CDS (1)..(1071)

SEQ ID NO: 64839 - protein, 356 aa, Escherichia coli; identical to SEQ ID NO: 1334

SEQ ID NO: 64840 - DNA, 1131 bp, Nostoc sp. PCC 7120; identical to SEQ ID NO: 1335
  CDS (1)..(1131)

SEQ ID NO: 64841 - protein, 376 aa, Nostoc sp. PCC 7120; identical to SEQ ID NO: 1336

SEQ ID NO: 64842 - DNA, 1053 bp, Salmonella enterica subsp. enterica serovar Typhi; identical to SEQ ID NO: 1337
  CDS (1)..(1053)

SEQ ID NO: 64843 - protein, 350 aa, Salmonella enterica subsp. enterica serovar Typhi; identical to SEQ ID NO: 1338

SEQ ID NO: 64844 - DNA, 1077 bp, Pseudomonas aeruginosa; identical to SEQ ID NO: 1339
  CDS (1)..(1077)

SEQ ID NO: 64845 - protein, 358 aa, Pseudomonas aeruginosa; identical to SEQ ID NO: 1340

SEQ ID NO: 64846 - DNA, 1074 bp, Vibrio cholerae; identical to SEQ ID NO: 1343
  CDS (1)..(1074)

SEQ ID NO: 64847 - protein, 357 aa, Vibrio cholerae; identical to SEQ ID NO: 1344

SEQ ID NO: 64848 - DNA, 1038 bp, Lactococcus lactis subsp. lactis; identical to SEQ ID NO: 1345
  CDS (1)..(1038)

SEQ ID NO: 64849 - protein, 345 aa, Lactococcus lactis subsp. lactis; identical to SEQ ID NO: 1346

SEQ ID NO: 64850 - DNA, 1023 bp, Lactococcus lactis subsp. lactis; identical to SEQ ID NO: 1347
  CDS (1)..(1023)

SEQ ID NO: 64851 - protein, 340 aa, Lactococcus lactis subsp. lactis; identical to SEQ ID NO: 1348

SEQ ID NO: 64852 - DNA, 1032 bp, Streptococcus pneumoniae; identical to SEQ ID NO: 1349
  CDS (1)..(1032)

SEQ ID NO: 64853 - protein, 343 aa, Streptococcus pneumoniae; identical to SEQ ID NO: 1350

SEQ ID NO: 64854 - DNA, 1056 bp, Neisseria meningitidis; identical to SEQ ID NO: 2269
  CDS (1)..(1056)

SEQ ID NO: 64855 - protein, 351 aa, Neisseria meningitidis; identical to SEQ ID NO: 2270

SEQ ID NO: 64856 - DNA, 1095 bp, Pseudomonas aeruginosa; identical to SEQ ID NO: 1351
  CDS (1)..(1095)

SEQ ID NO: 64857 - protein, 364 aa, Pseudomonas aeruginosa; identical to SEQ ID NO: 1352

SEQ ID NO: 64858 - DNA, 1032 bp, Streptococcus pneumoniae; identical to SEQ ID NO: 1355
  CDS (1)..(1032)

SEQ ID NO: 64859 - protein, 343 aa, Streptococcus pneumoniae; identical to SEQ ID NO: 1356

SEQ ID NO: 64860 - DNA, 1143 bp, Xylella fastidiosa; identical to SEQ ID NO: 1603
  CDS (1)..(1143)

SEQ ID NO: 64861 - protein, 380 aa, Xylella fastidiosa; identical to SEQ ID NO: 1604

SEQ ID NO: 64862 - DNA, 1047 bp, Buchnera aphidicola; identical to SEQ ID NO: 1357
  CDS (1)..(1047)

SEQ ID NO: 64863 - protein, 348 aa, Buchnera aphidicola; identical to SEQ ID NO: 1358

SEQ ID NO: 64864 - DNA, 1104 bp, Corynebacterium glutamicum; identical to SEQ ID NO: 2279
  CDS (1)..(1104)

SEQ ID NO: 64865 - protein, 367 aa, Corynebacterium glutamicum; identical to SEQ ID NO: 2280

SEQ ID NO: 64866 - DNA, 1089 bp, Haemophilus influenzae; identical to SEQ ID NO: 1359
  CDS (1)..(1089)

SEQ ID NO: 64867 - protein, 362 aa, Haemophilus influenzae; identical to SEQ ID NO: 1360

SEQ ID NO: 64868 - DNA, 1502 bp, Candida albicans; identical to SEQ ID NO: 1361
  CDS (336)..(1442)

SEQ ID NO: 64869 - protein, 368 aa, Candida albicans; identical to SEQ ID NO: 1362

SEQ ID NO: 64870 - DNA, 2048 bp, Saccharomyces cerevisiae; identical to SEQ ID NO: 1365
  CDS (619)..(1731)

SEQ ID NO: 64871 - protein, 370 aa, Saccharomyces cerevisiae; identical to SEQ ID NO: 1366

SEQ ID NO: 64872 - DNA, 1107 bp, Schizosaccharomyces pombe; identical to SEQ ID NO: 1367
  CDS (1)..(1107)

SEQ ID NO: 64873 - protein, 368 aa, Schizosaccharomyces pombe; identical to SEQ ID NO: 1368

SEQ ID NO: 64874 - DNA, 1089 bp, Amycolatopsis orientalis; identical to SEQ ID NO: 1369
  CDS (1)..(1089)

SEQ ID NO: 64875 - protein, 362 aa, Amycolatopsis orientalis; identical to SEQ ID NO: 1370

SEQ ID NO: 64876 - DNA, 1119 bp, Schizosaccharomyces pombe; identical to SEQ ID NO: 1371
  CDS (1)..(1119)

SEQ ID NO: 64877 - protein, 372 aa, Schizosaccharomyces pombe; identical to SEQ ID NO: 1372

SEQ ID NO: 64878 - DNA, 1083 bp, Methylophilus methylotrophus; identical to SEQ ID NO: 1375
  CDS (1)..(1083)

SEQ ID NO: 64879 - protein, 360 aa, Methylophilus methylotrophus; identical to SEQ ID NO: 1376

SEQ ID NO: 64880 - DNA, 1770 bp, Debaryomyces hansenii; identical to SEQ ID NO: 2295
  CDS (1)..(1770)

SEQ ID NO: 64881 - protein, 589 aa, Debaryomyces hansenii; identical to SEQ ID NO: 2296

SEQ ID NO: 64882 - DNA, 1107 bp, Debaryomyces hansenii; identical to SEQ ID NO: 1377
  CDS (1)..(1107)

SEQ ID NO: 64883 - protein, 368 aa, Debaryomyces hansenii; identical to SEQ ID NO: 1378

SEQ ID NO: 64884 - DNA, 1074 bp, Yarrowia lipolytica; identical to SEQ ID NO: 1379
  CDS (1)..(1074)

SEQ ID NO: 64885 - protein, 357 aa, Yarrowia lipolytica; identical to SEQ ID NO: 1380

SEQ ID NO: 64886 - DNA, 1089 bp, Yarrowia lipolytica; identical to SEQ ID NO: 1381
  CDS (1)..(1089)

SEQ ID NO: 64887 - protein, 362 aa, Yarrowia lipolytica; identical to SEQ ID NO: 1382

SEQ ID NO: 64888 - DNA, 1119 bp, Kluyveromyces lactis; identical to SEQ ID NO: 1383
  CDS (1)..(1119)

SEQ ID NO: 64889 - protein, 372 aa, Kluyveromyces lactis; identical to SEQ ID NO: 1384

SEQ ID NO: 64890 - DNA, 1095 bp, Kluyveromyces lactis; identical to SEQ ID NO: 1385
  CDS (1)..(1095)

SEQ ID NO: 64891 - protein, 364 aa, Kluyveromyces lactis; identical to SEQ ID NO: 1386

SEQ ID NO: 64892 - DNA, 1074 bp, Erwinia carotovora subsp; identical to SEQ ID NO: 1387
  CDS (1)..(1074)

SEQ ID NO: 64893 - protein, 357 aa, Erwinia carotovora subsp; identical to SEQ ID NO: 1388

SEQ ID NO: 64894 - DNA, 1047 bp, Erwinia carotovora subsp; identical to SEQ ID NO: 1389
  CDS (1)..(1047)

SEQ ID NO: 64895 - protein, 348 aa, Erwinia carotovora subsp; identical to SEQ ID NO: 1390

SEQ ID NO: 64896 - DNA, 1056 bp, Erwinia carotovora subsp; identical to SEQ ID NO: 1391
  CDS (1)..(1056)

SEQ ID NO: 64897 - protein, 351 aa, Erwinia carotovora subsp; identical to SEQ ID NO: 1392

SEQ ID NO: 64898 - DNA, 1113 bp, Acinetobacter sp; identical to SEQ ID NO: 1393
  CDS (1)..(1113)

SEQ ID NO: 64899 - protein, 370 aa, Acinetobacter sp; identical to SEQ ID NO: 1394

SEQ ID NO: 64900 - DNA, 1056 bp, Acinetobacter sp; identical to SEQ ID NO: 1395
  CDS (1)..(1056)

SEQ ID NO: 64901 - protein, 351 aa, Acinetobacter sp; identical to SEQ ID NO: 1396

SEQ ID NO: 64902 - DNA, 1119 bp, Candida glabrata; identical to SEQ ID NO: 1397
  CDS (1)..(1119)

SEQ ID NO: 64903 - protein, 372 aa, Candida glabrata; identical to SEQ ID NO: 1398

SEQ ID NO: 64904 - DNA, 1071 bp, Candida glabrata; identical to SEQ ID NO: 1399
  CDS (1)..(1071)

SEQ ID NO: 64905 - protein, 356 aa, Candida glabrata; identical to SEQ ID NO: 1400

SEQ ID NO: 64906 - DNA, 1083 bp, Photobacterium profundum; identical to SEQ ID NO: 1401
  CDS (1)..(1083)

SEQ ID NO: 64907 - protein, 360 aa, Photobacterium profundum; identical to SEQ ID NO: 1402

SEQ ID NO: 64908 - DNA, 1053 bp, Photobacterium profundum; identical to SEQ ID NO: 1403
  CDS (1)..(1053)

SEQ ID NO: 64909 - protein, 350 aa, Photobacterium profundum; identical to SEQ ID NO: 1404

SEQ ID NO: 64910 - DNA, 1113 bp, Photobacterium profundum; identical to SEQ ID NO: 1405
  CDS (1)..(1113)

SEQ ID NO: 64911 - protein, 370 aa, Photobacterium profundum; identical to SEQ ID NO: 1406

SEQ ID NO: 64912 - DNA, 1056 bp, Photobacterium profundum; identical to SEQ ID NO: 1407
  CDS (1)..(1056)

SEQ ID NO: 64913 - protein, 351 aa, Photobacterium profundum; identical to SEQ ID NO: 1408

SEQ ID NO: 64914 - DNA, 1092 bp, Parachlamydia sp; identical to SEQ ID NO: 1409
  CDS (1)..(1092)

SEQ ID NO: 64915 - protein, 363 aa, Parachlamydia sp; identical to SEQ ID NO: 1410

SEQ ID NO: 64916 - DNA, 1095 bp, Rhodopseudomonas palustris; identical to SEQ ID NO: 1411
  CDS (1)..(1095)

SEQ ID NO: 64917 - protein, 364 aa, Rhodopseudomonas palustris; identical to SEQ ID NO: 1412

SEQ ID NO: 64918 - DNA, 1100 bp, Amycolatopsis methanolica; identical to SEQ ID NO: 1413
  CDS (1)..(1086)

SEQ ID NO: 64919 - protein, 361 aa, Amycolatopsis methanolica; identical to SEQ ID NO: 1414

SEQ ID NO: 64920 - DNA, 1071 bp, Treponema denticola; identical to SEQ ID NO: 1415
  CDS (1)..(1071)

SEQ ID NO: 64921 - protein, 356 aa, Treponema denticola; identical to SEQ ID NO: 1416

SEQ ID NO: 64922 - DNA, 1068 bp, Geobacter sulfurreducens; identical to SEQ ID NO: 1417
  CDS (1)..(1068)

SEQ ID NO: 64923 - protein, 355 aa, Geobacter sulfurreducens; identical to SEQ ID NO: 1418

SEQ ID NO: 64924 - DNA, 1095 bp, Ashbya gossypii; identical to SEQ ID NO: 1419
  CDS (1)..(1095)

SEQ ID NO: 64925 - protein, 364 aa, Ashbya gossypii; identical to SEQ ID NO: 1420

SEQ ID NO: 64926 - DNA, 1122 bp, Ashbya gossypii; identical to SEQ ID NO: 1421
  CDS (1)..(1122)

SEQ ID NO: 64927 - protein, 373 aa, Ashbya gossypii; identical to SEQ ID NO: 1422

SEQ ID NO: 64928 - DNA, 1098 bp, Amycolatopsis balhimycina; identical to SEQ ID NO: 1423
  CDS (1)..(1098)

SEQ ID NO: 64929 - protein, 365 aa, Amycolatopsis balhimycina; identical to SEQ ID NO: 1424

SEQ ID NO: 64930 - DNA, 1053 bp, Vibrio vulnificus; identical to SEQ ID NO: 2345
  CDS (1)..(1053)

SEQ ID NO: 64931 - protein, 350 aa, Vibrio vulnificus; identical to SEQ ID NO: 2346

SEQ ID NO: 64932 - DNA, 1047 bp, Photorhabdus luminescens; identical to SEQ ID NO: 1427
  CDS (1)..(1047)

SEQ ID NO: 64933 - protein, 348 aa, Photorhabdus luminescens; identical to SEQ ID NO: 1428

SEQ ID NO: 64934 - DNA, 1053 bp, Photorhabdus luminescens; identical to SEQ ID NO: 1429
  CDS (1)..(1053)

SEQ ID NO: 64935 - protein, 350 aa, Photorhabdus luminescens; identical to SEQ ID NO: 1430

SEQ ID NO: 64936 - DNA, 1095 bp, Photorhabdus luminescens; identical to SEQ ID NO: 1431
  CDS (1)..(1095)

SEQ ID NO: 64937 - protein, 364 aa, Photorhabdus luminescens; identical to SEQ ID NO: 1432

SEQ ID NO: 64938 - DNA, 1119 bp, Gloeobacter violaceus; identical to SEQ ID NO: 1433
  CDS (1)..(1119)

SEQ ID NO: 64939 - protein, 372 aa, Gloeobacter violaceus; identical to SEQ ID NO: 1434

SEQ ID NO: 64940 - DNA, 1107 bp, Chromobacterium violaceum; identical to SEQ ID NO: 1435
  CDS (1)..(1107)

SEQ ID NO: 64941 - protein, 368 aa, Chromobacterium violaceum; identical to SEQ ID NO: 1436

SEQ ID NO: 64942 - DNA, 1059 bp, Chromobacterium violaceum; identical to SEQ ID NO: 1437
  CDS (1)..(1059)

SEQ ID NO: 64943 - protein, 352 aa, Chromobacterium violaceum; identical to SEQ ID NO: 1438

SEQ ID NO: 64944 - DNA, 1140 bp, Neurospora crassa; identical to SEQ ID NO: 1439
  CDS (1)..(1140)

SEQ ID NO: 64945 - protein, 379 aa, Neurospora crassa; identical to SEQ ID NO: 1440

SEQ ID NO: 64946 - DNA, 1092 bp, Neurospora crassa; identical to SEQ ID NO: 1441
  CDS (1)..(1092)

SEQ ID NO: 64947 - protein, 363 aa, Neurospora crassa; identical to SEQ ID NO: 1442

SEQ ID NO: 64948 - DNA, 1068 bp, Synechococcus sp; identical to SEQ ID NO: 1443
  CDS (1)..(1068)

SEQ ID NO: 64949 - protein, 355 aa, Synechococcus sp; identical to SEQ ID NO: 1444

SEQ ID NO: 64950 - DNA, 1053 bp, Rhodopirellula baltica; identical to SEQ ID NO: 1445
  CDS (1)..(1053)

SEQ ID NO: 64951 - protein, 350 aa, Rhodopirellula baltica; identical to SEQ ID NO: 1446

SEQ ID NO: 64952 - DNA, 1068 bp, Prochlorococcus marinus subsp; identical to SEQ ID NO: 1447
  CDS (1)..(1068)

SEQ ID NO: 64953 - protein, 355 aa, Prochlorococcus marinus subsp; identical to SEQ ID NO: 1448

SEQ ID NO: 64954 - DNA, 1083 bp, Prochlorococcus marinus; identical to SEQ ID NO: 1449
  CDS (1)..(1083)

SEQ ID NO: 64955 - protein, 360 aa, Prochlorococcus marinus; identical to SEQ ID NO: 1450

SEQ ID NO: 64956 - DNA, 1074 bp, Prochlorococcus marinus; identical to SEQ ID NO: 1451
  CDS (1)..(1074)

SEQ ID NO: 64957 - protein, 357 aa, Prochlorococcus marinus; identical to SEQ ID NO: 1452

SEQ ID NO: 64958 - DNA, 1113 bp, Haemophilus ducreyi; identical to SEQ ID NO: 1453
  CDS (1)..(1113)

SEQ ID NO: 64959 - protein, 370 aa, Haemophilus ducreyi; identical to SEQ ID NO: 1454

SEQ ID NO: 64960 - DNA, 1080 bp, Haemophilus ducreyi; identical to SEQ ID NO: 1455
  CDS (1)..(1080)

SEQ ID NO: 64961 - protein, 359 aa, Haemophilus ducreyi; identical to SEQ ID NO: 1456

SEQ ID NO: 64962 - DNA, 1086 bp, Candidatus Blochmannia floridanus; identical to SEQ ID NO: 1457
  CDS (1)..(1086)

SEQ ID NO: 64963 - protein, 361 aa, Candidatus Blochmannia floridanus; identical to SEQ ID NO: 1458

SEQ ID NO: 64964 - DNA, 1074 bp, Bordetella pertussis; identical to SEQ ID NO: 2379
  CDS (1)..(1074)

SEQ ID NO: 64965 - protein, 357 aa, Bordetella pertussis; identical to SEQ ID NO: 1460

SEQ ID NO: 64966 - DNA, 1119 bp, Bordetella bronchiseptica; identical to SEQ ID NO: 1461
  CDS (1)..(1119)

SEQ ID NO: 64967 - protein, 372 aa, Bordetella bronchiseptica; identical to SEQ ID NO: 1462

SEQ ID NO: 64968 - DNA, 1179 bp, Nitrosomonas europaea; identical to SEQ ID NO: 1463
  CDS (1)..(1179)

SEQ ID NO: 64969 - protein, 392 aa, Nitrosomonas europaea; identical to SEQ ID NO: 1464

SEQ ID NO: 64970 - DNA, 1083 bp, Coxiella burnetii; identical to SEQ ID NO: 1465
  CDS (1)..(1083)

SEQ ID NO: 64971 - protein, 360 aa, Coxiella burnetii; identical to SEQ ID NO: 1466

SEQ ID NO: 64972 - DNA, 1053 bp, Vibrio parahaemolyticus; identical to SEQ ID NO: 1471
  CDS (1)..(1053)

SEQ ID NO: 64973 - protein, 350 aa, Vibrio parahaemolyticus; identical to SEQ ID NO: 1472

SEQ ID NO: 64974 - DNA, 1053 bp, Vibrio parahaemolyticus; identical to SEQ ID NO: 1473
  CDS (1)..(1053)

SEQ ID NO: 64975 - protein, 350 aa, Vibrio parahaemolyticus; identical to SEQ ID NO: 1474

SEQ ID NO: 64976 - DNA, 1074 bp, Vibrio parahaemolyticus; identical to SEQ ID NO: 1475
  CDS (1)..(1074)

SEQ ID NO: 64977 - protein, 357 aa, Vibrio parahaemolyticus; identical to SEQ ID NO: 1476

SEQ ID NO: 64978 - DNA, 1083 bp, Pseudomonas syringae; identical to SEQ ID NO: 1477
  CDS (1)..(1083)

SEQ ID NO: 64979 - protein, 360 aa, Pseudomonas syringae; identical to SEQ ID NO: 1478

SEQ ID NO: 64980 - DNA, 1077 bp, Pseudomonas syringae; identical to SEQ ID NO: 1479
  CDS (1)..(1077)

SEQ ID NO: 64981 - protein, 358 aa, Pseudomonas syringae; identical to SEQ ID NO: 1480

SEQ ID NO: 64982 - DNA, 1062 bp, Pseudomonas putida; identical to SEQ ID NO: 1481
  CDS (1)..(1062)

SEQ ID NO: 64983 - protein, 353 aa, Pseudomonas putida; identical to SEQ ID NO: 1482

SEQ ID NO: 64984 - DNA, 1113 bp, Pseudomonas putida; identical to SEQ ID NO: 1483
  CDS (1)..(1113)

SEQ ID NO: 64985 - protein, 370 aa, Pseudomonas putida; identical to SEQ ID NO: 1484

SEQ ID NO: 64986 - DNA, 1086 bp, Bradyrhizobium japonicum; identical to SEQ ID NO: 1485
  CDS (1)..(1086)

SEQ ID NO: 64987 - protein, 361 aa, Bradyrhizobium japonicum; identical to SEQ ID NO: 1486

SEQ ID NO: 64988 - DNA, 1053 bp, Yersinia pestis; identical to SEQ ID NO: 1487
  CDS (1)..(1053)

SEQ ID NO: 64989 - protein, 350 aa, Yersinia pestis; identical to SEQ ID NO: 1488

SEQ ID NO: 64990 - DNA, 1038 bp, Wigglesworthia glossinidia brevipalpis; identical to SEQ ID NO: 1491
  CDS (1)..(1038)

SEQ ID NO: 64991 - protein, 345 aa, Wigglesworthia glossinidia brevipalpis; identical to SEQ ID NO: 1492

SEQ ID NO: 64992 - DNA, 1071 bp, Vibrio vulnificus; identical to SEQ ID NO: 1739
  CDS (1)..(1071)

SEQ ID NO: 64993 - protein, 356 aa, Vibrio vulnificus; identical to SEQ ID NO: 1740

SEQ ID NO: 64994 - DNA, 1053 bp, Vibrio vulnificus; identical to SEQ ID NO: 1493
  CDS (1)..(1053)

SEQ ID NO: 64995 - protein, 350 aa, Vibrio vulnificus; identical to SEQ ID NO: 1494

SEQ ID NO: 64996 - DNA, 1071 bp, Vibrio vulnificus; identical to SEQ ID NO: 1497
  CDS (1)..(1071)

SEQ ID NO: 64997 - protein, 356 aa, Vibrio vulnificus; identical to SEQ ID NO: 1498

SEQ ID NO: 64998 - DNA, 1062 bp, Synechococcus elongatus; identical to SEQ ID NO: 1499
  CDS (1)..(1062)

SEQ ID NO: 64999 - protein, 353 aa, Synechococcus elongatus; identical to SEQ ID NO: 1500

SEQ ID NO: 65000 - DNA, 1032 bp, Streptococcus mutans; identical to SEQ ID NO: 1501
  CDS (1)..(1032)

SEQ ID NO: 65001 - protein, 343 aa, Streptococcus mutans; identical to SEQ ID NO: 1502

SEQ ID NO: 65002 - DNA, 1035 bp, Streptococcus mutans; identical to SEQ ID NO: 1503
  CDS (1)..(1035)

SEQ ID NO: 65003 - protein, 344 aa, Streptococcus mutans; identical to SEQ ID NO: 1504

SEQ ID NO: 65004 - DNA, 1008 bp, Streptococcus agalactiae; identical to SEQ ID NO: 1505
  CDS (1)..(1008)

SEQ ID NO: 65005 - protein, 335 aa, Streptococcus agalactiae; identical to SEQ ID NO: 1506

SEQ ID NO: 65006 - DNA, 1065 bp, Shewanella oneidensis; identical to SEQ ID NO: 1507
  CDS (1)..(1065)

SEQ ID NO: 65007 - protein, 354 aa, Shewanella oneidensis; identical to SEQ ID NO: 1508

SEQ ID NO: 65008 - DNA, 1092 bp, Shewanella oneidensis; identical to SEQ ID NO: 1509
  CDS (1)..(1092)

SEQ ID NO: 65009 - protein, 363 aa, Shewanella oneidensis; identical to SEQ ID NO: 1510

SEQ ID NO: 65010 - DNA, 1059 bp, Shewanella oneidensis; identical to SEQ ID NO: 1511
  CDS (1)..(1059)

SEQ ID NO: 65011 - protein, 352 aa, Shewanella oneidensis; identical to SEQ ID NO: 1512

SEQ ID NO: 65012 - DNA, 1170 bp, Corynebacterium efficiens; identical to SEQ ID NO: 1515
  CDS (1)..(1170)

SEQ ID NO: 65013 - protein, 389 aa, Corynebacterium efficiens; identical to SEQ ID NO: 1516

SEQ ID NO: 65014 - DNA, 1134 bp, Bifidobacterium longum; identical to SEQ ID NO: 1517
  CDS (1)..(1134)

SEQ ID NO: 65015 - protein, 377 aa, Bifidobacterium longum; identical to SEQ ID NO: 1518

SEQ ID NO: 65016 - DNA, 1233 bp, Bifidobacterium longum; identical to SEQ ID NO: 1519
  CDS (1)..(1233)

SEQ ID NO: 65017 - protein, 410 aa, Bifidobacterium longum; identical to SEQ ID NO: 1520

SEQ ID NO: 65018 - DNA, 1221 bp, Phytophthora infestans; identical to SEQ ID NO: 1521
  CDS (20)..(1153)

SEQ ID NO: 65019 - protein, 377 aa, Phytophthora infestans; identical to SEQ ID NO: 1522

SEQ ID NO: 65020 - DNA, 1062 bp, Chlorobium tepidum; identical to SEQ ID NO: 1523
  CDS (1)..(1062)

SEQ ID NO: 65021 - protein, 353 aa, Chlorobium tepidum; identical to SEQ ID NO: 1524

SEQ ID NO: 65022 - DNA, 1074 bp, Xanthomonas campestris; identical to SEQ ID NO: 1525
  CDS (1)..(1074)

SEQ ID NO: 65023 - protein, 357 aa, Xanthomonas campestris; identical to SEQ ID NO: 1526

SEQ ID NO: 65024 - DNA, 1074 bp, Xanthomonas axonopodis; identical to SEQ ID NO: 1527
  CDS (1)..(1074)

SEQ ID NO: 65025 - protein, 357 aa, Xanthomonas axonopodis; identical to SEQ ID NO: 1528

SEQ ID NO: 65026 - DNA, 1080 bp, Ralstonia solanacearum; identical to SEQ ID NO: 1529
  CDS (1)..(1080)

SEQ ID NO: 65027 - protein, 359 aa, Ralstonia solanacearum; identical to SEQ ID NO: 1530

SEQ ID NO: 65028 - DNA, 1179 bp, Ralstonia solanacearum; identical to SEQ ID NO: 1531
  CDS (1)..(1179)

SEQ ID NO: 65029 - protein, 392 aa, Ralstonia solanacearum; identical to SEQ ID NO: 1532

SEQ ID NO: 65030 - DNA, 1065 bp, Synechococcus sp; identical to SEQ ID NO: 1533
  CDS (1)..(1065)

SEQ ID NO: 65031 - protein, 354 aa, Synechococcus sp; identical to SEQ ID NO: 1534

SEQ ID NO: 65032 - DNA, 1035 bp, Escherichia coli; identical to SEQ ID NO: 1535
  CDS (1)..(1035)

SEQ ID NO: 65033 - protein, 344 aa, Escherichia coli; identical to SEQ ID NO: 1536

SEQ ID NO: 65034 - DNA, 1200 bp, Stigmatella aurantiaca; identical to SEQ ID NO: 1537
  CDS (62)..(1147)

SEQ ID NO: 65035 - protein, 361 aa, Stigmatella aurantiaca; identical to SEQ ID NO: 1538

SEQ ID NO: 65036 - DNA, 1083 bp, Amycolatopsis mediterranei; identical to SEQ ID NO: 1541
  CDS (1)..(1083)

SEQ ID NO: 65037 - protein, 360 aa, Amycolatopsis mediterranei; identical to SEQ ID NO: 1542

SEQ ID NO: 65038 - DNA, 1053 bp, Pasteurella multocida; identical to SEQ ID NO: 1543
  CDS (1)..(1053)

SEQ ID NO: 65039 - protein, 350 aa, Pasteurella multocida; identical to SEQ ID NO: 1544

SEQ ID NO: 65040 - DNA, 1086 bp, Pasteurella multocida; identical to SEQ ID NO: 1545
  CDS (1)..(1086)

SEQ ID NO: 65041 - protein, 361 aa, Pasteurella multocida; identical to SEQ ID NO: 1546

SEQ ID NO: 65042 - DNA, 1125 bp, Emericella nidulans; identical to SEQ ID NO: 1547
  CDS (1)..(1125)

SEQ ID NO: 65043 - protein, 374 aa, Emericella nidulans; identical to SEQ ID NO: 1548

SEQ ID NO: 65044 - DNA, 1089 bp, Emericella nidulans; identical to SEQ ID NO: 1549
  CDS (1)..(1089)

SEQ ID NO: 65045 - protein, 362 aa, Emericella nidulans; identical to SEQ ID NO: 1550

SEQ ID NO: 65046 - DNA, 1239 bp, Vibrio cholerae; identical to SEQ ID NO: 1551
  CDS (114)..(1175)

SEQ ID NO: 65047 - protein, 353 aa, Vibrio cholerae; identical to SEQ ID NO: 1552

SEQ ID NO: 65048 - DNA, 2184 bp, Candida albicans; identical to SEQ ID NO: 1553
  CDS (461)..(1573)

SEQ ID NO: 65049 - protein, 370 aa, Candida albicans; identical to SEQ ID NO: 1554

SEQ ID NO: 65050 - DNA, 1047 bp, Buchnera aphidicola; identical to SEQ ID NO: 1555
  CDS (1)..(1047)

SEQ ID NO: 65051 - protein, 348 aa, Buchnera aphidicola; identical to SEQ ID NO: 1556

SEQ ID NO: 65052 - DNA, 1047 bp, Buchnera aphidicola; identical to SEQ ID NO: 1557
  CDS (1)..(1047)

SEQ ID NO: 65053 - protein, 348 aa, Buchnera aphidicola; identical to SEQ ID NO: 1558

SEQ ID NO: 65054 - DNA, 1047 bp, Erwinia herbicola; identical to SEQ ID NO: 1559
  CDS (1)..(1047)

SEQ ID NO: 65055 - protein, 348 aa, Erwinia herbicola; identical to SEQ ID NO: 1560

SEQ ID NO: 65056 - DNA, 1047 bp, Salmonella typhimurium; identical to SEQ ID NO: 1561
  CDS (1)..(1047)

SEQ ID NO: 65057 - protein, 348 aa, Salmonella typhimurium; identical to SEQ ID NO: 1562

SEQ ID NO: 65058 - DNA, 1047 bp, Shigella flexneri; identical to SEQ ID NO: 2473
  CDS (1)..(1047)

SEQ ID NO: 65059 - protein, 348 aa, Shigella flexneri; identical to SEQ ID NO: 2474

SEQ ID NO: 65060 - DNA, 25 bp, Artificial sequence
  Primer sequence
atgttcattaaaaacgatcacgccg

SEQ ID NO: 65061 - DNA, 25 bp, Artificial sequence
  Primer sequence
ctattttttcaaggcctttcttctg

SEQ ID NO: 65062 - protein, 353 aa, Artificial sequence; identical to SEQ ID NO: 24922
  Consensus
  Variant (2)..(3): Xaa in position 2 to 3 is any amino acid
  Variant (5)..(11): Xaa in position 5 to 11 is any amino acid
  Variant (13)..(24): Xaa in position 13 to 24 is any amino acid
  Variant (26)..(30): Xaa in position 26 to 30 is any amino acid
  Variant (32)..(33): Xaa in position 32 to 33 is any amino acid
  Variant (35)..(35): Xaa in position 35 is any amino acid
  Variant (37)..(37): Xaa in position 37 is any amino acid
  Variant (39)..(46): Xaa in position 39 to 46 is any amino acid
  Variant (51)..(51): Xaa in position 51 is any amino acid
  Variant (54)..(56): Xaa in position 54 to 56 is any amino acid
  Variant (58)..(59): Xaa in position 58 to 59 is any amino acid
  Variant (62)..(63): Xaa in position 62 to 63 is any amino acid
  Variant (65)..(76): Xaa in position 65 to 76 is any amino acid
  Variant (78)..(80): Xaa in position 78 to 80 is any amino acid
  Variant (83)..(83): Xaa in position 83 is any amino acid
  Variant (85)..(85): Xaa in position 85 is any amino acid
  Variant (91)..(93): Xaa in position 91 to 93 is any amino acid
  Variant (100)..(100): Xaa in position 100 is any amino acid
  Variant (103)..(112): Xaa in position 103 to 112 is any amino acid
  Variant (115)..(117): Xaa in position 115 to 117 is any amino acid
  Variant (119)..(119): Xaa in position 119 is any amino acid
  Variant (121)..(130): Xaa in position 121 to 130 is any amino acid
  Variant (132)..(132): Xaa in position 132 is any amino acid
  Variant (134)..(134): Xaa in position 134 is any amino acid
  Variant (136)..(136): Xaa in position 136 is any amino acid
  Variant (139)..(142): Xaa in position 139 to 142 is any amino acid
  Variant (144)..(146): Xaa in position 144 to 146 is any amino acid
  Variant (148)..(152): Xaa in position 148 to 152 is any amino acid
  Variant (163)..(163): Xaa in position 163 is any amino acid
  Variant (166)..(168): Xaa in position 166 to 168 is any amino acid
  Variant (171)..(171): Xaa in position 171 is any amino acid
  Variant (174)..(174): Xaa in position 174 is any amino acid
  Variant (176)..(176): Xaa in position 176 is any amino acid
  Variant (181)..(181): Xaa in position 181 is any amino acid
  Variant (183)..(183): Xaa in position 183 is any amino acid
  Variant (185)..(188): Xaa in position 185 to 188 is any amino acid
  Variant (190)..(191): Xaa in position 190 to 191 is any amino acid
  Variant (193)..(195): Xaa in position 193 to 195 is any amino acid
  Variant (197)..(199): Xaa in position 197 to 199 is any amino acid
  Variant (201)..(201): Xaa in position 201 is any amino acid
  Variant (203)..(208): Xaa in position 203 to 208 is any amino acid
  Variant (210)..(215): Xaa in position 210 to 215 is any amino acid
  Variant (217)..(217): Xaa in position 217 is any amino acid
  Variant (220)..(222): Xaa in position 220 to 222 is any amino acid
  Variant (224)..(225): Xaa in position 224 to 225 is any amino acid
  Variant (230)..(238): Xaa in position 230 to 238 is any amino acid
  Variant (241)..(269): Xaa in position 241 to 269 is any amino acid
  Variant (271)..(271): Xaa in position 271 is any amino acid
  Variant (274)..(274): Xaa in position 274 is any amino acid
  Variant (277)..(277): Xaa in position 277 is any amino acid
  Variant (279)..(282): Xaa in position 279 to 282 is any amino acid
  Variant (284)..(285): Xaa in position 284 to 285 is any amino acid
  Variant (287)..(292): Xaa in position 287 to 292 is any amino acid
  Variant (294)..(296): Xaa in position 294 to 296 is any amino acid
  Variant (298)..(305): Xaa in position 298 to 305 is any amino acid
  Variant (307)..(307): Xaa in position 307 is any amino acid
  Variant (309)..(309): Xaa in position 309 is any amino acid
  Variant (312)..(315): Xaa in position 312 to 315 is any amino acid
  Variant (317)..(317): Xaa in position 317 is any amino acid
  Variant (319)..(334): Xaa in position 319 to 334 is any amino acid
  Variant (337)..(337): Xaa in position 337 is any amino acid
  Variant (339)..(339): Xaa in position 339 is any amino acid
  Variant (342)..(342): Xaa in position 342 is any amino acid
  Variant (344)..(345): Xaa in position 344 to 345 is any amino acid
  Variant (347)..(348): Xaa in position 347 to 348 is any amino acid
  Variant (350)..(352): Xaa in position 350 to 352 is any amino acid

SEQ ID NO: 65063 - protein, 72 aa, Artificial sequence; identical to SEQ ID NO: 2906
  Consensus
  Variant (5)..(5): Xaa in position 5 is Ile, Val, Ser or Leu
  Variant (6)..(6): Xaa in position 6 is His or Asp
  Variant (7)..(7): Xaa in position 7 is Asp or Asn
  Variant (8)..(10): Xaa in position 8 to 10 is any amino acid
  Variant (11)..(11): Xaa in position 11 is Ala, Val or Gly
  Variant (12)..(12): Xaa in position 12 is any amino acid
  Variant (13)..(13): Xaa in position 13 is Glu, Asp, Ala or Gln
  Variant (15)..(15): Xaa in position 15 is Ala, Gly or Cys
  Variant (16)..(17): Xaa in position 16 to 17 is any amino acid
  Variant (18)..(18): Xaa in position 18 is Leu, Ile or Phe
  Variant (19)..(28): Xaa in position 19 to 28 is any amino acid
  Variant (29)..(30): Xaa in position 29 to 30 is any or no amino acid
  Variant (31)..(31): Xaa in position 31 is Leu, Ile, Phe or Met
  Variant (32)..(32): Xaa in position 32 is any amino acid
  Variant (33)..(33): Xaa in position 33 is Ile, Val, Leu or Met
  Variant (34)..(34): Xaa in position 34 is Val, Ile or Leu
  Variant (37)..(37): Xaa in position 37 is Val, Ala or Thr
  Variant (39)..(39): Xaa in position 39 is Phe, Leu, Thr or Val
  Variant (40)..(40): Xaa in position 40 is Glu or Ala
  Variant (45)..(46): Xaa in position 45 to 46 is any amino acid
  Variant (47)..(47): Xaa in position 47 is any or no amino acid
  Variant (49)..(49): Xaa in position 49 is Trp or Tyr
  Variant (50)..(50): Xaa in position 50 is Lys or Arg
  Variant (52)..(52): Xaa in position 52 is Leu, Phe, Met or Tyr
  Variant (53)..(53): Xaa in position 53 is Ile, Val, Ala or Leu
  Variant (54)..(54): Xaa in position 54 is any amino acid
  Variant (55)..(55): Xaa in position 55 is Asp, Glu or Gln
  Variant (57)..(57): Xaa in position 57 is any amino acid
  Variant (58)..(58): Xaa in position 58 is Leu, Met, Ile, Val, Ala or Thr
  Variant (59)..(59): Xaa in position 59 is Asp, Asn or Ser
  Variant (60)..(63): Xaa in position 60 to 63 is any amino acid
  Variant (64)..(64): Xaa in position 64 is Ile, Val, Leu or Met
  Variant (65)..(66): Xaa in position 65 to 66 is any amino acid
  Variant (68)..(68): Xaa in position 68 is Leu, Ile, Met or Val
  Variant (69)..(70): Xaa in position 69 to 70 is any amino acid
  Variant (71)..(71): Xaa in position 71 is Ala, Ser, Gly, Val or Thr

SEQ ID NO: 65064 - protein, 76 aa, Artificial sequence; identical to SEQ ID NO: 2907
  Consensus
  Variant (1)..(1): Xaa in position 1 is Ala or Ser
  Variant (2)..(2): Xaa in position 2 is Ile or Val
  Variant (6)..(6): Xaa in position 6 is Thr, Ser or Asn
  Variant (7)..(7): Xaa in position 7 is Thr, Val, Ala, Ser or Ile
  Variant (8)..(8): Xaa in position 8 is Glu or Ala
  Variant (9)..(9): Xaa in position 9 is Ser, Asp or Asn
  Variant (11)..(11): Xaa in position 11 is any amino acid
  Variant (14)..(14): Xaa in position 14 is Glu, Gln, Phe or Met
  Variant (15)..(15): Xaa in position 15 is Leu, Met, Val, Phe or Ile
  Variant (16)..(16): Xaa in position 16 is Ala, Ser, Thr, Cys or Val
  Variant (18)..(18): Xaa in position 18 is Gly, Ala or Asn
  Variant (19)..(21): Xaa in position 19 to 21 is any amino acid
  Variant (22)..(22): Xaa in position 22 is Pro or Ala
  Variant (23)..(23): Xaa in position 23 is Val, Ile, Thr or Leu
  Variant (25)..(25): Xaa in position 25 is Phe, Met, Tyr or Ile
  Variant (28)..(28): Xaa in position 28 is any amino acid
  Variant (29)..(29): Xaa in position 29 is Thr, Ser or Arg
  Variant (30)..(30): Xaa in position 30 is any amino acid
  Variant (32)..(35): Xaa in position 32 to 35 is any amino acid
  Variant (36)..(36): Xaa in position 36 is Ala or Met
  Variant (37)..(37): Xaa in position 37 is any amino acid
  Variant (38)..(38): Xaa in position 38 is Asp, Asn or Glu
  Variant (39)..(39): Xaa in position 39 is Ala or Gly
  Variant (40)..(41): Xaa in position 40 to 41 is any amino acid
  Variant (42)..(42): Xaa in position 42 is Ala or Ser
  Variant (43)..(43): Xaa in position 43 is Ala, Ser, Val or Thr
  Variant (44)..(46): Xaa in position 44 to 46 is any amino acid
  Variant (47)..(47): Xaa in position 47 is His or Gln
  Variant (48)..(48): Xaa in position 48 is any amino acid
  Variant (49)..(49): Xaa in position 49 is Phe, Tyr, His or Val
  Variant (50)..(51): Xaa in position 50 to 51 is any amino acid
  Variant (52)..(55): Xaa in position 52 to 55 is any or no amino acid
  Variant (57)..(60): Xaa in position 57 to 60 is any amino acid
  Variant (61)..(62): Xaa in position 61 to 62 is any or no amino acid
  Variant (63)..(63): Xaa in position 63 is Thr or Ser
  Variant (64)..(64): Xaa in position 64 is any amino acid
  Variant (67)..(69): Xaa in position 67 to 69 is any amino acid
  Variant (70)..(70): Xaa in position 70 is His or Phe
  Variant (71)..(71): Xaa in position 71 is Val, Ile, Leu or Ala
  Variant (72)..(72): Xaa in position 72 is Ile or Val
  Variant (73)..(73): Xaa in position 73 is Leu or Met
  Variant (76)..(76): Xaa in position 76 is Gly, Ala or Ser

SEQ ID NO: 65065 - protein, 83 aa, Artificial sequence; identical to SEQ ID NO: 2908
  Consensus
  Variant (1)..(1): Xaa in position 1 is Leu, Ile or Val
  Variant (2)..(2): Xaa in position 2 is Met, Val, Ile or Leu
  Variant (3)..(3): Xaa in position 3 is Ile or Val
  Variant (5)..(5): Xaa in position 5 is Cys, Phe, Ala, Thr or Tyr
  Variant (6)..(6): Xaa in position 6 is Ser, Asn or Ala
  Variant (8)..(8): Xaa in position 8 is Gly, Ala or Asp
  Variant (10)..(10): Xaa in position 10 is Ser or Cys
  Variant (11)..(11): Xaa in position 11 is any amino acid
  Variant (13)..(15): Xaa in position 13 to 15 is any amino acid
  Variant (16)..(16): Xaa in position 16 is Arg, Asn, Lys, Leu or Glu
  Variant (18)..(19): Xaa in position 18 to 19 is any amino acid
  Variant (20)..(20): Xaa in position 20 is Val or Ile
  Variant (21)..(26): Xaa in position 21 to 26 is any amino acid
  Variant (27)..(27): Xaa in position 27 is Gln, Asn or Arg
  Variant (28)..(28): Xaa in position 28 is Ile, Leu, Val, Arg or Met
  Variant (29)..(30): Xaa in position 29 to 30 is any amino acid
  Variant (31)..(31): Xaa in position 31 is Gly, Asn or Asp
  Variant (32)..(32): Xaa in position 32 is any amino acid
  Variant (33)..(37): Xaa in position 33 to 37 is any or no amino acid
  Variant (38)..(38): Xaa in position 38 is Ile, Val or Leu
  Variant (39)..(39): Xaa in position 39 is any amino acid
  Variant (41)..(41): Xaa in position 41 is any amino acid
  Variant (43)..(43): Xaa in position 43 is Ile, Leu, Val, Ala or Met
  Variant (46)..(46): Xaa in position 46 is His, Phe, Asn or Tyr
  Variant (47)..(47): Xaa in position 47 is Leu or Ile
  Variant (48)..(49): Xaa in position 48 to 49 is any amino acid
  Variant (51)..(51): Xaa in position 51 is any amino acid
  Variant (53)..(57): Xaa in position 53 to 57 is any amino acid
  Variant (58)..(69): Xaa in position 58 to 69 is any or no amino acid
  Variant (71)..(71): Xaa in position 71 is any amino acid
  Variant (73)..(73): Xaa in position 73 is Ile or Val
  Variant (76)..(76): Xaa in position 76 is any amino acid
  Variant (78)..(78): Xaa in position 78 is Ile, Leu or Val
  Variant (79)..(79): Xaa in position 79 is any amino acid
  Variant (80)..(80): Xaa in position 80 is Trp, Ile, Leu or Phe
  Variant (81)..(82): Xaa in position 81 to 82 is any amino acid
  Variant (83)..(83): Xaa in position 83 is Thr or Ser

SEQ ID NO: 65066 - DNA, 1431 bp, Escherichia coli; identical to SEQ ID NO: 14875
  CDS (1)..(1431)

SEQ ID NO: 65067 - protein, 476 aa, Escherichia coli; identical to SEQ ID NO: 14876

SEQ ID NO: 65068 - DNA, 1638 bp, Fusobacterium nucleatum subsp. nucleatum ATCC 25586; identical to SEQ ID NO: 14877
  CDS (1)..(1638): transl_table=11

SEQ ID NO: 65069 - protein, 545 aa, Fusobacterium nucleatum subsp. nucleatum ATCC 25586; identical to SEQ ID NO: 14878

SEQ ID NO: 65070 - DNA, 1392 bp, Clostridium tetani E88; identical to SEQ ID NO: 14879
  CDS (1)..(1392): transl_table=11

SEQ ID NO: 65071 - protein, 463 aa, Clostridium tetani E88; identical to SEQ ID NO: 14880

SEQ ID NO: 65072 - DNA, 1380 bp, Bacteroides thetaiotaomicron VPI-5482; identical to SEQ ID NO: 14881
  CDS (1)..(1380): transl_table=11

SEQ ID NO: 65073 - protein, 459 aa, Bacteroides thetaiotaomicron VPI-5482; identical to SEQ ID NO: 14882

SEQ ID NO: 65074 - DNA, 1380 bp, Porphyromonas gingivalis W83; identical to SEQ ID NO: 14883
  CDS (1)..(1380): transl_table=11

SEQ ID NO: 65075 - protein, 459 aa, Porphyromonas gingivalis W83; identical to SEQ ID NO: 14884

SEQ ID NO: 65076 - DNA, 1449 bp, Rhodopseudomonas palustris CGA009; identical to SEQ ID NO: 14885
  CDS (1)..(1449): transl_table=11

SEQ ID NO: 65077 - protein, 482 aa, Rhodopseudomonas palustris CGA009; identical to SEQ ID NO: 14886

SEQ ID NO: 65078 - DNA, 1380 bp, Treponema denticola ATCC 35405; identical to SEQ ID NO: 14887
  CDS (1)..(1380): transl_table=11

SEQ ID NO: 65079 - protein, 459 aa, Treponema denticola ATCC 35405; identical to SEQ ID NO: 14888

SEQ ID NO: 65080 - DNA, 1380 bp, Treponema denticola ATCC 35405; identical to SEQ ID NO: 14889
  CDS (1)..(1380): transl_table=11

SEQ ID NO: 65081 - protein, 459 aa, Treponema denticola ATCC 35405; identical to SEQ ID NO: 14890

SEQ ID NO: 65082 - DNA, 1617 bp, Entamoeba histolytica HM-1:IMSS; identical to SEQ ID NO: 14891
  CDS (1)..(1617)

SEQ ID NO: 65083 - protein, 538 aa, Entamoeba histolytica HM-1:IMSS; identical to SEQ ID NO: 14892

SEQ ID NO: 65084 - DNA, 1389 bp, Desulfovibrio vulgaris subsp. vulgaris str. Hildenborough; identical to SEQ ID NO: 14893
  CDS (1)..(1389): transl_table=11

SEQ ID NO: 65085 - protein, 462 aa, Desulfovibrio vulgaris subsp. vulgaris str. Hildenborough; identical to SEQ ID NO: 14894

SEQ ID NO: 65086 - DNA, 1377 bp, Propionibacterium acnes KPA171202; identical to SEQ ID NO: 14895
  CDS (1)..(1377): transl_table=11

SEQ ID NO: 65087 - protein, 458 aa, Propionibacterium acnes KPA171202; identical to SEQ ID NO: 14896

SEQ ID NO: 65088 - DNA, 1365 bp, Symbiobacterium thermophilum IAM 14863; identical to SEQ ID NO: 14897
  CDS (1)..(1365): transl_table=11

SEQ ID NO: 65089 - protein, 454 aa, Symbiobacterium thermophilum IAM 14863; identical to SEQ ID NO: 14898

SEQ ID NO: 65090 - DNA, 1416 bp, Symbiobacterium thermophilum IAM 14863; identical to SEQ ID NO: 14899
  CDS (1)..(1416): transl_table=11

SEQ ID NO: 65091 - protein, 471 aa, Symbiobacterium thermophilum IAM 14863; identical to SEQ ID NO: 14900

SEQ ID NO: 65092 - DNA, 1443 bp, Photobacterium profundum SS9; identical to SEQ ID NO: 14901
  CDS (1)..(1443): transl_table=11

SEQ ID NO: 65093 - protein, 480 aa, Photobacterium profundum SS9; identical to SEQ ID NO: 14902

SEQ ID NO: 65094 - DNA, 1467 bp, Photobacterium profundum SS9; identical to SEQ ID NO: 14903
  CDS (1)..(1467): transl_table=11

SEQ ID NO: 65095 - protein, 488 aa, Photobacterium profundum SS9; identical to SEQ ID NO: 14904

SEQ ID NO: 65096 - DNA, 1401 bp, Photobacterium profundum SS9; identical to SEQ ID NO: 14905
  CDS (1)..(1401): transl_table=11

SEQ ID NO: 65097 - protein, 466 aa, Photobacterium profundum SS9; identical to SEQ ID NO: 14906

SEQ ID NO: 65098 - DNA, 1344 bp, Haloarcula marismortui ATCC 43049; identical to SEQ ID NO: 14907
  CDS (1)..(1344): transl_table=11

SEQ ID NO: 65099 - protein, 447 aa, Haloarcula marismortui ATCC 43049; identical to SEQ ID NO: 14908

SEQ ID NO: 65100 - DNA, 1449 bp, Azoarcus sp. EbN1; identical to SEQ ID NO: 14909
  CDS (1)..(1449): transl_table=11

SEQ ID NO: 65101 - protein, 482 aa, Azoarcus sp. EbN1; identical to SEQ ID NO: 14910

SEQ ID NO: 65102 - DNA, 1404 bp, Nostoc punctiforme PCC 73102; identical to SEQ ID NO: 14911
  CDS (1)..(1404)

SEQ ID NO: 65103 - protein, 467 aa, Nostoc punctiforme PCC 73102; identical to SEQ ID NO: 14912

SEQ ID NO: 65104 - DNA, 1416 bp, Haemophilus somnus 129PT; identical to SEQ ID NO: 14913
  CDS (1)..(1416)

SEQ ID NO: 65105 - protein, 471 aa, Haemophilus somnus 129PT; identical to SEQ ID NO: 14914

SEQ ID NO: 65106 - DNA, 1569 bp, Fusobacterium nucleatum subsp. vincentii ATCC 49256; identical to SEQ ID NO: 14915
  CDS (1)..(1569): transl_table=11

SEQ ID NO: 65107 - protein, 522 aa, Fusobacterium nucleatum subsp. vincentii ATCC 49256; identical to SEQ ID NO: 14916

SEQ ID NO: 65108 - DNA, 1383 bp, Fusobacterium nucleatum subsp. vincentii ATCC 49256; identical to SEQ ID NO: 14917
  CDS (1)..(1383): transl_table=11

SEQ ID NO: 65109 - protein, 460 aa, Fusobacterium nucleatum subsp. vincentii ATCC 49256; identical to SEQ ID NO: 14918

SEQ ID NO: 65110 - DNA, 1182 bp, Haemophilus influenzae 86-028NP; identical to SEQ ID NO: 14919
  CDS (1)..(1182)

SEQ ID NO: 65111 - protein, 393 aa, Haemophilus influenzae 86-028NP; identical to SEQ ID NO: 14920

SEQ ID NO: 65112 - DNA, 1347 bp, Solibacter usitatus Ellin6076; identical to SEQ ID NO: 14921
  CDS (1)..(1347): transl_table=11

SEQ ID NO: 65113 - protein, 448 aa, Solibacter usitatus Ellin6076; identical to SEQ ID NO: 14922

SEQ ID NO: 65114 - DNA, 1374 bp, Desulfitobacterium hafniense DCB-2; identical to SEQ ID NO: 14923
  CDS (1)..(1374): transl_table=11

SEQ ID NO: 65115 - protein, 457 aa, Desulfitobacterium hafniense DCB-2; identical to SEQ ID NO: 14924

SEQ ID NO: 65116 - DNA, 1389 bp, Desulfitobacterium hafniense DCB-2; identical to SEQ ID NO: 14925
  CDS (1)..(1389): transl_table=11

SEQ ID NO: 65117 - protein, 462 aa, Desulfitobacterium hafniense DCB-2; identical to SEQ ID NO: 14926

SEQ ID NO: 65118 - DNA, 1443 bp, uncultured bacterium; identical to SEQ ID NO: 14927
  CDS (1)..(1443)

SEQ ID NO: 65119 - protein, 480 aa, uncultured bacterium; identical to SEQ ID NO: 14928

SEQ ID NO: 65120 - DNA, 1365 bp, Symbiobacterium thermophilum; identical to SEQ ID NO: 14929
  CDS (1)..(1365)

SEQ ID NO: 65121 - protein, 454 aa, Symbiobacterium thermophilum; identical to SEQ ID NO: 14930

SEQ ID NO: 65122 - DNA, 1365 bp, Symbiobacterium thermophilum; identical to SEQ ID NO: 14897
  CDS (1)..(1365)

SEQ ID NO: 65123 - protein, 454 aa, Symbiobacterium thermophilum; identical to SEQ ID NO: 14898

SEQ ID NO: 65124 - DNA, 1386 bp, Chromobacterium violaceum; identical to SEQ ID NO: 14933
  CDS (1)..(1386): transl_table=11

SEQ ID NO: 65125 - protein, 461 aa, Chromobacterium violaceum; identical to SEQ ID NO: 14934

SEQ ID NO: 65126 - DNA, 1419 bp, Clostridium tetani; identical to SEQ ID NO: 14935
  CDS (1)..(1419): transl_table=11

SEQ ID NO: 65127 - protein, 472 aa, Clostridium tetani; identical to SEQ ID NO: 14936

SEQ ID NO: 65128 - DNA, 1389 bp, Enterobacter aerogenes; identical to SEQ ID NO: 14937
  CDS (1)..(1389): transl_table=11

SEQ ID NO: 65129 - protein, 462 aa, Enterobacter aerogenes; identical to SEQ ID NO: 14938

SEQ ID NO: 65130 - DNA, 1419 bp, Haemophilus influenzae; identical to SEQ ID NO: 14939
  CDS (1)..(1419): transl_table=11

SEQ ID NO: 65131 - protein, 472 aa, Haemophilus influenzae; identical to SEQ ID NO: 14940

SEQ ID NO: 65132 - DNA, 1347 bp, Halobacterium salinarium; identical to SEQ ID NO: 14941
  CDS (1)..(1347)

SEQ ID NO: 65133 - protein, 448 aa, Halobacterium salinarium; identical to SEQ ID NO: 14942

SEQ ID NO: 65134 - DNA, 1416 bp, Pasteurella multocida; identical to SEQ ID NO: 14943
  CDS (1)..(1416): transl_table=11

SEQ ID NO: 65135 - protein, 471 aa, Pasteurella multocida; identical to SEQ ID NO: 14944

SEQ ID NO: 65136 - DNA, 1401 bp, Photorhabdus luminescens; identical to SEQ ID NO: 14945
  CDS (1)..(1401): transl_table=11

SEQ ID NO: 65137 - protein, 466 aa, Photorhabdus luminescens; identical to SEQ ID NO: 14946

SEQ ID NO: 65138 - DNA, 1398 bp, Proteus inconstans; identical to SEQ ID NO: 14947
  CDS (1)..(1398): transl_table=11

SEQ ID NO: 65139 - protein, 465 aa, Proteus inconstans; identical to SEQ ID NO: 14948

SEQ ID NO: 65140 - DNA, 1404 bp, Proteus vulgaris; identical to SEQ ID NO: 14949
  CDS (1)..(1404): transl_table=11

SEQ ID NO: 65141 - protein, 467 aa, Proteus vulgaris; identical to SEQ ID NO: 14950

SEQ ID NO: 65142 - DNA, 1365 bp, Rhodobacter capsulatus; identical to SEQ ID NO: 14951
  CDS (1)..(1365): transl_table=11

SEQ ID NO: 65143 - protein, 454 aa, Rhodobacter capsulatus; identical to SEQ ID NO: 14952

SEQ ID NO: 65144 - DNA, 1389 bp, Thermoanaerobacter tengcongensis; identical to SEQ ID NO: 14953
  CDS (1)..(1389): transl_table=11

SEQ ID NO: 65145 - protein, 462 aa, Thermoanaerobacter tengcongensis; identical to SEQ ID NO: 14954

SEQ ID NO: 65146 - DNA, 1419 bp, Vibrio cholerae; identical to SEQ ID NO: 14955
  CDS (1)..(1419): transl_table=11

SEQ ID NO: 65147 - protein, 472 aa, Vibrio cholerae; identical to SEQ ID NO: 14956

SEQ ID NO: 65148 - DNA, 1401 bp, Vibrio parahaemolyticus; identical to SEQ ID NO: 14957
  CDS (1)..(1401): transl_table=11

SEQ ID NO: 65149 - protein, 466 aa, Vibrio parahaemolyticus; identical to SEQ ID NO: 14958

SEQ ID NO: 65150 - DNA, 1422 bp, Vibrio vulnificus; identical to SEQ ID NO: 14959
  CDS (1)..(1422): transl_table=11

SEQ ID NO: 65151 - protein, 473 aa, Vibrio vulnificus; identical to SEQ ID NO: 14960

SEQ ID NO: 65152 - DNA, 1371 bp, Citrobacter freundii; identical to SEQ ID NO: 14961
  CDS (1)..(1371): transl_table=11

SEQ ID NO: 65153 - protein, 456 aa, Citrobacter freundii; identical to SEQ ID NO: 14962

SEQ ID NO: 65154 - DNA, 1383 bp, Clostridium tetani; identical to SEQ ID NO: 14963
  CDS (1)..(1383)

SEQ ID NO: 65155 - protein, 460 aa, Clostridium tetani; identical to SEQ ID NO: 14964

SEQ ID NO: 65156 - DNA, 1371 bp, Enterobacter agglomerans; identical to SEQ ID NO: 14965
  CDS (1)..(1371): transl_table=11

SEQ ID NO: 65157 - protein, 456 aa, Enterobacter agglomerans; identical to SEQ ID NO: 14966

SEQ ID NO: 65158 - DNA, 1383 bp, Fusobacterium nucleatum; identical to SEQ ID NO: 14967
  CDS (1)..(1383): transl_table=11

SEQ ID NO: 65159 - protein, 460 aa, Fusobacterium nucleatum; identical to SEQ ID NO: 14968

SEQ ID NO: 65160 - DNA, 1377 bp, Pasteurella multocida; identical to SEQ ID NO: 14969
  CDS (1)..(1377): transl_table=11

SEQ ID NO: 65161 - protein, 458 aa, Pasteurella multocida; identical to SEQ ID NO: 14970

SEQ ID NO: 65162 - DNA, 1377 bp, Symbiobacterium sp; identical to SEQ ID NO: 14971
  CDS (1)..(1377): transl_table=11

SEQ ID NO: 65163 - protein, 458 aa, Symbiobacterium sp; identical to SEQ ID NO: 14972

SEQ ID NO: 65164 - DNA, 27 bp, Artificial sequence
  Primer sequence
atgaaggattatgtaatggaaaacttt

SEQ ID NO: 65165 - DNA, 26 bp, Artificial sequence
  Primer sequence
ttaaacttctttaagttttgcggtga

SEQ ID NO: 65166 - protein, 533 aa, Artificial sequence; identical to SEQ ID NO: 14975
  Consensus
  Variant (2)..(2): Xaa in position 2 is any amino acid
  Variant (7)..(7): Xaa in position 7 is any amino acid
  Variant (10)..(10): Xaa in position 10 is any amino acid
  Variant (12)..(18): Xaa in position 12 to 18 is any amino acid
  Variant (20)..(22): Xaa in position 20 to 22 is any amino acid
  Variant (24)..(25): Xaa in position 24 to 25 is any amino acid
  Variant (27)..(28): Xaa in position 27 to 28 is any amino acid
  Variant (30)..(30): Xaa in position 30 is any amino acid
  Variant (32)..(32): Xaa in position 32 is any amino acid
  Variant (34)..(34): Xaa in position 34 is any amino acid
  Variant (36)..(37): Xaa in position 36 to 37 is any amino acid
  Variant (49)..(49): Xaa in position 49 is any amino acid
  Variant (53)..(54): Xaa in position 53 to 54 is any amino acid
  Variant (56)..(56): Xaa in position 56 is any or no amino acid
  Variant (61)..(61): Xaa in position 61 is any amino acid
  Variant (70)..(71): Xaa in position 70 to 71 is any amino acid
  Variant (73)..(74): Xaa in position 73 to 74 is any amino acid
  Variant (76)..(78): Xaa in position 76 to 78 is any amino acid
  Variant (80)..(80): Xaa in position 80 is any amino acid
  Variant (83)..(83): Xaa in position 83 is any amino acid
  Variant (86)..(88): Xaa in position 86 to 88 is any amino acid
  Variant (89)..(134): Xaa in position 89 to 134 is any or no amino acid
  Variant (137)..(137): Xaa in position 137 is any amino acid
  Variant (145)..(145): Xaa in position 145 is any amino acid
  Variant (147)..(150): Xaa in position 147 to 150 is any amino acid
  Variant (153)..(160): Xaa in position 153 to 160 is any amino acid
  Variant (161)..(170): Xaa in position 161 to 170 is any or no amino acid
  Variant (172)..(173): Xaa in position 172 to 173 is any amino acid
  Variant (175)..(175): Xaa in position 175 is any amino acid
  Variant (178)..(179): Xaa in position 178 to 179 is any amino acid
  Variant (181)..(184): Xaa in position 181 to 184 is any amino acid
  Variant (187)..(190): Xaa in position 187 to 190 is any amino acid
  Variant (192)..(195): Xaa in position 192 to 195 is any amino acid
  Variant (197)..(202): Xaa in position 197 to 202 is any amino acid
  Variant (203)..(210): Xaa in position 203 to 210 is any or no amino acid
  Variant (214)..(215): Xaa in position 214 to 215 is any amino acid
  Variant (218)..(218): Xaa in position 218 is any amino acid
  Variant (221)..(223): Xaa in position 221 to 223 is any amino acid
  Variant (225)..(227): Xaa in position 225 to 227 is any amino acid
  Variant (229)..(230): Xaa in position 229 to 230 is any amino acid
  Variant (231)..(231): Xaa in position 231 is any or no amino acid
  Variant (233)..(234): Xaa in position 233 to 234 is any amino acid
  Variant (236)..(238): Xaa in position 236 to 238 is any amino acid
  Variant (241)..(241): Xaa in position 241 is any amino acid
  Variant (243)..(244): Xaa in position 243 to 244 is any amino acid
  Variant (252)..(252): Xaa in position 252 is any amino acid
  Variant (256)..(259): Xaa in position 256 to 259 is any amino acid
  Variant (261)..(263): Xaa in position 261 to 263 is any amino acid
  Variant (265)..(265): Xaa in position 265 is any amino acid
  Variant (267)..(267): Xaa in position 267 is any amino acid
  Variant (269)..(270): Xaa in position 269 to 270 is any amino acid
  Variant (273)..(273): Xaa in position 273 is any amino acid
  Variant (275)..(276): Xaa in position 275 to 276 is any amino acid
  Variant (283)..(285): Xaa in position 283 to 285 is any amino acid
  Variant (287)..(288): Xaa in position 287 to 288 is any amino acid
  Variant (290)..(292): Xaa in position 290 to 292 is any amino acid
  Variant (295)..(296): Xaa in position 295 to 296 is any amino acid
  Variant (298)..(299): Xaa in position 298 to 299 is any amino acid
  Variant (301)..(301): Xaa in position 301 is any amino acid
  Variant (303)..(303): Xaa in position 303 is any amino acid
  Variant (307)..(309): Xaa in position 307 to 309 is any amino acid
  Variant (316)..(316): Xaa in position 316 is any amino acid
  Variant (323)..(323): Xaa in position 323 is any amino acid
  Variant (325)..(327): Xaa in position 325 to 327 is any amino acid
  Variant (329)..(330): Xaa in position 329 to 330 is any amino acid
  Variant (331)..(348): Xaa in position 331 to 348 is any or no amino acid
  Variant (351)..(357): Xaa in position 351 to 357 is any amino acid
  Variant (359)..(360): Xaa in position 359 to 360 is any amino acid
  Variant (363)..(364): Xaa in position 363 to 364 is any amino acid
  Variant (370)..(370): Xaa in position 370 is any amino acid
  Variant (375)..(375): Xaa in position 375 is any amino acid
  Variant (379)..(379): Xaa in position 379 is any amino acid
  Variant (382)..(382): Xaa in position 382 is any amino acid
  Variant (384)..(388): Xaa in position 384 to 388 is any amino acid
  Variant (391)..(392): Xaa in position 391 to 392 is any amino acid
  Variant (395)..(395): Xaa in position 395 is any amino acid
  Variant (398)..(398): Xaa in position 398 is any amino acid
  Variant (401)..(403): Xaa in position 401 to 403 is any amino acid
  Variant (405)..(407): Xaa in position 405 to 407 is any amino acid
  Variant (410)..(413): Xaa in position 410 to 413 is any amino acid
  Variant (414)..(414): Xaa in position 414 is any or no amino acid
  Variant (416)..(416): Xaa in position 416 is any or no amino acid
  Variant (421)..(421): Xaa in position 421 is any amino acid
  Variant (426)..(429): Xaa in position 426 to 429 is any amino acid
  Variant (431)..(433): Xaa in position 431 to 433 is any or no amino acid
  Variant (436)..(439): Xaa in position 436 to 439 is any amino acid
  Variant (443)..(444): Xaa in position 443 to 444 is any amino acid
  Variant (446)..(448): Xaa in position 446 to 448 is any amino acid
  Variant (451)..(453): Xaa in position 451 to 453 is any amino acid
  Variant (457)..(458): Xaa in position 457 to 458 is any amino acid
  Variant (460)..(460): Xaa in position 460 is any amino acid
  Variant (462)..(467): Xaa in position 462 to 467 is any amino acid
  Variant (468)..(470): Xaa in position 468 to 470 is any or no amino acid
  Variant (472)..(479): Xaa in position 472 to 479 is any or no amino acid
  Variant (481)..(482): Xaa in position 481 to 482 is any amino acid
  Variant (485)..(485): Xaa in position 485 is any amino acid
  Variant (489)..(490): Xaa in position 489 to 490 is any amino acid
  Variant (493)..(494): Xaa in position 493 to 494 is any amino acid
  Variant (498)..(498): Xaa in position 498 is any amino acid
  Variant (500)..(505): Xaa in position 500 to 505 is any amino acid
  Variant (507)..(512): Xaa in position 507 to 512 is any amino acid
  Variant (514)..(514): Xaa in position 514 is any amino acid
  Variant (515)..(515): Xaa in position 515 is any or no amino acid
  Variant (518)..(521): Xaa in position 518 to 521 is any amino acid
  Variant (524)..(525): Xaa in position 524 to 525 is any amino acid
  Variant (526)..(527): Xaa in position 526 to 527 is any or no amino acid
  Variant (530)..(530): Xaa in position 530 is any amino acid
  Variant (532)..(532): Xaa in position 532 is any amino acid

SEQ ID NO: 65167 - protein, 85 aa, Artificial sequence; identical to SEQ ID NO: 14976
  Consensus
  Variant (2)..(2): Xaa in position 2 is Pro or Ser
  Variant (3)..(4): Xaa in position 3 to 4 is any amino acid
  Variant (5)..(5): Xaa in position 5 is Ile, Leu or Met
  Variant (6)..(8): Xaa in position 6 to 8 is any amino acid
  Variant (10)..(10): Xaa in position 10 is any amino acid
  Variant (11)..(18): Xaa in position 11 to 18 is any or no amino acid
  Variant (20)..(25): Xaa in position 20 to 25 is any amino acid
  Variant (26)..(26): Xaa in position 26 is Ala, Ser or Val
  Variant (27)..(28): Xaa in position 27 to 28 is any amino acid
  Variant (30)..(30): Xaa in position 30 is any amino acid
  Variant (32)..(32): Xaa in position 32 is any amino acid
  Variant (33)..(33): Xaa in position 33 is Ile or Leu
  Variant (34)..(34): Xaa in position 34 is any amino acid
  Variant (35)..(35): Xaa in position 35 is Ala, Gly or Ser
  Variant (36)..(39): Xaa in position 36 to 39 is any amino acid
  Variant (49)..(49): Xaa in position 49 is Ala, Gly, Asn, Ser or Thr
  Variant (51)..(51): Xaa in position 51 is Ile, Met or Val
  Variant (52)..(52): Xaa in position 52 is Ser or Thr
  Variant (53)..(53): Xaa in position 53 is Asp, Asn, Gln or Ser
  Variant (54)..(56): Xaa in position 54 to 56 is any amino acid
  Variant (57)..(57): Xaa in position 57 is Ala, Gly or Ser
  Variant (58)..(58): Xaa in position 58 is Ala or Gly
  Variant (59)..(59): Xaa in position 59 is Ile, Leu, Met or Val
  Variant (60)..(60): Xaa in position 60 is Phe, Ile, Leu or Met
  Variant (61)..(61): Xaa in position 61 is any amino acid
  Variant (65)..(65): Xaa in position 65 is Ala or Ser
  Variant (67)..(67): Xaa in position 67 is Ala or Ser
  Variant (69)..(69): Xaa in position 69 is Ala, Gly or Ser
  Variant (70)..(70): Xaa in position 70 is any amino acid
  Variant (71)..(71): Xaa in position 71 is Asn or Ser
  Variant (72)..(72): Xaa in position 72 is Phe, Trp or Tyr
  Variant (73)..(74): Xaa in position 73 to 74 is any amino acid
  Variant (75)..(75): Xaa in position 75 is Phe, Leu or Met
  Variant (76)..(78): Xaa in position 76 to 78 is any amino acid
  Variant (79)..(79): Xaa in position 79 is Ala, Gly, Ile or Val
  Variant (80)..(83): Xaa in position 80 to 83 is any amino acid
  Variant (84)..(84): Xaa in position 84 is Asp, Gly, Asn or Pro
  Variant (85)..(85): Xaa in position 85 is Phe or Tyr

SEQ ID NO: 65168 - protein, 41 aa, Artificial sequence; identical to SEQ ID NO: 14977
  Consensus
  Variant (2)..(2): Xaa in position 2 is Ala or Thr
  Variant (7)..(7): Xaa in position 7 is Ala or Gly
  Variant (10)..(10): Xaa in position 10 is any amino acid
  Variant (11)..(15): Xaa in position 11 to 15 is any or no amino acid
  Variant (17)..(40): Xaa in position 17 to 40 is any amino acid
  Variant (41)..(41): Xaa in position 41 is Ala, Glu, Gly, Gln or Thr

SEQ ID NO: 65169 - protein, 100 aa, Artificial sequence; identical to SEQ ID NO: 14978
  Consensus
  Variant (2)..(13): Xaa in position 2 to 13 is any amino acid
  Variant (14)..(17): Xaa in position 14 to 17 is any or no amino acid
  Variant (19)..(19): Xaa in position 19 is Cys, Asn, Ser or Val
  Variant (21)..(22): Xaa in position 21 to 22 is any amino acid
  Variant (27)..(27): Xaa in position 27 is Ile or Val
  Variant (29)..(29): Xaa in position 29 is Ile, Leu or Met
  Variant (30)..(30): Xaa in position 30 is any amino acid
  Variant (32)..(32): Xaa in position 32 is Ile, Leu or Met
  Variant (33)..(33): Xaa in position 33 is any amino acid
  Variant (34)..(34): Xaa in position 34 is Ala, Asp, Glu, Gly or Ser
  Variant (35)..(37): Xaa in position 35 to 37 is any amino acid
  Variant (38)..(38): Xaa in position 38 is Ile, Leu, Met or Val
  Variant (39)..(39): Xaa in position 39 is Ala, Cys or Thr
  Variant (40)..(43): Xaa in position 40 to 43 is any amino acid
  Variant (44)..(44): Xaa in position 44 is Ile or Val
  Variant (45)..(45): Xaa in position 45 is any amino acid
  Variant (46)..(46): Xaa in position 46 is Phe, Ile, Leu, Met or Val
  Variant (47)..(48): Xaa in position 47 to 48 is any amino acid
  Variant (50)..(50): Xaa in position 50 is Ala, Ser or Val
  Variant (51)..(51): Xaa in position 51 is Ala, Cys or Thr
  Variant (53)..(53): Xaa in position 53 is any amino acid
  Variant (54)..(54): Xaa in position 54 is Ala, Cys, Ser or Val
  Variant (57)..(57): Xaa in position 57 is Ala or Cys
  Variant (58)..(58): Xaa in position 58 is His, Trp or Tyr
  Variant (60)..(60): Xaa in position 60 is Ile or Val
  Variant (61)..(62): Xaa in position 61 to 62 is any amino acid
  Variant (63)..(63): Xaa in position 63 is Asp, Gln or Arg
  Variant (64)..(64): Xaa in position 64 is Asp or Glu
  Variant (65)..(68): Xaa in position 65 to 68 is any amino acid
  Variant (69)..(69): Xaa in position 69 is Asp, Glu, Gly, Asn or Ser
  Variant (70)..(71): Xaa in position 70 to 71 is any amino acid
  Variant (72)..(72): Xaa in position 72 is Ile, Leu, Pro or Val
  Variant (73)..(73): Xaa in position 73 is any amino acid
  Variant (74)..(74): Xaa in position 74 is Asp, Glu, Gln, Ser or Thr
  Variant (75)..(75): Xaa in position 75 is Ile or Val
  Variant (76)..(77): Xaa in position 76 to 77 is any amino acid
  Variant (78)..(78): Xaa in position 78 is Asp, Glu or Lys
  Variant (79)..(83): Xaa in position 79 to 83 is any amino acid
  Variant (84)..(84): Xaa in position 84 is Asp or Glu
  Variant (85)..(88): Xaa in position 85 to 88 is any amino acid
  Variant (90)..(90): Xaa in position 90 is Ala, Gly or Ser
  Variant (94)..(94): Xaa in position 94 is Ala, Cys, Gly, Pro or Thr
  Variant (95)..(95): Xaa in position 95 is Phe, Ile, Leu or Met
  Variant (96)..(96): Xaa in position 96 is Ala, Leu or Val
  Variant (97)..(97): Xaa in position 97 is Asn, Pro or Gln
  Variant (98)..(98): Xaa in position 98 is Ile or Met

SEQ ID NO: 65170 - protein, 84 aa, Artificial sequence; identical to SEQ ID NO: 14979
  Consensus
  Variant (2)..(4): Xaa in position 2 to 4 is any amino acid
  Variant (8)..(8): Xaa in position 8 is Leu or Met
  Variant (9)..(9): Xaa in position 9 is Ala, Glu, Asn, Ser or Thr
  Variant (11)..(11): Xaa in position 11 is any amino acid
  Variant (12)..(12): Xaa in position 12 is Ala or Asp
  Variant (13)..(13): Xaa in position 13 is Ile, Leu or Met
  Variant (14)..(16): Xaa in position 14 to 16 is any amino acid
  Variant (18)..(18): Xaa in position 18 is any amino acid
  Variant (20)..(20): Xaa in position 20 is Phe, Ile or Leu
  Variant (21)..(31): Xaa in position 21 to 31 is any amino acid
  Variant (33)..(33): Xaa in position 33 is Ile or Val
  Variant (34)..(34): Xaa in position 34 is any amino acid
  Variant (36)..(39): Xaa in position 36 to 39 is any amino acid
  Variant (40)..(40): Xaa in position 40 is Ala, Gly, Asn or Val
  Variant (41)..(42): Xaa in position 41 to 42 is any amino acid
  Variant (44)..(46): Xaa in position 44 to 46 is any amino acid
  Variant (47)..(47): Xaa in position 47 is Asp, Glu, Gly or Asn
  Variant (48)..(48): Xaa in position 48 is Ile or Val
  Variant (49)..(49): Xaa in position 49 is Ala, Ile, Leu, Pro or Val
  Variant (50)..(52): Xaa in position 50 to 52 is any amino acid
  Variant (53)..(53): Xaa in position 53 is Ala or Pro
  Variant (54)..(54): Xaa in position 54 is any amino acid
  Variant (56)..(56): Xaa in position 56 is any or no amino acid
  Variant (58)..(58): Xaa in position 58 is Ala, Gly or Thr
  Variant (59)..(60): Xaa in position 59 to 60 is any amino acid
  Variant (61)..(61): Xaa in position 61 is Ile, Leu or Val
  Variant (62)..(62): Xaa in position 62 is Asp or Glu
  Variant (63)..(63): Xaa in position 63 is Ala, Gly or Thr
  Variant (64)..(67): Xaa in position 64 to 67 is any amino acid
  Variant (68)..(68): Xaa in position 68 is Glu, Asn, Pro or Thr
  Variant (69)..(75): Xaa in position 69 to 75 is any amino acid
  Variant (76)..(76): Xaa in position 76 is Gly, Ile or Pro
  Variant (77)..(77): Xaa in position 77 is Ala, Asp, Gly or Ser
  Variant (78)..(80): Xaa in position 78 to 80 is any amino acid
  Variant (81)..(81): Xaa in position 81 is Ala, Cys, Gly, Asn, Ser, Thr or Val
  Variant (82)..(83): Xaa in position 82 to 83 is any amino acid
  Variant (84)..(84): Xaa in position 84 is Ile, Leu or Val

SEQ ID NO: 65171 - DNA, 612 bp, Escherichia coli; identical to SEQ ID NO: 15395
  CDS (1)..(612)

SEQ ID NO: 65172 - protein, 203 aa, Escherichia coli; identical to SEQ ID NO: 15396

SEQ ID NO: 65173 - DNA, 558 bp, Mesorhizobium loti MAFF303099; identical to SEQ ID NO: 15397
  CDS (1)..(558): transl_table=11

SEQ ID NO: 65174 - protein, 185 aa, Mesorhizobium loti MAFF303099; identical to SEQ ID NO: 15398

SEQ ID NO: 65175 - DNA, 591 bp, Mesorhizobium loti MAFF303099; identical to SEQ ID NO: 15399
  CDS (1)..(591): transl_table=11

SEQ ID NO: 65176 - protein, 196 aa, Mesorhizobium loti MAFF303099; identical to SEQ ID NO: 15400

SEQ ID NO: 65177 - DNA, 558 bp, Mesorhizobium loti MAFF303099; identical to SEQ ID NO: 15401
  CDS (1)..(558): transl_table=11

SEQ ID NO: 65178 - protein, 185 aa, Mesorhizobium loti MAFF303099; identical to SEQ ID NO: 15402

SEQ ID NO: 65179 - DNA, 579 bp, Vibrio cholerae O1 biovar eltor str. N16961; identical to SEQ ID NO: 15403
  CDS (1)..(579): transl_table=11

SEQ ID NO: 65180 - protein, 192 aa, Vibrio cholerae O1 biovar eltor str. N16961; identical to SEQ ID NO: 15404

SEQ ID NO: 65181 - DNA, 561 bp, Bacillus halodurans C-125; identical to SEQ ID NO: 15405
  CDS (1)..(561): transl_table=11

SEQ ID NO: 65182 - protein, 186 aa, Bacillus halodurans C-125; identical to SEQ ID NO: 15406

SEQ ID NO: 65183 - DNA, 612 bp, Pasteurella multocida subsp. multocida str. Pm70; identical to SEQ ID NO: 15407
  CDS (1)..(612): transl_table=11

SEQ ID NO: 65184 - protein, 203 aa, Pasteurella multocida subsp. multocida str. Pm70; identical to SEQ ID NO: 15408

SEQ ID NO: 65185 - DNA, 771 bp, Lactococcus lactis subsp. lactis Il1403; identical to SEQ ID NO: 15409
  CDS (1)..(771): transl_table=11

SEQ ID NO: 65186 - protein, 256 aa, Lactococcus lactis subsp. lactis Il1403; identical to SEQ ID NO: 15410

SEQ ID NO: 65187 - DNA, 612 bp, Lactococcus lactis subsp. lactis Il1403; identical to SEQ ID NO: 15411
  CDS (1)..(612): transl_table=11

SEQ ID NO: 65188 - protein, 203 aa, Lactococcus lactis subsp. lactis Il1403; identical to SEQ ID NO: 15412

SEQ ID NO: 65189 - DNA, 603 bp, Lactococcus lactis subsp. lactis Il1403; identical to SEQ ID NO: 15413
  CDS (1)..(603): transl_table=11

SEQ ID NO: 65190 - protein, 200 aa, Lactococcus lactis subsp. lactis Il1403; identical to SEQ ID NO: 15414

SEQ ID NO: 65191 - DNA, 612 bp, Lactococcus lactis subsp. lactis Il1403; identical to SEQ ID NO: 15415
  CDS (1)..(612): transl_table=11

SEQ ID NO: 65192 - protein, 203 aa, Lactococcus lactis subsp. lactis Il1403; identical to SEQ ID NO: 15416

SEQ ID NO: 65193 - DNA, 462 bp, Lactococcus lactis subsp. lactis Il1403; identical to SEQ ID NO: 15417
  CDS (1)..(462): transl_table=11

SEQ ID NO: 65194 - protein, 153 aa, Lactococcus lactis subsp. lactis Il1403; identical to SEQ ID NO: 15418

SEQ ID NO: 65195 - DNA, 567 bp, Streptococcus pyogenes M1 GAS; identical to SEQ ID NO: 15419
  CDS (1)..(567): transl_table=11

SEQ ID NO: 65196 - protein, 188 aa, Streptococcus pyogenes M1 GAS; identical to SEQ ID NO: 15420

SEQ ID NO: 65197 - DNA, 513 bp, Neisseria meningitidis Z2491; identical to SEQ ID NO: 15421
  CDS (1)..(513): transl_table=11

SEQ ID NO: 65198 - protein, 170 aa, Neisseria meningitidis Z2491; identical to SEQ ID NO: 15422

SEQ ID NO: 65199 - DNA, 549 bp, Escherichia coli O157:H7; identical to SEQ ID NO: 15423
  CDS (1)..(549): transl_table=11

SEQ ID NO: 65200 - protein, 182 aa, Escherichia coli O157:H7; identical to SEQ ID NO: 15424

SEQ ID NO: 65201 - DNA, 558 bp, Streptococcus pneumoniae TIGR4; identical to SEQ ID NO: 15425
  CDS (1)..(558): transl_table=11

SEQ ID NO: 65202 - protein, 185 aa, Streptococcus pneumoniae TIGR4; identical to SEQ ID NO: 15426

SEQ ID NO: 65203 - DNA, 561 bp, Clostridium acetobutylicum ATCC 824; identical to SEQ ID NO: 15427
  CDS (1)..(561): transl_table=11

SEQ ID NO: 65204 - protein, 186 aa, Clostridium acetobutylicum ATCC 824; identical to SEQ ID NO: 15428

SEQ ID NO: 65205 - DNA, 615 bp, Clostridium acetobutylicum ATCC 824; identical to SEQ ID NO: 15429
  CDS (1)..(615): transl_table=11

SEQ ID NO: 65206 - protein, 204 aa, Clostridium acetobutylicum ATCC 824; identical to SEQ ID NO: 15430

SEQ ID NO: 65207 - DNA, 600 bp, Staphylococcus aureus subsp. aureus Mu50; identical to SEQ ID NO: 15431
  CDS (1)..(600): transl_table=11

SEQ ID NO: 65208 - protein, 199 aa, Staphylococcus aureus subsp. aureus Mu50; identical to SEQ ID NO: 15432

SEQ ID NO: 65209 - DNA, 552 bp, Escherichia coli K12; identical to SEQ ID NO: 15433
  CDS (1)..(552): transl_table=11

SEQ ID NO: 65210 - protein, 183 aa, Escherichia coli K12; identical to SEQ ID NO: 15434

SEQ ID NO: 65211 - DNA, 615 bp, Sinorhizobium meliloti 1021; identical to SEQ ID NO: 15435
  CDS (1)..(615): transl_table=11

SEQ ID NO: 65212 - protein, 204 aa, Sinorhizobium meliloti 1021; identical to SEQ ID NO: 15436

SEQ ID NO: 65213 - DNA, 552 bp, Salmonella typhimurium LT2; identical to SEQ ID NO: 15437
  CDS (1)..(552): transl_table=11

SEQ ID NO: 65214 - protein, 183 aa, Salmonella typhimurium LT2; identical to SEQ ID NO: 15438

SEQ ID NO: 65215 - DNA, 564 bp, Listeria monocytogenes EGD-e; identical to SEQ ID NO: 15439
  CDS (1)..(564): transl_table=11

SEQ ID NO: 65216 - protein, 187 aa, Listeria monocytogenes EGD-e; identical to SEQ ID NO: 15440

SEQ ID NO: 65217 - DNA, 570 bp, Listeria innocua Clip11262; identical to SEQ ID NO: 15441
  CDS (1)..(570): transl_table=11

SEQ ID NO: 65218 - protein, 189 aa, Listeria innocua Clip11262; identical to SEQ ID NO: 15442

SEQ ID NO: 65219 - DNA, 564 bp, Listeria innocua Clip11262; identical to SEQ ID NO: 15443
  CDS (1)..(564): transl_table=11

SEQ ID NO: 65220 - protein, 187 aa, Listeria innocua Clip11262; identical to SEQ ID NO: 15444

SEQ ID NO: 65221 - DNA, 579 bp, Nostoc sp. PCC 7120; identical to SEQ ID NO: 15445
  CDS (1)..(579): transl_table=11

SEQ ID NO: 65222 - protein, 192 aa, Nostoc sp. PCC 7120; identical to SEQ ID NO: 15446

SEQ ID NO: 65223 - DNA, 828 bp, Nostoc sp. PCC 7120; identical to SEQ ID NO: 15447
  CDS (1)..(828): transl_table=11

SEQ ID NO: 65224 - protein, 275 aa, Nostoc sp. PCC 7120; identical to SEQ ID NO: 15448

SEQ ID NO: 65225 - DNA, 513 bp, Ralstonia solanacearum GMI1000; identical to SEQ ID NO: 15449
  CDS (1)..(513): transl_table=11

SEQ ID NO: 65226 - protein, 170 aa, Ralstonia solanacearum GMI1000; identical to SEQ ID NO: 15450

SEQ ID NO: 65227 - DNA, 618 bp, Agrobacterium tumefaciens str. C58; identical to SEQ ID NO: 15451
  CDS (1)..(618): transl_table=11

SEQ ID NO: 65228 - protein, 205 aa, Agrobacterium tumefaciens str. C58; identical to SEQ ID NO: 15452

SEQ ID NO: 65229 - DNA, 561 bp, Agrobacterium tumefaciens str. C58; identical to SEQ ID NO: 15453
  CDS (1)..(561): transl_table=11

SEQ ID NO: 65230 - protein, 186 aa, Agrobacterium tumefaciens str. C58; identical to SEQ ID NO: 15454

SEQ ID NO: 65231 - DNA, 633 bp, Agrobacterium tumefaciens str. C58; identical to SEQ ID NO: 15455
  CDS (1)..(633): transl_table=11

SEQ ID NO: 65232 - protein, 210 aa, Agrobacterium tumefaciens str. C58; identical to SEQ ID NO: 15456

SEQ ID NO: 65233 - DNA, 687 bp, Brucella melitensis 16M; identical to SEQ ID NO: 15457
  CDS (1)..(687): transl_table=11

SEQ ID NO: 65234 - protein, 228 aa, Brucella melitensis 16M; identical to SEQ ID NO: 15458

SEQ ID NO: 65235 - DNA, 681 bp, Pyrobaculum aerophilum str. IM2; identical to SEQ ID NO: 15459
  CDS (1)..(681): transl_table=11

SEQ ID NO: 65236 - protein, 226 aa, Pyrobaculum aerophilum str. IM2; identical to SEQ ID NO: 15460

SEQ ID NO: 65237 - DNA, 585 bp, Clostridium perfringens str. 13; identical to SEQ ID NO: 15461
  CDS (1)..(585): transl_table=11

SEQ ID NO: 65238 - protein, 194 aa, Clostridium perfringens str. 13; identical to SEQ ID NO: 15462

SEQ ID NO: 65239 - DNA, 501 bp, Pyrococcus furiosus DSM 3638; identical to SEQ ID NO: 15463
  CDS (1)..(501): transl_table=11

SEQ ID NO: 65240 - protein, 166 aa, Pyrococcus furiosus DSM 3638; identical to SEQ ID NO: 15464

SEQ ID NO: 65241 - DNA, 687 bp, Corynebacterium glutamicum ATCC 13032; identical to SEQ ID NO: 15465
  CDS (1)..(687): transl_table=11

SEQ ID NO: 65242 - protein, 228 aa, Corynebacterium glutamicum ATCC 13032; identical to SEQ ID NO: 15466

SEQ ID NO: 65243 - DNA, 576 bp, Methanosarcina acetivorans C2A; identical to SEQ ID NO: 15467
  CDS (1)..(576): transl_table=11

SEQ ID NO: 65244 - protein, 191 aa, Methanosarcina acetivorans C2A; identical to SEQ ID NO: 15468

SEQ ID NO: 65245 - DNA, 600 bp, Methanosarcina acetivorans C2A; identical to SEQ ID NO: 15469
  CDS (1)..(600): transl_table=11

SEQ ID NO: 65246 - protein, 199 aa, Methanosarcina acetivorans C2A; identical to SEQ ID NO: 15470

SEQ ID NO: 65247 - DNA, 525 bp, Methanosarcina acetivorans C2A; identical to SEQ ID NO: 15471
  CDS (1)..(525): transl_table=11

SEQ ID NO: 65248 - protein, 174 aa, Methanosarcina acetivorans C2A; identical to SEQ ID NO: 15472

SEQ ID NO: 65249 - DNA, 555 bp, Methanosarcina acetivorans C2A; identical to SEQ ID NO: 15473
  CDS (1)..(555): transl_table=11

SEQ ID NO: 65250 - protein, 184 aa, Methanosarcina acetivorans C2A; identical to SEQ ID NO: 15474

SEQ ID NO: 65251 - DNA, 663 bp, Thermoanaerobacter tengcongensis MB4; identical to SEQ ID NO: 15475
  CDS (1)..(663): transl_table=11

SEQ ID NO: 65252 - protein, 220 aa, Thermoanaerobacter tengcongensis MB4; identical to SEQ ID NO: 15476

SEQ ID NO: 65253 - DNA, 528 bp, Streptomyces coelicolor A3(2); identical to SEQ ID NO: 15477
  CDS (1)..(528)

SEQ ID NO: 65254 - protein, 175 aa, Streptomyces coelicolor A3(2); identical to SEQ ID NO: 15478

SEQ ID NO: 65255 - DNA, 804 bp, Streptomyces coelicolor A3(2); identical to SEQ ID NO: 15479
  CDS (1)..(804)

SEQ ID NO: 65256 - protein, 267 aa, Streptomyces coelicolor A3(2); identical to SEQ ID NO: 15480

SEQ ID NO: 65257 - DNA, 582 bp, Streptomyces coelicolor A3(2); identical to SEQ ID NO: 15481
  CDS (1)..(582)

SEQ ID NO: 65258 - protein, 193 aa, Streptomyces coelicolor A3(2); identical to SEQ ID NO: 15482

SEQ ID NO: 65259 - DNA, 564 bp, Methanosarcina mazei Go1; identical to SEQ ID NO: 15483
  CDS (1)..(564): transl_table=11

SEQ ID NO: 65260 - protein, 187 aa, Methanosarcina mazei Go1; identical to SEQ ID NO: 15484

SEQ ID NO: 65261 - DNA, 702 bp, Methanosarcina mazei Go1; identical to SEQ ID NO: 15485
  CDS (1)..(702): transl_table=11

SEQ ID NO: 65262 - protein, 233 aa, Methanosarcina mazei Go1; identical to SEQ ID NO: 15486

SEQ ID NO: 65263 - DNA, 579 bp, Xanthomonas campestris pv. campestris str. ATCC 33913; identical to SEQ ID NO: 15487
  CDS (1)..(579): transl_table=11

SEQ ID NO: 65264 - protein, 192 aa, Xanthomonas campestris pv. campestris str. ATCC 33913; identical to SEQ ID NO: 15488

SEQ ID NO: 65265 - DNA, 579 bp, Xanthomonas axonopodis pv. citri str. 306; identical to SEQ ID NO: 15489
  CDS (1)..(579): transl_table=11

SEQ ID NO: 65266 - protein, 192 aa, Xanthomonas axonopodis pv. citri str. 306; identical to SEQ ID NO: 15490

SEQ ID NO: 65267 - DNA, 639 bp, Streptococcus agalactiae 2603V/R; identical to SEQ ID NO: 15491
  CDS (1)..(639): transl_table=11

SEQ ID NO: 65268 - protein, 212 aa, Streptococcus agalactiae 2603V/R; identical to SEQ ID NO: 15492

SEQ ID NO: 65269 - DNA, 549 bp, Streptococcus agalactiae 2603V/R; identical to SEQ ID NO: 15493
  CDS (1)..(549): transl_table=11

SEQ ID NO: 65270 - protein, 182 aa, Streptococcus agalactiae 2603V/R; identical to SEQ ID NO: 15494

SEQ ID NO: 65271 - DNA, 540 bp, Oceanobacillus iheyensis HTE831; identical to SEQ ID NO: 15495
  CDS (1)..(540): transl_table=11

SEQ ID NO: 65272 - protein, 179 aa, Oceanobacillus iheyensis HTE831; identical to SEQ ID NO: 15496

SEQ ID NO: 65273 - DNA, 675 bp, Bifidobacterium longum NCC2705; identical to SEQ ID NO: 15497
  CDS (1)..(675): transl_table=11

SEQ ID NO: 65274 - protein, 224 aa, Bifidobacterium longum NCC2705; identical to SEQ ID NO: 15498

SEQ ID NO: 65275 - DNA, 678 bp, Bifidobacterium longum NCC2705; identical to SEQ ID NO: 15499
  CDS (1)..(678): transl_table=11

SEQ ID NO: 65276 - protein, 225 aa, Bifidobacterium longum NCC2705; identical to SEQ ID NO: 15500

SEQ ID NO: 65277 - DNA, 597 bp, Leptospira interrogans serovar Lai str. 56601; identical to SEQ ID NO: 15501
  CDS (1)..(597): transl_table=11

SEQ ID NO: 65278 - protein, 198 aa, Leptospira interrogans serovar Lai str. 56601; identical to SEQ ID NO: 15502

SEQ ID NO: 65279 - DNA, 579 bp, Shewanella oneidensis MR-1; identical to SEQ ID NO: 15503
  CDS (1)..(579): transl_table=11

SEQ ID NO: 65280 - protein, 192 aa, Shewanella oneidensis MR-1; identical to SEQ ID NO: 15504

SEQ ID NO: 65281 - DNA, 630 bp, Shewanella oneidensis MR-1; identical to SEQ ID NO: 15505
  CDS (1)..(630): transl_table=11

SEQ ID NO: 65282 - protein, 209 aa, Shewanella oneidensis MR-1; identical to SEQ ID NO: 15506

SEQ ID NO: 65283 - DNA, 699 bp, Streptococcus mutans UA159; identical to SEQ ID NO: 15507
  CDS (1)..(699): transl_table=11

SEQ ID NO: 65284 - protein, 232 aa, Streptococcus mutans UA159; identical to SEQ ID NO: 15508

SEQ ID NO: 65285 - DNA, 648 bp, Streptomyces coelicolor A3(2); identical to SEQ ID NO: 15509
  CDS (1)..(648)

SEQ ID NO: 65286 - protein, 215 aa, Streptomyces coelicolor A3(2); identical to SEQ ID NO: 15510

SEQ ID NO: 65287 - DNA, 567 bp, Pseudomonas putida KT2440; identical to SEQ ID NO: 15511
  CDS (1)..(567): transl_table=11

SEQ ID NO: 65288 - protein, 188 aa, Pseudomonas putida KT2440; identical to SEQ ID NO: 15512

SEQ ID NO: 65289 - DNA, 552 bp, Escherichia coli CFT073; identical to SEQ ID NO: 15513
  CDS (1)..(552): transl_table=11

SEQ ID NO: 65290 - protein, 183 aa, Escherichia coli CFT073; identical to SEQ ID NO: 15514

SEQ ID NO: 65291 - DNA, 549 bp, Escherichia coli CFT073; identical to SEQ ID NO: 15515
  CDS (1)..(549): transl_table=11

SEQ ID NO: 65292 - protein, 182 aa, Escherichia coli CFT073; identical to SEQ ID NO: 15516

SEQ ID NO: 65293 - DNA, 588 bp, Mycoplasma penetrans HF-2; identical to SEQ ID NO: 15517
  CDS (1)..(588): transl_table=4

SEQ ID NO: 65294 - protein, 195 aa, Mycoplasma penetrans HF-2; identical to SEQ ID NO: 15518

SEQ ID NO: 65295 - DNA, 771 bp, Vibrio vulnificus CMCP6; identical to SEQ ID NO: 15519
  CDS (1)..(771): transl_table=11

SEQ ID NO: 65296 - protein, 256 aa, Vibrio vulnificus CMCP6; identical to SEQ ID NO: 15520

SEQ ID NO: 65297 - DNA, 594 bp, Vibrio vulnificus CMCP6; identical to SEQ ID NO: 15521
  CDS (1)..(594): transl_table=11

SEQ ID NO: 65298 - protein, 197 aa, Vibrio vulnificus CMCP6; identical to SEQ ID NO: 15522

SEQ ID NO: 65299 - DNA, 549 bp, Vibrio vulnificus CMCP6; identical to SEQ ID NO: 15523
  CDS (1)..(549): transl_table=11

SEQ ID NO: 65300 - protein, 182 aa, Vibrio vulnificus CMCP6; identical to SEQ ID NO: 15524

SEQ ID NO: 65301 - DNA, 621 bp, Bradyrhizobium japonicum USDA 110; identical to SEQ ID NO: 15525
  CDS (1)..(621)

SEQ ID NO: 65302 - protein, 206 aa, Bradyrhizobium japonicum USDA 110; identical to SEQ ID NO: 15526

SEQ ID NO: 65303 - DNA, 564 bp, Clostridium tetani E88; identical to SEQ ID NO: 15527
  CDS (1)..(564): transl_table=11

SEQ ID NO: 65304 - protein, 187 aa, Clostridium tetani E88; identical to SEQ ID NO: 15528

SEQ ID NO: 65305 - DNA, 618 bp, Lactobacillus plantarum WCFS1; identical to SEQ ID NO: 15529
  CDS (1)..(618): transl_table=11

SEQ ID NO: 65306 - protein, 205 aa, Lactobacillus plantarum WCFS1; identical to SEQ ID NO: 15530

SEQ ID NO: 65307 - DNA, 609 bp, Lactobacillus plantarum WCFS1; identical to SEQ ID NO: 15531
  CDS (1)..(609): transl_table=11

SEQ ID NO: 65308 - protein, 202 aa, Lactobacillus plantarum WCFS1; identical to SEQ ID NO: 15532

SEQ ID NO: 65309 - DNA, 555 bp, Lactobacillus plantarum WCFS1; identical to SEQ ID NO: 15533
  CDS (1)..(555): transl_table=11

SEQ ID NO: 65310 - protein, 184 aa, Lactobacillus plantarum WCFS1; identical to SEQ ID NO: 15534

SEQ ID NO: 65311 - DNA, 603 bp, Lactobacillus plantarum WCFS1; identical to SEQ ID NO: 15535
  CDS (1)..(603): transl_table=11

SEQ ID NO: 65312 - protein, 200 aa, Lactobacillus plantarum WCFS1; identical to SEQ ID NO: 15536

SEQ ID NO: 65313 - DNA, 621 bp, Lactobacillus plantarum WCFS1; identical to SEQ ID NO: 15537
  CDS (1)..(621): transl_table=11

SEQ ID NO: 65314 - protein, 206 aa, Lactobacillus plantarum WCFS1; identical to SEQ ID NO: 15538

SEQ ID NO: 65315 - DNA, 570 bp, Lactobacillus plantarum WCFS1; identical to SEQ ID NO: 15539
  CDS (1)..(570): transl_table=11

SEQ ID NO: 65316 - protein, 189 aa, Lactobacillus plantarum WCFS1; identical to SEQ ID NO: 15540

SEQ ID NO: 65317 - DNA, 561 bp, Lactobacillus plantarum WCFS1; identical to SEQ ID NO: 15541
  CDS (1)..(561): transl_table=11

SEQ ID NO: 65318 - protein, 186 aa, Lactobacillus plantarum WCFS1; identical to SEQ ID NO: 15542

SEQ ID NO: 65319 - DNA, 555 bp, Vibrio parahaemolyticus RIMD 2210633; identical to SEQ ID NO: 15543
  CDS (1)..(555): transl_table=11

SEQ ID NO: 65320 - protein, 184 aa, Vibrio parahaemolyticus RIMD 2210633; identical to SEQ ID NO: 15544

SEQ ID NO: 65321 - DNA, 549 bp, Vibrio parahaemolyticus RIMD 2210633; identical to SEQ ID NO: 15545
  CDS (1)..(549): transl_table=11

SEQ ID NO: 65322 - protein, 182 aa, Vibrio parahaemolyticus RIMD 2210633; identical to SEQ ID NO: 15546

SEQ ID NO: 65323 - DNA, 552 bp, Salmonella enterica subsp. enterica serovar Typhi Ty2; identical to SEQ ID NO: 15547
  CDS (1)..(552): transl_table=11

SEQ ID NO: 65324 - protein, 183 aa, Salmonella enterica subsp. enterica serovar Typhi Ty2; identical to SEQ ID NO: 15548

SEQ ID NO: 65325 - DNA, 759 bp, Bacteroides thetaiotaomicron VPI-5482; identical to SEQ ID NO: 15549
  CDS (1)..(759): transl_table=11

SEQ ID NO: 65326 - protein, 252 aa, Bacteroides thetaiotaomicron VPI-5482; identical to SEQ ID NO: 15550

SEQ ID NO: 65327 - DNA, 624 bp, Bacteroides thetaiotaomicron VPI-5482; identical to SEQ ID NO: 15551
  CDS (1)..(624): transl_table=11

SEQ ID NO: 65328 - protein, 207 aa, Bacteroides thetaiotaomicron VPI-5482; identical to SEQ ID NO: 15552

SEQ ID NO: 65329 - DNA, 564 bp, Bacteroides thetaiotaomicron VPI-5482; identical to SEQ ID NO: 15553
  CDS (1)..(564): transl_table=11

SEQ ID NO: 65330 - protein, 187 aa, Bacteroides thetaiotaomicron VPI-5482; identical to SEQ ID NO: 15554

SEQ ID NO: 65331 - DNA, 606 bp, Bacteroides thetaiotaomicron VPI-5482; identical to SEQ ID NO: 15555
  CDS (1)..(606): transl_table=11

SEQ ID NO: 65332 - protein, 201 aa, Bacteroides thetaiotaomicron VPI-5482; identical to SEQ ID NO: 15556

SEQ ID NO: 65333 - DNA, 552 bp, Bacteroides thetaiotaomicron VPI-5482; identical to SEQ ID NO: 15557
  CDS (1)..(552): transl_table=11

SEQ ID NO: 65334 - protein, 183 aa, Bacteroides thetaiotaomicron VPI-5482; identical to SEQ ID NO: 15558

SEQ ID NO: 65335 - DNA, 846 bp, Enterococcus faecalis V583; identical to SEQ ID NO: 15559
  CDS (1)..(846): transl_table=11

SEQ ID NO: 65336 - protein, 281 aa, Enterococcus faecalis V583; identical to SEQ ID NO: 15560

SEQ ID NO: 65337 - DNA, 639 bp, Enterococcus faecalis V583; identical to SEQ ID NO: 15561
  CDS (1)..(639): transl_table=11

SEQ ID NO: 65338 - protein, 212 aa, Enterococcus faecalis V583; identical to SEQ ID NO: 15562

SEQ ID NO: 65339 - DNA, 582 bp, Enterococcus faecalis V583; identical to SEQ ID NO: 15563
  CDS (1)..(582): transl_table=11

SEQ ID NO: 65340 - protein, 193 aa, Enterococcus faecalis V583; identical to SEQ ID NO: 15564

SEQ ID NO: 65341 - DNA, 723 bp, Bacillus cereus ATCC 14579; identical to SEQ ID NO: 15565
  CDS (1)..(723): transl_table=11

SEQ ID NO: 65342 - protein, 240 aa, Bacillus cereus ATCC 14579; identical to SEQ ID NO: 15566

SEQ ID NO: 65343 - DNA, 561 bp, Bacillus cereus ATCC 14579; identical to SEQ ID NO: 15567
  CDS (1)..(561): transl_table=11

SEQ ID NO: 65344 - protein, 186 aa, Bacillus cereus ATCC 14579; identical to SEQ ID NO: 15568

SEQ ID NO: 65345 - DNA, 666 bp, Bacillus anthracis str. Ames; identical to SEQ ID NO: 15569
  CDS (1)..(666): transl_table=11

SEQ ID NO: 65346 - protein, 221 aa, Bacillus anthracis str. Ames; identical to SEQ ID NO: 15570

SEQ ID NO: 65347 - DNA, 564 bp, Bacillus anthracis str. Ames; identical to SEQ ID NO: 15571
  CDS (1)..(564): transl_table=11

SEQ ID NO: 65348 - protein, 187 aa, Bacillus anthracis str. Ames; identical to SEQ ID NO: 15572

SEQ ID NO: 65349 - DNA, 723 bp, Bacillus anthracis str. Ames; identical to SEQ ID NO: 15573
  CDS (1)..(723): transl_table=11

SEQ ID NO: 65350 - protein, 240 aa, Bacillus anthracis str. Ames; identical to SEQ ID NO: 15574

SEQ ID NO: 65351 - DNA, 618 bp, Helicobacter hepaticus ATCC 51449; identical to SEQ ID NO: 15575
  CDS (1)..(618): transl_table=11

SEQ ID NO: 65352 - protein, 205 aa, Helicobacter hepaticus ATCC 51449; identical to SEQ ID NO: 15576

SEQ ID NO: 65353 - DNA, 555 bp, Rhodopirellula baltica SH 1; identical to SEQ ID NO: 15577
  CDS (1)..(555): transl_table=11

SEQ ID NO: 65354 - protein, 184 aa, Rhodopirellula baltica SH 1; identical to SEQ ID NO: 15578

SEQ ID NO: 65355 - DNA, 522 bp, Chromobacterium violaceum ATCC 12472; identical to SEQ ID NO: 15579
  CDS (1)..(522): transl_table=11

SEQ ID NO: 65356 - protein, 173 aa, Chromobacterium violaceum ATCC 12472; identical to SEQ ID NO: 15580

SEQ ID NO: 65357 - DNA, 561 bp, Gloeobacter violaceus PCC 7421; identical to SEQ ID NO: 15581
  CDS (1)..(561): transl_table=11

SEQ ID NO: 65358 - protein, 186 aa, Gloeobacter violaceus PCC 7421; identical to SEQ ID NO: 15582

SEQ ID NO: 65359 - DNA, 771 bp, Vibrio vulnificus YJ016; identical to SEQ ID NO: 15583
  CDS (1)..(771): transl_table=11

SEQ ID NO: 65360 - protein, 256 aa, Vibrio vulnificus YJ016; identical to SEQ ID NO: 15584

SEQ ID NO: 65361 - DNA, 558 bp, Vibrio vulnificus YJ016; identical to SEQ ID NO: 15585
  CDS (1)..(558): transl_table=11

SEQ ID NO: 65362 - protein, 185 aa, Vibrio vulnificus YJ016; identical to SEQ ID NO: 15586

SEQ ID NO: 65363 - DNA, 657 bp, Vibrio vulnificus YJ016; identical to SEQ ID NO: 15587
  CDS (1)..(657): transl_table=11

SEQ ID NO: 65364 - protein, 218 aa, Vibrio vulnificus YJ016; identical to SEQ ID NO: 15588

SEQ ID NO: 65365 - DNA, 621 bp, Vibrio vulnificus YJ016; identical to SEQ ID NO: 15589
  CDS (1)..(621): transl_table=11

SEQ ID NO: 65366 - protein, 206 aa, Vibrio vulnificus YJ016; identical to SEQ ID NO: 15590

SEQ ID NO: 65367 - DNA, 570 bp, Corynebacterium diphtheriae NCTC 13129; identical to SEQ ID NO: 15591
  CDS (1)..(570): transl_table=11

SEQ ID NO: 65368 - protein, 189 aa, Corynebacterium diphtheriae NCTC 13129; identical to SEQ ID NO: 15592

SEQ ID NO: 65369 - DNA, 573 bp, Rhodopseudomonas palustris CGA009; identical to SEQ ID NO: 15593
  CDS (1)..(573): transl_table=11

SEQ ID NO: 65370 - protein, 190 aa, Rhodopseudomonas palustris CGA009; identical to SEQ ID NO: 15594

SEQ ID NO: 65371 - DNA, 615 bp, Lactobacillus johnsonii NCC 533; identical to SEQ ID NO: 15595
  CDS (1)..(615): transl_table=11

SEQ ID NO: 65372 - protein, 204 aa, Lactobacillus johnsonii NCC 533; identical to SEQ ID NO: 15596

SEQ ID NO: 65373 - DNA, 564 bp, Bacillus cereus ATCC 10987; identical to SEQ ID NO: 15597
  CDS (1)..(564): transl_table=11

SEQ ID NO: 65374 - protein, 187 aa, Bacillus cereus ATCC 10987; identical to SEQ ID NO: 15598

SEQ ID NO: 65375 - DNA, 2154 bp, Neurospora crassa; identical to SEQ ID NO: 15599
  CDS (1)..(2154)

SEQ ID NO: 65376 - protein, 717 aa, Neurospora crassa; identical to SEQ ID NO: 15600

SEQ ID NO: 65377 - DNA, 660 bp, Magnaporthe grisea 70-15; identical to SEQ ID NO: 15601
  CDS (1)..(660)

SEQ ID NO: 65378 - protein, 219 aa, Magnaporthe grisea 70-15; identical to SEQ ID NO: 15602

SEQ ID NO: 65379 - DNA, 699 bp, Gibberella zeae PH-1; identical to SEQ ID NO: 15603
  CDS (1)..(699)

SEQ ID NO: 65380 - protein, 232 aa, Gibberella zeae PH-1; identical to SEQ ID NO: 15604

SEQ ID NO: 65381 - DNA, 699 bp, Gibberella zeae PH-1; identical to SEQ ID NO: 15605
  CDS (1)..(699)

SEQ ID NO: 65382 - protein, 232 aa, Gibberella zeae PH-1; identical to SEQ ID NO: 15606

SEQ ID NO: 65383 - DNA, 690 bp, Ustilago maydis 521; identical to SEQ ID NO: 15607
  CDS (1)..(690)

SEQ ID NO: 65384 - protein, 229 aa, Ustilago maydis 521; identical to SEQ ID NO: 15608

SEQ ID NO: 65385 - DNA, 702 bp, Aspergillus nidulans FGSC A4; identical to SEQ ID NO: 15609
  CDS (1)..(702)

SEQ ID NO: 65386 - protein, 233 aa, Aspergillus nidulans FGSC A4; identical to SEQ ID NO: 15610

SEQ ID NO: 65387 - DNA, 618 bp, Aspergillus nidulans FGSC A4; identical to SEQ ID NO: 15611
  CDS (1)..(618)

SEQ ID NO: 65388 - protein, 205 aa, Aspergillus nidulans FGSC A4; identical to SEQ ID NO: 15612

SEQ ID NO: 65389 - DNA, 573 bp, Candida glabrata CBS138; identical to SEQ ID NO: 15613
  CDS (1)..(573)

SEQ ID NO: 65390 - protein, 190 aa, Candida glabrata CBS138; identical to SEQ ID NO: 15614

SEQ ID NO: 65391 - DNA, 570 bp, Kluyveromyces lactis NRRL Y-1140; identical to SEQ ID NO: 15615
  CDS (1)..(570)

SEQ ID NO: 65392 - protein, 189 aa, Kluyveromyces lactis NRRL Y-1140; identical to SEQ ID NO: 15616

SEQ ID NO: 65393 - DNA, 693 bp, Debaryomyces hansenii CBS767; identical to SEQ ID NO: 15617
  CDS (1)..(693)

SEQ ID NO: 65394 - protein, 230 aa, Debaryomyces hansenii CBS767; identical to SEQ ID NO: 15618

SEQ ID NO: 65395 - DNA, 690 bp, Debaryomyces hansenii CBS767; identical to SEQ ID NO: 15619
  CDS (1)..(690)

SEQ ID NO: 65396 - protein, 229 aa, Debaryomyces hansenii CBS767; identical to SEQ ID NO: 15620

SEQ ID NO: 65397 - DNA, 666 bp, Yarrowia lipolytica CLIB99; identical to SEQ ID NO: 15621
  CDS (1)..(666)

SEQ ID NO: 65398 - protein, 221 aa, Yarrowia lipolytica CLIB99; identical to SEQ ID NO: 15622

SEQ ID NO: 65399 - DNA, 840 bp, Yarrowia lipolytica CLIB99; identical to SEQ ID NO: 15623
  CDS (1)..(840)

SEQ ID NO: 65400 - protein, 279 aa, Yarrowia lipolytica CLIB99; identical to SEQ ID NO: 15624

SEQ ID NO: 65401 - DNA, 642 bp, Cryptococcus neoformans var. neoformans JEC21; identical to SEQ ID NO: 15625
  CDS (1)..(642)

SEQ ID NO: 65402 - protein, 213 aa, Cryptococcus neoformans var. neoformans JEC21; identical to SEQ ID NO: 15626

SEQ ID NO: 65403 - DNA, 546 bp, Dictyostelium discoideum; identical to SEQ ID NO: 15627
  CDS (1)..(546)

SEQ ID NO: 65404 - protein, 181 aa, Dictyostelium discoideum; identical to SEQ ID NO: 15628

SEQ ID NO: 65405 - DNA, 576 bp, Dictyostelium discoideum; identical to SEQ ID NO: 15629
  CDS (1)..(576)

SEQ ID NO: 65406 - protein, 191 aa, Dictyostelium discoideum; identical to SEQ ID NO: 15630

SEQ ID NO: 65407 - DNA, 591 bp, Dictyostelium discoideum; identical to SEQ ID NO: 15631
  CDS (1)..(591)

SEQ ID NO: 65408 - protein, 196 aa, Dictyostelium discoideum; identical to SEQ ID NO: 15632

SEQ ID NO: 65409 - DNA, 573 bp, Dictyostelium discoideum; identical to SEQ ID NO: 15633
  CDS (1)..(573)

SEQ ID NO: 65410 - protein, 190 aa, Dictyostelium discoideum; identical to SEQ ID NO: 15634

SEQ ID NO: 65411 - DNA, 459 bp, Entamoeba histolytica HM-1:IMSS; identical to SEQ ID NO: 15635
  CDS (1)..(459)

SEQ ID NO: 65412 - protein, 152 aa, Entamoeba histolytica HM-1:IMSS; identical to SEQ ID NO: 15636

SEQ ID NO: 65413 - DNA, 609 bp, Entamoeba histolytica HM-1:IMSS; identical to SEQ ID NO: 15637
  CDS (1)..(609)

SEQ ID NO: 65414 - protein, 202 aa, Entamoeba histolytica HM-1:IMSS; identical to SEQ ID NO: 15638

SEQ ID NO: 65415 - DNA, 609 bp, Entamoeba histolytica HM-1:IMSS; identical to SEQ ID NO: 15639
  CDS (1)..(609)

SEQ ID NO: 65416 - protein, 202 aa, Entamoeba histolytica HM-1:IMSS; identical to SEQ ID NO: 15640

SEQ ID NO: 65417 - DNA, 549 bp, Entamoeba histolytica HM-1:IMSS; identical to SEQ ID NO: 15641
  CDS (1)..(549)

SEQ ID NO: 65418 - protein, 182 aa, Entamoeba histolytica HM-1:IMSS; identical to SEQ ID NO: 15642

SEQ ID NO: 65419 - DNA, 612 bp, Entamoeba histolytica HM-1:IMSS; identical to SEQ ID NO: 15643
  CDS (1)..(612)

SEQ ID NO: 65420 - protein, 203 aa, Entamoeba histolytica HM-1:IMSS; identical to SEQ ID NO: 15644

SEQ ID NO: 65421 - DNA, 615 bp, Entamoeba histolytica HM-1:IMSS; identical to SEQ ID NO: 15645
  CDS (1)..(615)

SEQ ID NO: 65422 - protein, 204 aa, Entamoeba histolytica HM-1:IMSS; identical to SEQ ID NO: 15646

SEQ ID NO: 65423 - DNA, 924 bp, Candida albicans SC5314; identical to SEQ ID NO: 15647
  CDS (1)..(924): transl_table=12

SEQ ID NO: 65424 - protein, 307 aa, Candida albicans SC5314; identical to SEQ ID NO: 15648

SEQ ID NO: 65425 - DNA, 888 bp, Thermus thermophilus HB27; identical to SEQ ID NO: 15649
  CDS (1)..(888): transl_table=11

SEQ ID NO: 65426 - protein, 295 aa, Thermus thermophilus HB27; identical to SEQ ID NO: 15650

SEQ ID NO: 65427 - DNA, 594 bp, Desulfovibrio vulgaris subsp. vulgaris str. Hildenborough; identical to SEQ ID NO: 15651
  CDS (1)..(594): transl_table=11

SEQ ID NO: 65428 - protein, 197 aa, Desulfovibrio vulgaris subsp. vulgaris str. Hildenborough; identical to SEQ ID NO: 15652

SEQ ID NO: 65429 - DNA, 570 bp, Listeria monocytogenes str. 4b F2365; identical to SEQ ID NO: 15653
  CDS (1)..(570): transl_table=11

SEQ ID NO: 65430 - protein, 189 aa, Listeria monocytogenes str. 4b F2365; identical to SEQ ID NO: 15654

SEQ ID NO: 65431 - DNA, 564 bp, Listeria monocytogenes str. 4b F2365; identical to SEQ ID NO: 15655
  CDS (1)..(564): transl_table=11

SEQ ID NO: 65432 - protein, 187 aa, Listeria monocytogenes str. 4b F2365; identical to SEQ ID NO: 15656

SEQ ID NO: 65433 - DNA, 564 bp, Bacillus thuringiensis serovar konkukian str. 97-27; identical to SEQ ID NO: 15657
  CDS (1)..(564): transl_table=11

SEQ ID NO: 65434 - protein, 187 aa, Bacillus thuringiensis serovar konkukian str. 97-27; identical to SEQ ID NO: 15658

SEQ ID NO: 65435 - DNA, 486 bp, Staphylococcus aureus subsp. aureus MRSA252; identical to SEQ ID NO: 15659
  CDS (1)..(486): transl_table=11

SEQ ID NO: 65436 - protein, 161 aa, Staphylococcus aureus subsp. aureus MRSA252; identical to SEQ ID NO: 15660

SEQ ID NO: 65437 - DNA, 600 bp, Staphylococcus aureus subsp. aureus MRSA252; identical to SEQ ID NO: 15661
  CDS (1)..(600): transl_table=11

SEQ ID NO: 65438 - protein, 199 aa, Staphylococcus aureus subsp. aureus MRSA252; identical to SEQ ID NO: 15662

SEQ ID NO: 65439 - DNA, 627 bp, Erwinia carotovora subsp. atroseptica SCRI1043; identical to SEQ ID NO: 15663
  CDS (1)..(627)

SEQ ID NO: 65440 - protein, 208 aa, Erwinia carotovora subsp. atroseptica SCRI1043; identical to SEQ ID NO: 15664

SEQ ID NO: 65441 - DNA, 573 bp, Propionibacterium acnes KPA171202; identical to SEQ ID NO: 15665
  CDS (1)..(573): transl_table=11

SEQ ID NO: 65442 - protein, 190 aa, Propionibacterium acnes KPA171202; identical to SEQ ID NO: 15666

SEQ ID NO: 65443 - DNA, 510 bp, Desulfotalea psychrophila LSv54; identical to SEQ ID NO: 15667
  CDS (1)..(510): transl_table=11

SEQ ID NO: 65444 - protein, 169 aa, Desulfotalea psychrophila LSv54; identical to SEQ ID NO: 15668

SEQ ID NO: 65445 - DNA, 579 bp, Bacillus licheniformis ATCC 14580; identical to SEQ ID NO: 15669
  CDS (1)..(579): transl_table=11

SEQ ID NO: 65446 - protein, 192 aa, Bacillus licheniformis ATCC 14580; identical to SEQ ID NO: 15670

SEQ ID NO: 65447 - DNA, 564 bp, Bacillus cereus E33L; identical to SEQ ID NO: 15671
  CDS (1)..(564): transl_table=11

SEQ ID NO: 65448 - protein, 187 aa, Bacillus cereus E33L; identical to SEQ ID NO: 15672

SEQ ID NO: 65449 - DNA, 603 bp, Mannheimia succiniciproducens MBEL55E; identical to SEQ ID NO: 15673
  CDS (1)..(603): transl_table=11

SEQ ID NO: 65450 - protein, 200 aa, Mannheimia succiniciproducens MBEL55E; identical to SEQ ID NO: 15674

SEQ ID NO: 65451 - DNA, 597 bp, Mannheimia succiniciproducens MBEL55E; identical to SEQ ID NO: 15675
  CDS (1)..(597): transl_table=11

SEQ ID NO: 65452 - protein, 198 aa, Mannheimia succiniciproducens MBEL55E; identical to SEQ ID NO: 15676

SEQ ID NO: 65453 - DNA, 606 bp, Bacteroides fragilis YCH46; identical to SEQ ID NO: 15677
  CDS (1)..(606): transl_table=11

SEQ ID NO: 65454 - protein, 201 aa, Bacteroides fragilis YCH46; identical to SEQ ID NO: 15678

SEQ ID NO: 65455 - DNA, 630 bp, Bacteroides fragilis YCH46; identical to SEQ ID NO: 15679
  CDS (1)..(630): transl_table=11

SEQ ID NO: 65456 - protein, 209 aa, Bacteroides fragilis YCH46; identical to SEQ ID NO: 15680

SEQ ID NO: 65457 - DNA, 627 bp, Bacteroides fragilis YCH46; identical to SEQ ID NO: 15681
  CDS (1)..(627): transl_table=11

SEQ ID NO: 65458 - protein, 208 aa, Bacteroides fragilis YCH46; identical to SEQ ID NO: 15682

SEQ ID NO: 65459 - DNA, 591 bp, Methylococcus capsulatus str. Bath; identical to SEQ ID NO: 15683
  CDS (1)..(591): transl_table=11

SEQ ID NO: 65460 - protein, 196 aa, Methylococcus capsulatus str. Bath; identical to SEQ ID NO: 15684

SEQ ID NO: 65461 - DNA, 648 bp, Photobacterium profundum SS9; identical to SEQ ID NO: 15685
  CDS (1)..(648): transl_table=11

SEQ ID NO: 65462 - protein, 215 aa, Photobacterium profundum SS9; identical to SEQ ID NO: 15686

SEQ ID NO: 65463 - DNA, 549 bp, Photobacterium profundum SS9; identical to SEQ ID NO: 15687
  CDS (1)..(549): transl_table=11

SEQ ID NO: 65464 - protein, 182 aa, Photobacterium profundum SS9; identical to SEQ ID NO: 15688

SEQ ID NO: 65465 - DNA, 564 bp, Photobacterium profundum SS9; identical to SEQ ID NO: 15689
  CDS (1)..(564): transl_table=11

SEQ ID NO: 65466 - protein, 187 aa, Photobacterium profundum SS9; identical to SEQ ID NO: 15690

SEQ ID NO: 65467 - DNA, 561 bp, Haloarcula marismortui ATCC 43049; identical to SEQ ID NO: 15691
  CDS (1)..(561): transl_table=11

SEQ ID NO: 65468 - protein, 186 aa, Haloarcula marismortui ATCC 43049; identical to SEQ ID NO: 15692

SEQ ID NO: 65469 - DNA, 675 bp, Geobacillus kaustophilus HTA426; identical to SEQ ID NO: 15693
  CDS (1)..(675): transl_table=11

SEQ ID NO: 65470 - protein, 224 aa, Geobacillus kaustophilus HTA426; identical to SEQ ID NO: 15694

SEQ ID NO: 65471 - DNA, 558 bp, Geobacillus kaustophilus HTA426; identical to SEQ ID NO: 15695
  CDS (1)..(558): transl_table=11

SEQ ID NO: 65472 - protein, 185 aa, Geobacillus kaustophilus HTA426; identical to SEQ ID NO: 15696

SEQ ID NO: 65473 - DNA, 552 bp, Azoarcus sp. EbN1; identical to SEQ ID NO: 15697
  CDS (1)..(552): transl_table=11

SEQ ID NO: 65474 - protein, 183 aa, Azoarcus sp. EbN1; identical to SEQ ID NO: 15698

SEQ ID NO: 65475 - DNA, 600 bp, Zymomonas mobilis subsp. mobilis ZM4; identical to SEQ ID NO: 15699
  CDS (1)..(600): transl_table=11

SEQ ID NO: 65476 - protein, 199 aa, Zymomonas mobilis subsp. mobilis ZM4; identical to SEQ ID NO: 15700

SEQ ID NO: 65477 - DNA, 693 bp, Dehalococcoides ethenogenes 195; identical to SEQ ID NO: 15701
  CDS (1)..(693): transl_table=11

SEQ ID NO: 65478 - protein, 230 aa, Dehalococcoides ethenogenes 195; identical to SEQ ID NO: 15702

SEQ ID NO: 65479 - DNA, 486 bp, Staphylococcus aureus subsp. aureus COL; identical to SEQ ID NO: 15703
  CDS (1)..(486): transl_table=11

SEQ ID NO: 65480 - protein, 161 aa, Staphylococcus aureus subsp. aureus COL; identical to SEQ ID NO: 15704

SEQ ID NO: 65481 - DNA, 600 bp, Staphylococcus aureus subsp. aureus COL; identical to SEQ ID NO: 15705
  CDS (1)..(600): transl_table=11

SEQ ID NO: 65482 - protein, 199 aa, Staphylococcus aureus subsp. aureus COL; identical to SEQ ID NO: 15706

SEQ ID NO: 65483 - DNA, 615 bp, Lactobacillus acidophilus NCFM; identical to SEQ ID NO: 15707
  CDS (1)..(615): transl_table=11

SEQ ID NO: 65484 - protein, 204 aa, Lactobacillus acidophilus NCFM; identical to SEQ ID NO: 15708

SEQ ID NO: 65485 - DNA, 600 bp, Vibrio fischeri ES114; identical to SEQ ID NO: 15709
  CDS (1)..(600): transl_table=11

SEQ ID NO: 65486 - protein, 199 aa, Vibrio fischeri ES114; identical to SEQ ID NO: 15710

SEQ ID NO: 65487 - DNA, 546 bp, Vibrio fischeri ES114; identical to SEQ ID NO: 15711
  CDS (1)..(546): transl_table=11

SEQ ID NO: 65488 - protein, 181 aa, Vibrio fischeri ES114; identical to SEQ ID NO: 15712

SEQ ID NO: 65489 - DNA, 552 bp, Vibrio fischeri ES114; identical to SEQ ID NO: 15713
  CDS (1)..(552): transl_table=11

SEQ ID NO: 65490 - protein, 183 aa, Vibrio fischeri ES114; identical to SEQ ID NO: 15714

SEQ ID NO: 65491 - DNA, 756 bp, Vibrio fischeri ES114; identical to SEQ ID NO: 15715
  CDS (1)..(756): transl_table=11

SEQ ID NO: 65492 - protein, 251 aa, Vibrio fischeri ES114; identical to SEQ ID NO: 15716

SEQ ID NO: 65493 - DNA, 522 bp, Bacteroides fragilis NCTC 9343; identical to SEQ ID NO: 15717
  CDS (1)..(522): transl_table=11

SEQ ID NO: 65494 - protein, 173 aa, Bacteroides fragilis NCTC 9343; identical to SEQ ID NO: 15718

SEQ ID NO: 65495 - DNA, 600 bp, Bacteroides fragilis NCTC 9343; identical to SEQ ID NO: 15719
  CDS (1)..(600): transl_table=11

SEQ ID NO: 65496 - protein, 199 aa, Bacteroides fragilis NCTC 9343; identical to SEQ ID NO: 15720

SEQ ID NO: 65497 - DNA, 630 bp, Bacteroides fragilis NCTC 9343; identical to SEQ ID NO: 15721
  CDS (1)..(630): transl_table=11

SEQ ID NO: 65498 - protein, 209 aa, Bacteroides fragilis NCTC 9343; identical to SEQ ID NO: 15722

SEQ ID NO: 65499 - DNA, 624 bp, Bacteroides fragilis NCTC 9343; identical to SEQ ID NO: 15723
  CDS (1)..(624): transl_table=11

SEQ ID NO: 65500 - protein, 207 aa, Bacteroides fragilis NCTC 9343; identical to SEQ ID NO: 15724

SEQ ID NO: 65501 - DNA, 552 bp, Bacteroides fragilis NCTC 9343; identical to SEQ ID NO: 15725
  CDS (1)..(552): transl_table=11

SEQ ID NO: 65502 - protein, 183 aa, Bacteroides fragilis NCTC 9343; identical to SEQ ID NO: 15726

SEQ ID NO: 65503 - DNA, 588 bp, Bacteroides fragilis NCTC 9343; identical to SEQ ID NO: 15727
  CDS (1)..(588): transl_table=11

SEQ ID NO: 65504 - protein, 195 aa, Bacteroides fragilis NCTC 9343; identical to SEQ ID NO: 15728

SEQ ID NO: 65505 - DNA, 690 bp, Brucella abortus biovar 1 str. 9-941; identical to SEQ ID NO: 15729
  CDS (1)..(690): transl_table=11

SEQ ID NO: 65506 - protein, 229 aa, Brucella abortus biovar 1 str. 9-941; identical to SEQ ID NO: 15730

SEQ ID NO: 65507 - DNA, 690 bp, Chloroflexus aurantiacus; identical to SEQ ID NO: 15731
  CDS (1)..(690)

SEQ ID NO: 65508 - protein, 229 aa, Chloroflexus aurantiacus; identical to SEQ ID NO: 15732

SEQ ID NO: 65509 - DNA, 564 bp, Chloroflexus aurantiacus; identical to SEQ ID NO: 15733
  CDS (1)..(564)

SEQ ID NO: 65510 - protein, 187 aa, Chloroflexus aurantiacus; identical to SEQ ID NO: 15734

SEQ ID NO: 65511 - DNA, 615 bp, Lactobacillus gasseri; identical to SEQ ID NO: 15735
  CDS (1)..(615)

SEQ ID NO: 65512 - protein, 204 aa, Lactobacillus gasseri; identical to SEQ ID NO: 15736

SEQ ID NO: 65513 - DNA, 606 bp, Magnetospirillum magnetotacticum MS-1; identical to SEQ ID NO: 15737
  CDS (1)..(606)

SEQ ID NO: 65514 - protein, 201 aa, Magnetospirillum magnetotacticum MS-1; identical to SEQ ID NO: 15738

SEQ ID NO: 65515 - DNA, 702 bp, Leuconostoc mesenteroides subsp. mesenteroides ATCC 8293; identical to SEQ ID NO: 15739
  CDS (1)..(702)

SEQ ID NO: 65516 - protein, 233 aa, Leuconostoc mesenteroides subsp. mesenteroides ATCC 8293; identical to SEQ ID NO: 15740

SEQ ID NO: 65517 - DNA, 561 bp, Nostoc punctiforme PCC 73102; identical to SEQ ID NO: 15741
  CDS (1)..(561)

SEQ ID NO: 65518 - protein, 186 aa, Nostoc punctiforme PCC 73102; identical to SEQ ID NO: 15742

SEQ ID NO: 65519 - DNA, 594 bp, Nostoc punctiforme PCC 73102; identical to SEQ ID NO: 15743
  CDS (1)..(594)

SEQ ID NO: 65520 - protein, 197 aa, Nostoc punctiforme PCC 73102; identical to SEQ ID NO: 15744

SEQ ID NO: 65521 - DNA, 702 bp, Nostoc punctiforme PCC 73102; identical to SEQ ID NO: 15745
  CDS (1)..(702)

SEQ ID NO: 65522 - protein, 233 aa, Nostoc punctiforme PCC 73102; identical to SEQ ID NO: 15746

SEQ ID NO: 65523 - DNA, 675 bp, Bifidobacterium longum DJO10A; identical to SEQ ID NO: 15747
  CDS (1)..(675)

SEQ ID NO: 65524 - protein, 224 aa, Bifidobacterium longum DJO10A; identical to SEQ ID NO: 15748

SEQ ID NO: 65525 - DNA, 633 bp, Bifidobacterium longum DJO10A; identical to SEQ ID NO: 15749
  CDS (1)..(633)

SEQ ID NO: 65526 - protein, 210 aa, Bifidobacterium longum DJO10A; identical to SEQ ID NO: 15750

SEQ ID NO: 65527 - DNA, 609 bp, Desulfovibrio desulfuricans G20; identical to SEQ ID NO: 15751
  CDS (1)..(609)

SEQ ID NO: 65528 - protein, 202 aa, Desulfovibrio desulfuricans G20; identical to SEQ ID NO: 15752

SEQ ID NO: 65529 - DNA, 558 bp, Desulfovibrio desulfuricans G20; identical to SEQ ID NO: 15753
  CDS (1)..(558)

SEQ ID NO: 65530 - protein, 185 aa, Desulfovibrio desulfuricans G20; identical to SEQ ID NO: 15754

SEQ ID NO: 65531 - DNA, 576 bp, Anabaena variabilis ATCC 29413; identical to SEQ ID NO: 15755
  CDS (1)..(576)

SEQ ID NO: 65532 - protein, 191 aa, Anabaena variabilis ATCC 29413; identical to SEQ ID NO: 15756

SEQ ID NO: 65533 - DNA, 561 bp, Anabaena variabilis ATCC 29413; identical to SEQ ID NO: 15757
  CDS (1)..(561)

SEQ ID NO: 65534 - protein, 186 aa, Anabaena variabilis ATCC 29413; identical to SEQ ID NO: 15758

SEQ ID NO: 65535 - DNA, 576 bp, Actinobacillus pleuropneumoniae serovar 1 str. 4074; identical to SEQ ID NO: 15759
  CDS (1)..(576)

SEQ ID NO: 65536 - protein, 191 aa, Actinobacillus pleuropneumoniae serovar 1 str. 4074; identical to SEQ ID NO: 15760

SEQ ID NO: 65537 - DNA, 501 bp, Burkholderia cepacia R18194; identical to SEQ ID NO: 15761
  CDS (1)..(501)

SEQ ID NO: 65538 - protein, 166 aa, Burkholderia cepacia R18194; identical to SEQ ID NO: 15762

SEQ ID NO: 65539 - DNA, 609 bp, Burkholderia cepacia R18194; identical to SEQ ID NO: 15763
  CDS (1)..(609)

SEQ ID NO: 65540 - protein, 202 aa, Burkholderia cepacia R18194; identical to SEQ ID NO: 15764

SEQ ID NO: 65541 - DNA, 528 bp, Listeria monocytogenes str. 4b H7858; identical to SEQ ID NO: 15765
  CDS (1)..(528): transl_table=11

SEQ ID NO: 65542 - protein, 175 aa, Listeria monocytogenes str. 4b H7858; identical to SEQ ID NO: 15766

SEQ ID NO: 65543 - DNA, 570 bp, Listeria monocytogenes str. 4b H7858; identical to SEQ ID NO: 15767
  CDS (1)..(570): transl_table=11

SEQ ID NO: 65544 - protein, 189 aa, Listeria monocytogenes str. 4b H7858; identical to SEQ ID NO: 15768

SEQ ID NO: 65545 - DNA, 564 bp, Bacillus cereus G9241; identical to SEQ ID NO: 15769
  CDS (1)..(564): transl_table=11

SEQ ID NO: 65546 - protein, 187 aa, Bacillus cereus G9241; identical to SEQ ID NO: 15770

SEQ ID NO: 65547 - DNA, 558 bp, Bacillus cereus G9241; identical to SEQ ID NO: 15771
  CDS (1)..(558): transl_table=11

SEQ ID NO: 65548 - protein, 185 aa, Bacillus cereus G9241; identical to SEQ ID NO: 15772

SEQ ID NO: 65549 - DNA, 588 bp, Burkholderia fungorum LB400; identical to SEQ ID NO: 15773
  CDS (1)..(588)

SEQ ID NO: 65550 - protein, 195 aa, Burkholderia fungorum LB400; identical to SEQ ID NO: 15774

SEQ ID NO: 65551 - DNA, 555 bp, Thermobifida fusca; identical to SEQ ID NO: 15775
  CDS (1)..(555)

SEQ ID NO: 65552 - protein, 184 aa, Thermobifida fusca; identical to SEQ ID NO: 15776

SEQ ID NO: 65553 - DNA, 513 bp, Cytophaga hutchinsonii; identical to SEQ ID NO: 15777
  CDS (1)..(513)

SEQ ID NO: 65554 - protein, 170 aa, Cytophaga hutchinsonii; identical to SEQ ID NO: 15778

SEQ ID NO: 65555 - DNA, 654 bp, Cytophaga hutchinsonii; identical to SEQ ID NO: 15779
  CDS (1)..(654)

SEQ ID NO: 65556 - protein, 217 aa, Cytophaga hutchinsonii; identical to SEQ ID NO: 15780

SEQ ID NO: 65557 - DNA, 744 bp, Microbulbifer degradans 2-40; identical to SEQ ID NO: 15781
  CDS (1)..(744)

SEQ ID NO: 65558 - protein, 247 aa, Microbulbifer degradans 2-40; identical to SEQ ID NO: 15782

SEQ ID NO: 65559 - DNA, 549 bp, Microbulbifer degradans 2-40; identical to SEQ ID NO: 15783
  CDS (1)..(549)

SEQ ID NO: 65560 - protein, 182 aa, Microbulbifer degradans 2-40; identical to SEQ ID NO: 15784

SEQ ID NO: 65561 - DNA, 417 bp, Oenococcus oeni PSU-1; identical to SEQ ID NO: 15785
  CDS (1)..(417)

SEQ ID NO: 65562 - protein, 138 aa, Oenococcus oeni PSU-1; identical to SEQ ID NO: 15786

SEQ ID NO: 65563 - DNA, 567 bp, Pediococcus pentosaceus ATCC 25745; identical to SEQ ID NO: 15787
  CDS (1)..(567)

SEQ ID NO: 65564 - protein, 188 aa, Pediococcus pentosaceus ATCC 25745; identical to SEQ ID NO: 15788

SEQ ID NO: 65565 - DNA, 555 bp, Pediococcus pentosaceus ATCC 25745; identical to SEQ ID NO: 15789
  CDS (1)..(555)

SEQ ID NO: 65566 - protein, 184 aa, Pediococcus pentosaceus ATCC 25745; identical to SEQ ID NO: 15790

SEQ ID NO: 65567 - DNA, 552 bp, Pediococcus pentosaceus ATCC 25745; identical to SEQ ID NO: 15791
  CDS (1)..(552)

SEQ ID NO: 65568 - protein, 183 aa, Pediococcus pentosaceus ATCC 25745; identical to SEQ ID NO: 15792

SEQ ID NO: 65569 - DNA, 465 bp, Streptococcus suis 89/1591; identical to SEQ ID NO: 15793
  CDS (1)..(465)

SEQ ID NO: 65570 - protein, 154 aa, Streptococcus suis 89/1591; identical to SEQ ID NO: 15794

SEQ ID NO: 65571 - DNA, 606 bp, Desulfovibrio desulfuricans G20; identical to SEQ ID NO: 15795
  CDS (1)..(606)

SEQ ID NO: 65572 - protein, 201 aa, Desulfovibrio desulfuricans G20; identical to SEQ ID NO: 15796

SEQ ID NO: 65573 - DNA, 543 bp, Chloroflexus aurantiacus; identical to SEQ ID NO: 15797
  CDS (1)..(543)

SEQ ID NO: 65574 - protein, 180 aa, Chloroflexus aurantiacus; identical to SEQ ID NO: 15798

SEQ ID NO: 65575 - DNA, 186 bp, Brevibacterium linens BL2; identical to SEQ ID NO: 15799
  CDS (1)..(186)

SEQ ID NO: 65576 - protein, 61 aa, Brevibacterium linens BL2; identical to SEQ ID NO: 15800

SEQ ID NO: 65577 - DNA, 612 bp, Lactococcus lactis subsp. cremoris SK11; identical to SEQ ID NO: 15801
  CDS (1)..(612)

SEQ ID NO: 65578 - protein, 203 aa, Lactococcus lactis subsp. cremoris SK11; identical to SEQ ID NO: 15802

SEQ ID NO: 65579 - DNA, 588 bp, Lactococcus lactis subsp. cremoris SK11; identical to SEQ ID NO: 15803
  CDS (1)..(588)

SEQ ID NO: 65580 - protein, 195 aa, Lactococcus lactis subsp. cremoris SK11; identical to SEQ ID NO: 15804

SEQ ID NO: 65581 - DNA, 597 bp, Lactobacillus casei ATCC 334; identical to SEQ ID NO: 15805
  CDS (1)..(597)

SEQ ID NO: 65582 - protein, 198 aa, Lactobacillus casei ATCC 334; identical to SEQ ID NO: 15806

SEQ ID NO: 65583 - DNA, 705 bp, Lactobacillus casei ATCC 334; identical to SEQ ID NO: 15807
  CDS (1)..(705)

SEQ ID NO: 65584 - protein, 234 aa, Lactobacillus casei ATCC 334; identical to SEQ ID NO: 15808

SEQ ID NO: 65585 - DNA, 591 bp, Lactobacillus delbrueckii subsp. bulgaricus ATCC BAA-365; identical to SEQ ID NO: 15809
  CDS (1)..(591)

SEQ ID NO: 65586 - protein, 196 aa, Lactobacillus delbrueckii subsp. bulgaricus ATCC BAA-365; identical to SEQ ID NO: 15810

SEQ ID NO: 65587 - DNA, 609 bp, Bacillus anthracis str. A2012; identical to SEQ ID NO: 15811
  CDS (1)..(609): Xaa of translated CDS can stand for any naturally occuring amino acid which can be translated from respective CDS-codon

SEQ ID NO: 65588 - protein, 202 aa, Bacillus anthracis str. A2012; identical to SEQ ID NO: 15812
  misc_feature (136)..(136): Xaa can be any naturally occuring amino acid

SEQ ID NO: 65589 - DNA, 534 bp, Anaeromyxobacter dehalogenans 2CP-C; identical to SEQ ID NO: 15813
  CDS (1)..(534): transl_table=11

SEQ ID NO: 65590 - protein, 177 aa, Anaeromyxobacter dehalogenans 2CP-C; identical to SEQ ID NO: 15814

SEQ ID NO: 65591 - DNA, 663 bp, Streptococcus pneumoniae TIGR4; identical to SEQ ID NO: 15815
  CDS (1)..(663)

SEQ ID NO: 65592 - protein, 220 aa, Streptococcus pneumoniae TIGR4; identical to SEQ ID NO: 15816

SEQ ID NO: 65593 - DNA, 558 bp, Burkholderia vietnamiensis G4; identical to SEQ ID NO: 15817
  CDS (1)..(558): transl_table=11

SEQ ID NO: 65594 - protein, 185 aa, Burkholderia vietnamiensis G4; identical to SEQ ID NO: 15818

SEQ ID NO: 65595 - DNA, 576 bp, Crocosphaera watsonii WH 8501; identical to SEQ ID NO: 15819
  CDS (1)..(576): transl_table=11

SEQ ID NO: 65596 - protein, 191 aa, Crocosphaera watsonii WH 8501; identical to SEQ ID NO: 15820

SEQ ID NO: 65597 - DNA, 555 bp, Chlorobium phaeobacteroides DSM 266; identical to SEQ ID NO: 15821
  CDS (1)..(555): transl_table=11

SEQ ID NO: 65598 - protein, 184 aa, Chlorobium phaeobacteroides DSM 266; identical to SEQ ID NO: 15822

SEQ ID NO: 65599 - DNA, 618 bp, Chlorobium phaeobacteroides BS1; identical to SEQ ID NO: 15823
  CDS (1)..(618): transl_table=11

SEQ ID NO: 65600 - protein, 205 aa, Chlorobium phaeobacteroides BS1; identical to SEQ ID NO: 15824

SEQ ID NO: 65601 - DNA, 576 bp, Exiguobacterium sp. 255-15; identical to SEQ ID NO: 15825
  CDS (1)..(576): transl_table=11

SEQ ID NO: 65602 - protein, 191 aa, Exiguobacterium sp. 255-15; identical to SEQ ID NO: 15826

SEQ ID NO: 65603 - DNA, 552 bp, Exiguobacterium sp. 255-15; identical to SEQ ID NO: 15827
  CDS (1)..(552): transl_table=11

SEQ ID NO: 65604 - protein, 183 aa, Exiguobacterium sp. 255-15; identical to SEQ ID NO: 15828

SEQ ID NO: 65605 - DNA, 702 bp, Exiguobacterium sp. 255-15; identical to SEQ ID NO: 15829
  CDS (1)..(702): transl_table=11

SEQ ID NO: 65606 - protein, 233 aa, Exiguobacterium sp. 255-15; identical to SEQ ID NO: 15830

SEQ ID NO: 65607 - DNA, 642 bp, Methanosarcina barkeri str. fusaro; identical to SEQ ID NO: 15831
  CDS (1)..(642): transl_table=11

SEQ ID NO: 65608 - protein, 213 aa, Methanosarcina barkeri str. fusaro; identical to SEQ ID NO: 15832

SEQ ID NO: 65609 - DNA, 600 bp, Methanosarcina barkeri str. fusaro; identical to SEQ ID NO: 15833
  CDS (1)..(600): transl_table=11

SEQ ID NO: 65610 - protein, 199 aa, Methanosarcina barkeri str. fusaro; identical to SEQ ID NO: 15834

SEQ ID NO: 65611 - DNA, 549 bp, Methanosarcina barkeri str. fusaro; identical to SEQ ID NO: 15835
  CDS (1)..(549): transl_table=11

SEQ ID NO: 65612 - protein, 182 aa, Methanosarcina barkeri str. fusaro; identical to SEQ ID NO: 15836

SEQ ID NO: 65613 - DNA, 609 bp, Methanosarcina barkeri str. fusaro; identical to SEQ ID NO: 15837
  CDS (1)..(609): transl_table=11

SEQ ID NO: 65614 - protein, 202 aa, Methanosarcina barkeri str. fusaro; identical to SEQ ID NO: 15838

SEQ ID NO: 65615 - DNA, 531 bp, Desulfuromonas acetoxidans DSM 684; identical to SEQ ID NO: 15839
  CDS (1)..(531): transl_table=11

SEQ ID NO: 65616 - protein, 176 aa, Desulfuromonas acetoxidans DSM 684; identical to SEQ ID NO: 15840

SEQ ID NO: 65617 - DNA, 555 bp, Jannaschia sp. CCS1; identical to SEQ ID NO: 15841
  CDS (1)..(555): transl_table=11

SEQ ID NO: 65618 - protein, 184 aa, Jannaschia sp. CCS1; identical to SEQ ID NO: 15842

SEQ ID NO: 65619 - DNA, 630 bp, Frankia sp. EAN1pec; identical to SEQ ID NO: 15843
  CDS (1)..(630): transl_table=11

SEQ ID NO: 65620 - protein, 209 aa, Frankia sp. EAN1pec; identical to SEQ ID NO: 15844

SEQ ID NO: 65621 - DNA, 555 bp, Shewanella baltica OS155; identical to SEQ ID NO: 15845
  CDS (1)..(555): transl_table=11

SEQ ID NO: 65622 - protein, 184 aa, Shewanella baltica OS155; identical to SEQ ID NO: 15846

SEQ ID NO: 65623 - DNA, 585 bp, Shewanella baltica OS155; identical to SEQ ID NO: 15847
  CDS (1)..(585): transl_table=11

SEQ ID NO: 65624 - protein, 194 aa, Shewanella baltica OS155; identical to SEQ ID NO: 15848

SEQ ID NO: 65625 - DNA, 726 bp, Ralstonia metallidurans CH34; identical to SEQ ID NO: 15849
  CDS (1)..(726): transl_table=11

SEQ ID NO: 65626 - protein, 241 aa, Ralstonia metallidurans CH34; identical to SEQ ID NO: 15850

SEQ ID NO: 65627 - DNA, 549 bp, Paracoccus denitrificans PD1222; identical to SEQ ID NO: 15851
  CDS (1)..(549): transl_table=11

SEQ ID NO: 65628 - protein, 182 aa, Paracoccus denitrificans PD1222; identical to SEQ ID NO: 15852

SEQ ID NO: 65629 - DNA, 615 bp, Shewanella frigidimarina NCIMB 400; identical to SEQ ID NO: 15853
  CDS (1)..(615): transl_table=11

SEQ ID NO: 65630 - protein, 204 aa, Shewanella frigidimarina NCIMB 400; identical to SEQ ID NO: 15854

SEQ ID NO: 65631 - DNA, 777 bp, Escherichia coli; identical to SEQ ID NO: 15855
  CDS (1)..(777): transl_table=11

SEQ ID NO: 65632 - protein, 258 aa, Escherichia coli; identical to SEQ ID NO: 15856

SEQ ID NO: 65633 - DNA, 651 bp, Pseudomonas fluorescens; identical to SEQ ID NO: 15857
  CDS (1)..(651): transl_table=11

SEQ ID NO: 65634 - protein, 216 aa, Pseudomonas fluorescens; identical to SEQ ID NO: 15858

SEQ ID NO: 65635 - DNA, 579 bp, Staphylococcus haemolyticus; identical to SEQ ID NO: 15859
  CDS (1)..(579): transl_table=11

SEQ ID NO: 65636 - protein, 192 aa, Staphylococcus haemolyticus; identical to SEQ ID NO: 15860

SEQ ID NO: 65637 - DNA, 648 bp, Aspergillus fumigatus Af293; identical to SEQ ID NO: 15861
  CDS (1)..(648)

SEQ ID NO: 65638 - protein, 215 aa, Aspergillus fumigatus Af293; identical to SEQ ID NO: 15862

SEQ ID NO: 65639 - DNA, 747 bp, Aspergillus fumigatus Af293; identical to SEQ ID NO: 15863
  CDS (1)..(747)

SEQ ID NO: 65640 - protein, 248 aa, Aspergillus fumigatus Af293; identical to SEQ ID NO: 15864

SEQ ID NO: 65641 - DNA, 687 bp, Aspergillus fumigatus Af293; identical to SEQ ID NO: 15865
  CDS (1)..(687)

SEQ ID NO: 65642 - protein, 228 aa, Aspergillus fumigatus Af293; identical to SEQ ID NO: 15866

SEQ ID NO: 65643 - DNA, 603 bp, Lactobacillus crispatus; identical to SEQ ID NO: 15867
  CDS (1)..(603): transl_table=11

SEQ ID NO: 65644 - protein, 200 aa, Lactobacillus crispatus; identical to SEQ ID NO: 15868

SEQ ID NO: 65645 - DNA, 642 bp, Cryptococcus neoformans var; identical to SEQ ID NO: 15869
  CDS (1)..(642)

SEQ ID NO: 65646 - protein, 213 aa, Cryptococcus neoformans var; identical to SEQ ID NO: 15870

SEQ ID NO: 65647 - DNA, 513 bp, Klebsiella pneumoniae; identical to SEQ ID NO: 15871
  CDS (1)..(513): transl_table=11

SEQ ID NO: 65648 - protein, 170 aa, Klebsiella pneumoniae; identical to SEQ ID NO: 15872

SEQ ID NO: 65649 - DNA, 555 bp, Vibrio cholerae non; identical to SEQ ID NO: 15873
  CDS (1)..(555): transl_table=11

SEQ ID NO: 65650 - protein, 184 aa, Vibrio cholerae non; identical to SEQ ID NO: 15874

SEQ ID NO: 65651 - DNA, 645 bp, Rhizobium etli; identical to SEQ ID NO: 15875
  CDS (1)..(645): transl_table=11

SEQ ID NO: 65652 - protein, 214 aa, Rhizobium etli; identical to SEQ ID NO: 15876

SEQ ID NO: 65653 - DNA, 558 bp, Bacillus stearothermophilus; identical to SEQ ID NO: 15877
  CDS (1)..(558): transl_table=11

SEQ ID NO: 65654 - protein, 185 aa, Bacillus stearothermophilus; identical to SEQ ID NO: 15878

SEQ ID NO: 65655 - DNA, 594 bp, Rhizobium leguminosarum bv; identical to SEQ ID NO: 15879
  CDS (1)..(594): transl_table=11

SEQ ID NO: 65656 - protein, 197 aa, Rhizobium leguminosarum bv; identical to SEQ ID NO: 15880

SEQ ID NO: 65657 - DNA, 573 bp, Dictyostelium discoideum; identical to SEQ ID NO: 15881
  CDS (1)..(573)

SEQ ID NO: 65658 - protein, 190 aa, Dictyostelium discoideum; identical to SEQ ID NO: 15882

SEQ ID NO: 65659 - DNA, 657 bp, Physcomitrella patens; identical to SEQ ID NO: 15883
  CDS (1)..(657)

SEQ ID NO: 65660 - protein, 218 aa, Physcomitrella patens; identical to SEQ ID NO: 15884

SEQ ID NO: 65661 - DNA, 636 bp, Aeromonas hydrophila; identical to SEQ ID NO: 15885
  CDS (1)..(636): transl_table=11

SEQ ID NO: 65662 - protein, 211 aa, Aeromonas hydrophila; identical to SEQ ID NO: 15886

SEQ ID NO: 65663 - DNA, 600 bp, Aeromonas hydrophila; identical to SEQ ID NO: 15887
  CDS (1)..(600): transl_table=11

SEQ ID NO: 65664 - protein, 199 aa, Aeromonas hydrophila; identical to SEQ ID NO: 15888

SEQ ID NO: 65665 - DNA, 678 bp, Corynebacterium glutamicum; identical to SEQ ID NO: 15889
  CDS (1)..(678): transl_table=11

SEQ ID NO: 65666 - protein, 225 aa, Corynebacterium glutamicum; identical to SEQ ID NO: 15890

SEQ ID NO: 65667 - DNA, 624 bp, Lactococcus lactis; identical to SEQ ID NO: 15891
  CDS (1)..(624): transl_table=11

SEQ ID NO: 65668 - protein, 207 aa, Lactococcus lactis; identical to SEQ ID NO: 15892

SEQ ID NO: 65669 - DNA, 621 bp, Candida albicans; identical to SEQ ID NO: 15893
  CDS (1)..(621): transl_table=12

SEQ ID NO: 65670 - protein, 206 aa, Candida albicans; identical to SEQ ID NO: 15894

SEQ ID NO: 65671 - DNA, 519 bp, Staphylococcus aureus; identical to SEQ ID NO: 15895
  CDS (1)..(519): transl_table=11

SEQ ID NO: 65672 - protein, 172 aa, Staphylococcus aureus; identical to SEQ ID NO: 15896

SEQ ID NO: 65673 - DNA, 555 bp, Bacillus subtilis; identical to SEQ ID NO: 15897
  CDS (1)..(555): transl_table=11

SEQ ID NO: 65674 - protein, 184 aa, Bacillus subtilis; identical to SEQ ID NO: 15898

SEQ ID NO: 65675 - DNA, 552 bp, Escherichia coli; identical to SEQ ID NO: 15433
  CDS (1)..(552)

SEQ ID NO: 65676 - protein, 183 aa, Escherichia coli; identical to SEQ ID NO: 15434

SEQ ID NO: 65677 - DNA, 573 bp, Rhizobium leguminosarum bv; identical to SEQ ID NO: 15901
  CDS (1)..(573): transl_table=11

SEQ ID NO: 65678 - protein, 190 aa, Rhizobium leguminosarum bv; identical to SEQ ID NO: 15902

SEQ ID NO: 65679 - DNA, 552 bp, Rhizobium meliloti; identical to SEQ ID NO: 15903
  CDS (1)..(552): transl_table=11

SEQ ID NO: 65680 - protein, 183 aa, Rhizobium meliloti; identical to SEQ ID NO: 15904

SEQ ID NO: 65681 - DNA, 624 bp, Lactococcus lactis subsp; identical to SEQ ID NO: 15905
  CDS (1)..(624): transl_table=11

SEQ ID NO: 65682 - protein, 207 aa, Lactococcus lactis subsp; identical to SEQ ID NO: 15906

SEQ ID NO: 65683 - DNA, 645 bp, Methanococcus jannaschii; identical to SEQ ID NO: 15907
  CDS (1)..(645): transl_table=11

SEQ ID NO: 65684 - protein, 214 aa, Methanococcus jannaschii; identical to SEQ ID NO: 15908

SEQ ID NO: 65685 - DNA, 624 bp, Schizosaccharomyces pombe; identical to SEQ ID NO: 15909
  CDS (1)..(624)

SEQ ID NO: 65686 - protein, 207 aa, Schizosaccharomyces pombe; identical to SEQ ID NO: 15910

SEQ ID NO: 65687 - DNA, 591 bp, Saccharomyces cerevisiae; identical to SEQ ID NO: 15911
  CDS (1)..(591)

SEQ ID NO: 65688 - protein, 196 aa, Saccharomyces cerevisiae; identical to SEQ ID NO: 15912

SEQ ID NO: 65689 - DNA, 25 bp, Artificial sequence
  Primer sequence
atgaacatgccaatgaccgaaagaa

SEQ ID NO: 65690 - DNA, 28 bp, Artificial sequence
  Primer sequence
ttaaactgacgattcaactttataatct

SEQ ID NO: 65691 - protein, 204 aa, Artificial sequence; identical to SEQ ID NO: 15915
  Consensus
  Variant (2)..(4): Xaa in position 2 to 4 is any amino acid
  Variant (5)..(9): Xaa in position 5 to 9 is any or no amino acid
  Variant (11)..(26): Xaa in position 11 to 26 is any or no amino acid
  Variant (28)..(28): Xaa in position 28 is any amino acid
  Variant (31)..(41): Xaa in position 31 to 41 is any amino acid
  Variant (42)..(92): Xaa in position 42 to 92 is any or no amino acid
  Variant (94)..(94): Xaa in position 94 is any or no amino acid
  Variant (97)..(97): Xaa in position 97 is any amino acid
  Variant (98)..(101): Xaa in position 98 to 101 is any or no amino acid
  Variant (103)..(106): Xaa in position 103 to 106 is any amino acid
  Variant (108)..(109): Xaa in position 108 to 109 is any amino acid
  Variant (110)..(112): Xaa in position 110 to 112 is any or no amino acid
  Variant (114)..(119): Xaa in position 114 to 119 is any amino acid
  Variant (120)..(152): Xaa in position 120 to 152 is any or no amino acid
  Variant (154)..(154): Xaa in position 154 is any amino acid
  Variant (156)..(159): Xaa in position 156 to 159 is any amino acid
  Variant (163)..(166): Xaa in position 163 to 166 is any or no amino acid
  Variant (168)..(169): Xaa in position 168 to 169 is any or no amino acid
  Variant (172)..(172): Xaa in position 172 is any or no amino acid
  Variant (175)..(177): Xaa in position 175 to 177 is any or no amino acid
  Variant (188)..(188): Xaa in position 188 is any amino acid
  Variant (191)..(193): Xaa in position 191 to 193 is any amino acid
  Variant (195)..(196): Xaa in position 195 to 196 is any amino acid
  Variant (198)..(198): Xaa in position 198 is any amino acid
  Variant (200)..(200): Xaa in position 200 is any amino acid

SEQ ID NO: 65692 - protein, 12 aa, Artificial sequence
  Consensus
  Variant (2)..(2): Xaa in position 2 is any or no amino acid
  Variant (4)..(5): Xaa in position 4 to 5 is any amino acid
  Variant (6)..(6): Xaa in position 6 is Ala, Cys, Thr or Val
  Variant (7)..(7): Xaa in position 7 is any amino acid
  Variant (8)..(8): Xaa in position 8 is Phe, Ile, Leu, Met or Val
  Variant (9)..(11): Xaa in position 9 to 11 is any amino acid
  Variant (12)..(12): Xaa in position 12 is Ala, Cys, Asp, Gly, Asn, Ser, Thr or Val
IXGXXXXXXXXX

SEQ ID NO: 65693 - protein, 43 aa, Artificial sequence; identical to SEQ ID NO: 15917
  Consensus
  Variant (2)..(2): Xaa in position 2 is any amino acid
  Variant (3)..(4): Xaa in position 3 to 4 is any or no amino acid
  Variant (6)..(10): Xaa in position 6 to 10 is any amino acid
  Variant (11)..(12): Xaa in position 11 to 12 is any or no amino acid
  Variant (14)..(14): Xaa in position 14 is Ala, Ile or Val
  Variant (15)..(15): Xaa in position 15 is any amino acid
  Variant (16)..(16): Xaa in position 16 is Ile, Leu or Val
  Variant (17)..(17): Xaa in position 17 is Asp, Gly or Thr
  Variant (18)..(19): Xaa in position 18 to 19 is any amino acid
  Variant (20)..(20): Xaa in position 20 is Ala, Cys, Gly, Ser, Thr or Val
  Variant (21)..(21): Xaa in position 21 is any amino acid
  Variant (22)..(22): Xaa in position 22 is Ala, Ile, Leu or Val
  Variant (23)..(23): Xaa in position 23 is Ala, Gly or Ser
  Variant (24)..(25): Xaa in position 24 to 25 is any amino acid
  Variant (26)..(26): Xaa in position 26 is Ala, Cys, Ser or Thr
  Variant (27)..(27): Xaa in position 27 is any amino acid
  Variant (28)..(28): Xaa in position 28 is Ala, Ile or Val
  Variant (29)..(31): Xaa in position 29 to 31 is any amino acid
  Variant (32)..(32): Xaa in position 32 is Phe, Ile, Leu, Met or Val
  Variant (33)..(39): Xaa in position 33 to 39 is any amino acid
  Variant (41)..(41): Xaa in position 41 is any amino acid
  Variant (43)..(43): Xaa in position 43 is Ala, Cys or Gly

SEQ ID NO: 65694 - DNA, 1215 bp, Escherichia coli K12
  CDS (1)..(1215): transl_table=11
atgccggaggggcgcaccacacccgccggcaattcgcaccattatggtgcgcttgcacacattcaatgccggagagcagccgtgaatgacgctatccctcgcccgcaggcgaaaacccgtaaggcgctgacgccgctattagaaatccgcaacctgaccaaatcctacgatggtcaacatgcggtggatgatgtcagcctgaccatctacaaaggtgaaatcttcgcgctgctgggcgcatccggctgtggcaagtccacgctgctgcgtatgctggcaggtttcgaacaaccttctgccggacagataatgcttgatggcgtcgatttgtcacaggttccgccttacctgcgccccatcaatatgatgtttcagtcttacgcgctgtttccgcatatgaccgtggaacagaacatcgcttttggcctgaaacaggacaaactaccgaaagcggaaattgccagccgggtcaatgagatgctcggcctggtgcatatgcaggagttcgccaaacgcaaaccgcatcagctttccggtggtcagcgacaacgtgtggccctggcccgaagccttgcgaagcgcccgaaactattactgctcgatgagccgatgggcgcgctggataaaaagctgcgtgacaggatgcagcttgaagtggtggatattctggagcgcgtcggtgtgacttgtgtgatggtcacccacgatcaggaagaggcgatgaccatggcggggcgcatcgccattatgaatcgtgggaaatttgtccagattggcgaaccggaagagatctacgagcatccgactacccgctatagcgccgaatttattggctcggtaaacgtctttgaaggcgtactcaaagagcgtcaggaagatggcctggtgcttgattcgccggggctggtgcatccactgaaagtcgacgcggatgcctcggtggtcgataacgtgccggtacatgtggcgctgcgcccggaaaaaatcatgctttgcgaagagccgcccgccaatggttgtaacttcgcggtgggggaggtgatacacattgcctatctcggcgatctttcggtgtatcacgttcgtctgaaaagtgggcagatgattagcgcccagctacaaaacgcccatcgtcatcgtaaagggttaccgacctggggcgacgaagtgcgtttgtgctgggaagtggacagctgtgtggtgctgacggtttaa

SEQ ID NO: 65695 - protein, 404 aa, Escherichia coli K12
MPEGRTTPAGNSHHYGALAHIQCRRAAVNDAIPRPQAKTRKALTPLLEIRNLTKSYDGQHAVDDVSLTIYKGEIFALLGASGCGKSTLLRMLAGFEQPSAGQIMLDGVDLSQVPPYLRPINMMFQSYALFPHMTVEQNIAFGLKQDKLPKAEIASRVNEMLGLVHMQEFAKRKPHQLSGGQRQRVALARSLAKRPKLLLLDEPMGALDKKLRDRMQLEVVDILERVGVTCVMVTHDQEEAMTMAGRIAIMNRGKFVQIGEPEEIYEHPTTRYSAEFIGSVNVFEGVLKERQEDGLVLDSPGLVHPLKVDADASVVDNVPVHVALRPEKIMLCEEPPANGCNFAVGEVIHIAYLGDLSVYHVRLKSGQMISAQLQNAHRHRKGLPTWGDEVRLCWEVDSCVVLTV

SEQ ID NO: 65696 - DNA, 1080 bp, Agrobacterium tumefaciens
  CDS (1)..(1080): transl_table=11
atgatcgatcagccgcttcccgccgtatcgtttcagggtgtcacgcggcgcttcggccctgtcaccgccgttgacaacgtcagcctcgatatctcgcagggtgagttcttcgccctgctgggttcgagcggctctggcaaaacaacacttctcacgttgcttgccgggttcgacaatccgaacgaaggccaggtgttgatgtcgggtgtgtccgtttcggatgtcccacctcacaagcggcagataggtgtggtgttccagaattatgctctcttcccgcatctgacagctgccgagaatgtggcctatcccttgaggatgcgtggagtggctcgtcacgagcgcgaagaacgcgtcaaagccgcactcgcgctggtcaatctttccgatcggctcggtgcttatccgatccagctttcgggtggtcagcaacagcgggtagcgctcgcacgagcgcttgtcttcagtcccgccatcttgctgatggacgaaccgctgggcgcgctcgaccggcgcctccgcgaccagatgcaacaggaattgaaacgcatccagcatgagttgggcatcacggttatctatgtgactcatgatcagtccgaagcaatggctatggcggaccgcatcgggatcatgtctgccgggcgtctccttcaggtcgccgatcccgaggcaatctatgcagcgccatccagtcacttcgttgcacgcttcatcggagagtgttcgatcctgcgggtcagtggcaccaatgaaggcaggggttacgaaatcgcaggagcgcgccagtcactgccctcccccgccaatgggccattcgatatcgtcgttagaccggaagacgtcgcgatccggtccccatcgacagcatccatcgactctttcggtgtttccgccacgatccgggaggtgacttacctcggcgccggatggcgcgtggcgttgcaactatccgacgggcagtcgttgctcgccaatgtcatgcgaggagacgatctagctggaagcctcgctcccggctcgtcggtgaacgcaacttggcagccggcatctgccgctgttcttccgactgaaggatga

SEQ ID NO: 65697 - protein, 359 aa, Agrobacterium tumefaciens
MIDQPLPAVSFQGVTRRFGPVTAVDNVSLDISQGEFFALLGSSGSGKTTLLTLLAGFDNPNEGQVLMSGVSVSDVPPHKRQIGVVFQNYALFPHLTAAENVAYPLRMRGVARHEREERVKAALALVNLSDRLGAYPIQLSGGQQQRVALARALVFSPAILLMDEPLGALDRRLRDQMQQELKRIQHELGITVIYVTHDQSEAMAMADRIGIMSAGRLLQVADPEAIYAAPSSHFVARFIGECSILRVSGTNEGRGYEIAGARQSLPSPANGPFDIVVRPEDVAIRSPSTASIDSFGVSATIREVTYLGAGWRVALQLSDGQSLLANVMRGDDLAGSLAPGSSVNATWQPASAAVLPTEG

SEQ ID NO: 65698 - DNA, 1038 bp, Archaeoglobus fulgidus DSM 4304
  CDS (1)..(1038): transl_table=11
gtggttggctacgctgtcgaacttgagggcatttcaaagagctacgacagcactacggtgctcgaagacataaatctcaggattcagcagggtgagttcttctccctgcttggcccaagtggttccgggaaaaccacaatcatacggataattgcgggacttacctttcccgatcagggttttgtgaggattaacggggaggattgcacctctttaccgccctacaggcgcaacgtcggtatggtgtttcagaatctcgccctcttcccccatcttaacgtttttgaaaacgtcgcctacgggttgaggctgagaaagattcccgaaggtgagataaaggatagggtttaccgctacctcgaactcgtcaacctcgaccctgagatttacgcaaaaaggaaggtagagcagctatctggagggcagcagcagagggttgcaattgcgagggctctggttaccgagccttccatcctgctcctcgacgagccgctcggcgctctggatttaaagataaggcagcacatgatttccgaacttaaaagaatccagaagacgctgggaacgaccttcatttacgtcacccacgaccagagcgaggctttgctgctttccgacaggttggccgtcctcaatgaaggcagaatccaccagattgggacgccaagggaaatctacgagaggccaaaaacgaggttcgtcgcctcattcataggcgaaaccaactttctggaggcaagggtcgtgaacggagaggtcatcaccgaaatcggaaaggtgagggttttcggccttgatggggcgagggagttctgcatatccatccgccctgaaaagcttaaaatcaaccagcaggctgagaacacctttgaggctgtcgttgaggaaattggctacctcggaagctttttgatgctgaagctgagggctggcgatgttgtagtgaaggccttcgccccgccgcaggaaaatgttagggaaggggaaagggtgattgttggttgggatagtagggatgcggtaatcttggaggcatga

SEQ ID NO: 65699 - protein, 345 aa, Archaeoglobus fulgidus DSM 4304
MVGYAVELEGISKSYDSTTVLEDINLRIQQGEFFSLLGPSGSGKTTIIRIIAGLTFPDQGFVRINGEDCTSLPPYRRNVGMVFQNLALFPHLNVFENVAYGLRLRKIPEGEIKDRVYRYLELVNLDPEIYAKRKVEQLSGGQQQRVAIARALVTEPSILLLDEPLGALDLKIRQHMISELKRIQKTLGTTFIYVTHDQSEALLLSDRLAVLNEGRIHQIGTPREIYERPKTRFVASFIGETNFLEARVVNGEVITEIGKVRVFGLDGAREFCISIRPEKLKINQQAENTFEAVVEEIGYLGSFLMLKLRAGDVVVKAFAPPQENVREGERVIVGWDSRDAVILEA

SEQ ID NO: 65700 - DNA, 1080 bp, Mesorhizobium loti MAFF303099
  CDS (1)..(1080): transl_table=11
atggaacagaatcctgtccttgagatccgcaacctctcacgcacctttgctcatggtgctgtgagggcagtcgaccatatcgatctggacgtgctaccgggcgagatcatgtcaatcctcggtccctccggctgcggcaagacgacgatcatgcgcatcattgcgggattggattcgccgacttccggagaggttcgcattctcggcaaagacgttgcgggaaagccgccgcacaagcgcaatgtcggtttggtcttccagtcgttggcaatctttcctcacatgagcgtcaaacagaatgtcgcctttggcctgcgcatgaagggtctcgccagcaacctgatcgaaaccaaagtcgccaaagcgttggaactcgtacagctttcgccggaaagatttgcaggacgacggccaagcgagctgagcggagggcagcttcagcgggtagctttggcacggacattggtgactgaaccggcgctggtccttttcgacgagccaatggcggcactcgaccggcgccttcgcgattacatggcggtggaactcagggctatccaaaagcagctcggcattgcggcagtctatgttacgcacgaccaggaaacggcttctatgatgtcggaccgcgtcatcatcatgagtgccggcaagatcctgcaagccgggaccccggaggaaatctacgaggcaccgaattctaggtttgtttccgattttctcggcgacaccaacacccttcgcatcgcgcgcgtgctccatcaggcggacgggacatcgctggtacagaccgatgccgggctggcaattcgtgtcgcaaactgcagcgacatagctgaaggagcgtttgtgatttttcgacccgagcagacaatcgttcattccgccgaccccggcggcgcttttgagggcagggtggtgtcgtcgcaatttcgcagcggtctccaccgctggcagatcgcacttcccggtggcaacacgctcattgcgcagtcgaccgaaaacagacttgcctcatccgccggcgagaccgcttgggttacgattgactccggcaaagcgagaatcgttagccaatga

SEQ ID NO: 65701 - protein, 359 aa, Mesorhizobium loti MAFF303099
MEQNPVLEIRNLSRTFAHGAVRAVDHIDLDVLPGEIMSILGPSGCGKTTIMRIIAGLDSPTSGEVRILGKDVAGKPPHKRNVGLVFQSLAIFPHMSVKQNVAFGLRMKGLASNLIETKVAKALELVQLSPERFAGRRPSELSGGQLQRVALARTLVTEPALVLFDEPMAALDRRLRDYMAVELRAIQKQLGIAAVYVTHDQETASMMSDRVIIMSAGKILQAGTPEEIYEAPNSRFVSDFLGDTNTLRIARVLHQADGTSLVQTDAGLAIRVANCSDIAEGAFVIFRPEQTIVHSADPGGAFEGRVVSSQFRSGLHRWQIALPGGNTLIAQSTENRLASSAGETAWVTIDSGKARIVSQ

SEQ ID NO: 65702 - DNA, 1065 bp, Mesorhizobium loti MAFF303099
  CDS (1)..(1065): transl_table=11
atggccggcgtgcaggtagcgaacgtctcgcgcagctttggcgcgcacaaggcgctggacgatgtctccatcgatttcgccgatggcggcttctatgcgctgctcggaccgtcgggcagcggcaagaccactttgctcaggcagatcgcgggcttcgattttccggacagtggtcgcatttccatcggcggcgagagtgtcgagcgtgtgccggtcgagaaaaggcgcatcggcatggtgttccagaactatgcgctgtttcccaatatgagcgtcgccgacaatgtcgccttcggcctttcggtgcgcggcgaggccaaggcggtgattgcagcggaagtgcagcgcgcgctcgacctggtgcaattgggcaagctcggcggccggcgtccgcaccagctctccggcggccagcggcagcgcgtggcgctggcgcgcgccatcgtcaccaagccgcgcgtgctgttgctcgacgagccgctcggcgcgctcgacaaggcgctgcgcgtcgacatgcagatcgagttgaagcgcatccagcgcgagatcggcatcacgaccatcttcgtcacccatgaccaggaagaagcgctgacgatgagcgaccgcatcggcatcctgcgcgacggcaggcttgtgcaggaagggccgccggaggaaatctacgaccggccgaaaagcgaattcgccgccaccttcctcggcgacgccaacatctttcgcggcgatacgaccggcaacggcatccgcctgccggacggcacggcgattgccgcaggtgcgggcgcgacgcttgccgccggcgccaaggcgagctgcgccgtacggcccgagcgcattcggattgccaccgatgccggagcttcggatggcgatgccaacacgctgaagggtcaggtttccaagcgcatcttcgccggcaacaacagcacctatttcgtcgagcgtgacggccagacgctgaaggtcatcgtgcagaacaccggcgccgacaggctggcggaaggacaggatgtcgtgctgcgctggtcgccggagagcacggtgttgattgctgcgagctga

SEQ ID NO: 65703 - protein, 354 aa, Mesorhizobium loti MAFF303099
MAGVQVANVSRSFGAHKALDDVSIDFADGGFYALLGPSGSGKTTLLRQIAGFDFPDSGRISIGGESVERVPVEKRRIGMVFQNYALFPNMSVADNVAFGLSVRGEAKAVIAAEVQRALDLVQLGKLGGRRPHQLSGGQRQRVALARAIVTKPRVLLLDEPLGALDKALRVDMQIELKRIQREIGITTIFVTHDQEEALTMSDRIGILRDGRLVQEGPPEEIYDRPKSEFAATFLGDANIFRGDTTGNGIRLPDGTAIAAGAGATLAAGAKASCAVRPERIRIATDAGASDGDANTLKGQVSKRIFAGNNSTYFVERDGQTLKVIVQNTGADRLAEGQDVVLRWSPESTVLIAAS

SEQ ID NO: 65704 - DNA, 1095 bp, Mesorhizobium loti MAFF303099
  CDS (1)..(1095): transl_table=11
gtgccggacaaaccggatcggaatgcgattgaagtagtaaacgtcagtaaaattttcggatcaggtgaggggcaggtcgctgccctcgacaaggtctcggtatccattcgcgagaacgagttcttcacgctgctgggaccgtccggctgcggcaagaccacccttctgcggctgatcgccggcttcgactttccgaccgccggtgagatcctgctctacggtcaggacatcgcgccgctgccgcccttcaagcggccggtcaacaccgtcttccagtcctacgcactgttcccgcacatgacggtggccgacaatatcggcttcggcctggagatgctcggcaagcccaaggccgagatcaaggcgcgcgtcgccgagatgctcaagctggtcaagatggaggcgctggccggtcgccgcacggcccagatttccggtggccagcagcagcgcgtggcgctggccagggcgctggcgccgcagccgaaagtgctgttgctcgacgaaccgctctcggcgctcgactacaagctgcgcaaagagatgcagatcgagttgaagcggctgcagcacgagaccggtatcaccttcatcttcgtcacccatgaccaggaagaagcgctgaccatgtcggaccgcatcgcggtgatgtcgtcgggcaagatcctgcaggtcggctcgccctgggacatctacgacaagccggccgagcgcttcgtcgccgacttcatcggcgagaccaacttcctcaccgccgccatatcgggcaccggcaacggcaagacgcgcgcgacgctcaaatccggaacgaccatcgaggcgaccgttgccgaagggttccagccgaaggacaacgccaccgtggtggtgcggcccgagcatgccaagctgaccaaggacaagggcgacctgtcgggcacggtcgaaaacatcgtctattttggcaccgacacgcatatccatgtccagctcgacagcggcgaggccttcaccgtgcgccagcagaacacgcgcagcgcaggctgcggtttcgatcgcggcgacaaggtcggcatcctgatcggcaacgacgccgcgcaagtgctgagggactga

SEQ ID NO: 65705 - protein, 364 aa, Mesorhizobium loti MAFF303099
MPDKPDRNAIEVVNVSKIFGSGEGQVAALDKVSVSIRENEFFTLLGPSGCGKTTLLRLIAGFDFPTAGEILLYGQDIAPLPPFKRPVNTVFQSYALFPHMTVADNIGFGLEMLGKPKAEIKARVAEMLKLVKMEALAGRRTAQISGGQQQRVALARALAPQPKVLLLDEPLSALDYKLRKEMQIELKRLQHETGITFIFVTHDQEEALTMSDRIAVMSSGKILQVGSPWDIYDKPAERFVADFIGETNFLTAAISGTGNGKTRATLKSGTTIEATVAEGFQPKDNATVVVRPEHAKLTKDKGDLSGTVENIVYFGTDTHIHVQLDSGEAFTVRQQNTRSAGCGFDRGDKVGILIGNDAAQVLRD

SEQ ID NO: 65706 - DNA, 1116 bp, Mesorhizobium loti MAFF303099
  CDS (1)..(1116): transl_table=11
atgaagcctgcacaggagagcaagggcgcggcgatcgatctcgaatcgatcagcaaggcctatggcggcttcaaggcgctggacggcgtgtcgctgcgcatcgagcccggcgagttcatgacgctgctcggcccgagcggttccggcaagaccacgacgctgaatgtcgtggccggcttcaccgacgtgaccagcggcaagctgctggtcggcggcaagaacgtcgtcggcctgcccgcgcacaagcgcaacatcggcgtcgtcttccagcactacgcgctattcccgcatatgagcgtcggccgcaatgtcgcctatcccctgacgctgcgcggcatcgaccaggctgaacgaaaggcgcgcgtgacaagggcgctcgacatggtcaagatgggcgatttcgcgcatcgctatcccagcgaactgtcgggcggccagcagcagcgtgtggcgctggcccgcgccatcgtcttcgatccgccgctgttgctgatggacgagccgctcggcgcgctcgacaagaagctgcgcgaatggctgcagctcgagatcaagcgcatccaccgcgaacttggcaccaccttcgtctatgtgacgcacgaccaggaagaggcgctggtcctgtcggaccgcatcgccgtgttcaatcgcggacggatcgagcaggtcggcaccggtcgcgaactctatgatgaaccgacgacgctgttcgtcggccgcttcatcggcgattccacggtgctgcgcggagaggcgcgaagcgacggcgtgagcacagcattgcgcattgccggcgagacggtgacggcgccgcgccggatcgcgggcgaagccagcccggtcatgttgctgcgccccgaaaagctcgccatccgccggcccggccatgacacggcaagcaccaccaaccggctgccggggacgatcgcggaagccatctatctcggctcgggatcgaaatacgaagtcaggctcgccgacggctcgacggcgatcgtgcgctcgccgctgaccggcgacagctttggccttggcgacaaggtggagctctgcttcgacggtgccgacgccaagcttctggccgacgacagctcagccgacgcgacgctaacctga

SEQ ID NO: 65707 - protein, 371 aa, Mesorhizobium loti MAFF303099
MKPAQESKGAAIDLESISKAYGGFKALDGVSLRIEPGEFMTLLGPSGSGKTTTLNVVAGFTDVTSGKLLVGGKNVVGLPAHKRNIGVVFQHYALFPHMSVGRNVAYPLTLRGIDQAERKARVTRALDMVKMGDFAHRYPSELSGGQQQRVALARAIVFDPPLLLMDEPLGALDKKLREWLQLEIKRIHRELGTTFVYVTHDQEEALVLSDRIAVFNRGRIEQVGTGRELYDEPTTLFVGRFIGDSTVLRGEARSDGVSTALRIAGETVTAPRRIAGEASPVMLLRPEKLAIRRPGHDTASTTNRLPGTIAEAIYLGSGSKYEVRLADGSTAIVRSPLTGDSFGLGDKVELCFDGADAKLLADDSSADATLT

SEQ ID NO: 65708 - DNA, 1065 bp, Mesorhizobium loti MAFF303099
  CDS (1)..(1065): transl_table=11
atggccgatccgtttctctccatccagcacgtgcgaaaatccttcggtgccaccacggtggtggaggatttcaatctcgacgtcgagccgggtgaattcgtctcgttcctcgggccgtccggctgcggcaaaaccaccgtgctgcgcatggtggccggcttcgaggagccgacagccggcaagatcgtcgtagctggcaaggacatcacccggctgaagcccaaccagcgtaatgtcggcatggtgttccaggcctacgcgctgttcccgaaccttaccgtggcgcaaaatataggcttcggcctgaaggtcgccggcatgcccagggcggacatcgatgcccgtgtcgccgagatgctcggcatcatcaagctgccgcagatggcggaccgctatccctaccaactctcgggcggccagcagcagcgcatcgcgctggcgcgcgcgatcgcgccgaagccgaagctgcttttgctcgacgagccgctgtcggcgctggacgccaaggtgcgcgtgtcgctgcgtgaggaaatccgctcgatccagaagaagctcggcatcaccaccatcttcgtcacgcacgatcaggaagaggcgctgtcgatctccgaccgcatcgccgtcatgtatggcggcaaggccgagcaggtcggcacgccgttcgagatctacaaccggccggcgaccaaattcgtcgccaattttgtcggcacgctcaacgtgctcgaaggcaaggtcaccgatgccgcggccggcacggttcaggtcaacacgcaggaagtctcgctcaagggcaagctcaacggctcgaagtccggcgacacgctgtcgctggccctgcggccggaagcgatctcgcttggccgccagcctggccgtgactccagcctgaccggagagatatccgaagtgcatttcctcggctcggtgatccgggtccgcgtcggcatcggcggcaatacggtgtcgctcgacacgttcaacaactcggccaccccgccgcccgccgtcggcgagaaggccgagatttcgttctcttcgggcgacatgctggtgctgcactag

SEQ ID NO: 65709 - protein, 354 aa, Mesorhizobium loti MAFF303099
MADPFLSIQHVRKSFGATTVVEDFNLDVEPGEFVSFLGPSGCGKTTVLRMVAGFEEPTAGKIVVAGKDITRLKPNQRNVGMVFQAYALFPNLTVAQNIGFGLKVAGMPRADIDARVAEMLGIIKLPQMADRYPYQLSGGQQQRIALARAIAPKPKLLLLDEPLSALDAKVRVSLREEIRSIQKKLGITTIFVTHDQEEALSISDRIAVMYGGKAEQVGTPFEIYNRPATKFVANFVGTLNVLEGKVTDAAAGTVQVNTQEVSLKGKLNGSKSGDTLSLALRPEAISLGRQPGRDSSLTGEISEVHFLGSVIRVRVGIGGNTVSLDTFNNSATPPPAVGEKAEISFSSGDMLVLH

SEQ ID NO: 65710 - DNA, 1074 bp, Mesorhizobium loti MAFF303099
  CDS (1)..(1074): transl_table=11
atgatcgagatccgcaacgtcacccgcagctatggatcgttcaaggcactggacgatgcctccctgaccataagggagggcgaattcttctcgctgctcggcccgtccggctgcggcaagaccacgcttttgcgcatgatcgccggcttcgacaacccgaccagcggatcgatcgcggtcggcggccagccgatggaaggcattccggccaaccgccggccgaccaacatggtgttccagagctacgcgatcttcccgcacctcaatgtcgagcagaacgtcgcctatgggctgaagcggctgaagctgcagggcggcgaggagaaacgccgcgtcgaggaggcgctggcgcaggtgtcgctgacggggctcggcaagcggctggcgacagaattgtccggcggccaacgccagcgcgtggcgctcgcccgcgcgctggtcatgcggcccaaggtgctgctgctcgacgaaccgctgtcggcgctcgacaagaagctgcgcgagcagatgcaggtcgagctccggcgcctgcagcaggccgtcggcatcaccttcgtgctggtcactcacgaccagtatgaggcgctcgccatgtccgaccgcatcgcggtgatgttcggcggcaggatcgctcaggtcgcctcgcccaaggaaatctaccagcgcccggtcaaccgccaggtcgccgacttcctcggcggcatgaactttgtgaaagccgagatcgtcgaggagaacggcgcgtcgctgatcgtcgacacgctcggcttcggccgcgtcaagaccgacaagccgaaggccttcgtgcgcaatggcggcggcgctacactcggcataagacccgagcgtctgcgcgtgctgtgggacaatgcgacggcaaaattcgaggtcgccggcaaggtggtcgaacgccattatttcggcgagatcacccatctgatcgtcgagatacccggcttggaaaaaccgctctcggtgaccgagaccaacgatttcggcgccgacgacattccggtcggcaccacgatccgacttgcctacgatcccgaggcgctggtggcgatgggggattga

SEQ ID NO: 65711 - protein, 357 aa, Mesorhizobium loti MAFF303099
MIEIRNVTRSYGSFKALDDASLTIREGEFFSLLGPSGCGKTTLLRMIAGFDNPTSGSIAVGGQPMEGIPANRRPTNMVFQSYAIFPHLNVEQNVAYGLKRLKLQGGEEKRRVEEALAQVSLTGLGKRLATELSGGQRQRVALARALVMRPKVLLLDEPLSALDKKLREQMQVELRRLQQAVGITFVLVTHDQYEALAMSDRIAVMFGGRIAQVASPKEIYQRPVNRQVADFLGGMNFVKAEIVEENGASLIVDTLGFGRVKTDKPKAFVRNGGGATLGIRPERLRVLWDNATAKFEVAGKVVERHYFGEITHLIVEIPGLEKPLSVTETNDFGADDIPVGTTIRLAYDPEALVAMGD

SEQ ID NO: 65712 - DNA, 1074 bp, Mesorhizobium loti MAFF303099
  CDS (1)..(1074): transl_table=11
atgagcgaaccgcgcacgctgttggccatcgatcatgtttcgaagaatttcggccgggtcactgccgtcgatggcatctcgcttgatatccgcgagaacgaattcttcgcgctgctcggcccttccggctgcggcaagaccacgctgttgcgcatgctggccggtttcgagacgccgagcgacggccgcattctgctcgacggcaaggacatcgcccgaaccccgcccaacaagcggccggtcaacctgatgttccagtcctacgcgctattcccgcatatgagcgtgcgcgccaatgtctcctatgggctggagatggagcgcttgccggttaaggatatccgcacccgcgtcgacgccatcctggcgaccaccgaactcgtccccttcgccgaccgcaagccggagcaattgtcgggcggccagaagcagcgcgtcgcgctcgcccgcgcgctggtcaaacggccaaggctgctgctgctcgacgagccgctcggcgcgctcgacaaaaagttgcgcggcgccatgcaactggaattgaaacgcctgcagcacgaggtcggcatcactttcgtcatcgtcacccacgaccaggaggaatcgctcgtcatggccgaccgcatggcggtgctcaaggatggcaaactattgcaatgcgacacgccgcacgcggtctacgagcatcccgccgaccgcttcgtcgccgacttcatcggcgtgatgaatttcatcccgggcaagacctcagccgatggcgtgttggccgcgaacggcgcgcgtattgccggcaaacttccggcggcgctttcgcccggcgcgccagcagtggcttcggtgcggccggaacgtatccggctgtttcccgaggctcagaccgccaaccgcacgaccggcacggtcgaggcgctggcctatcacggcctcgatctgcagctgcatgtccgcacgccgctgtcgccaaaaccgttcctggtgcgcgtcaccgcagatgcagccgaccgccggccggtgtcgtcggccgaccgggtcgaactcggctgggatgccgccgatgtcagaattttcgcagaatag

SEQ ID NO: 65713 - protein, 357 aa, Mesorhizobium loti MAFF303099
MSEPRTLLAIDHVSKNFGRVTAVDGISLDIRENEFFALLGPSGCGKTTLLRMLAGFETPSDGRILLDGKDIARTPPNKRPVNLMFQSYALFPHMSVRANVSYGLEMERLPVKDIRTRVDAILATTELVPFADRKPEQLSGGQKQRVALARALVKRPRLLLLDEPLGALDKKLRGAMQLELKRLQHEVGITFVIVTHDQEESLVMADRMAVLKDGKLLQCDTPHAVYEHPADRFVADFIGVMNFIPGKTSADGVLAANGARIAGKLPAALSPGAPAVASVRPERIRLFPEAQTANRTTGTVEALAYHGLDLQLHVRTPLSPKPFLVRVTADAADRRPVSSADRVELGWDAADVRIFAE

SEQ ID NO: 65714 - DNA, 999 bp, Mesorhizobium loti MAFF303099
  CDS (1)..(999): transl_table=11
atgacatcagccgtctccttccagaaagtctcgcgccatttcggcagcgtgcgcgcggtcgacgcggtcgacctcgacatcgcgccgggcgagttcttcgccatgcttgggccttccgggtccggcaagacgacatgcctgcgcctcatcgccggtttcgagcagccgacttcgggttcgctctcgatcttcggcgaacgcgccgagggcgtgccgccctatcgccgcaacgtcaacactgtcttccaggactatgcgctgttcccgcatctcaatgtgcttgataacgtcgcttatgggctgatggtcaagggcgtcggcaaggcagcgcggcacaaggcggccgaggaagcactgtcgctcgtcaggttgcccggctacggcgcccgccgccccggccagctttccggcggccagcgccagcgtgtcgcgctcgcccgcgctctggtcaaccagcccaaggtgctgctgctcgacgagccgctcggcgcgctcgacctgaagctgcgcgagaacatgcaggaggagctgaaatcgctgcagaaggcgctcggcatcaccttcgtcttcgtcacccatgaccagggcgaggcgctgtcgatggccgaccgcgtcgccgtcttcaacgacggcaggatcatgcagatcggcacgccggaggatatctatcagcggccgagaacccgcttcgtcgccgatttcgtcggctcctccaacgtgctgccgccggatttcgtccagcgctattccggccagcatcgctggggcagtctgcgccctgaatccattcgcgtcagccgcgcggcaaccggcgaaggcgtcgccgcccgcctcgtctcgaccaactatctcggcgccaccactaggctggcgctcgatgccgacggattgaagctgcacgccgtggtcccggctggcacggtgctgcctgccgagggcgaagcggtggtgctcaccttcaaccgcgagcacctgcatctgatggatgagccggcatga

SEQ ID NO: 65715 - protein, 332 aa, Mesorhizobium loti MAFF303099
MTSAVSFQKVSRHFGSVRAVDAVDLDIAPGEFFAMLGPSGSGKTTCLRLIAGFEQPTSGSLSIFGERAEGVPPYRRNVNTVFQDYALFPHLNVLDNVAYGLMVKGVGKAARHKAAEEALSLVRLPGYGARRPGQLSGGQRQRVALARALVNQPKVLLLDEPLGALDLKLRENMQEELKSLQKALGITFVFVTHDQGEALSMADRVAVFNDGRIMQIGTPEDIYQRPRTRFVADFVGSSNVLPPDFVQRYSGQHRWGSLRPESIRVSRAATGEGVAARLVSTNYLGATTRLALDADGLKLHAVVPAGTVLPAEGEAVVLTFNREHLHLMDEPA

SEQ ID NO: 65716 - DNA, 1050 bp, Mesorhizobium loti MAFF303099
  CDS (1)..(1050): transl_table=11
ttggagcagaactcaattcccgctcagattgaatttcgaaacgttaccaagatgtacgggcaggtcgccgccgtacaggacctgtcactgacagttcgtcgcggcgagttcttaaccattctcggtccgagcggttcaggcaagaccacggcgctcatgctgcttgccgggttcgtagcggccagtaagggcgacattttgatcgccggaaattctgtggccgcagtcccatcctatcggcgcgaccaaggcattgtgttccaaagctatgcgctgtttccgcacctcacggtacgtcggaatctggaattcccgctcgaaatgcggggcgtcaagacggccgacagagcaaagcgggtcgatcgcatcctcgagcgtgtgcatctcaaggacttcggccgtcgtatgccgtcgcaactgagcggcggccaacagcagcgcgtggcgcttgcccgtgcgctcatcgctgatccgccgttcctcctgctcgacgagcctctcggcgccctcgaccgcaaccttcgcgagcagatgcagatcgaaatgaagaaccttcacaaagagttcaacatcaccaccatatgcgtgacgcacgaccaggaggaggcgcttacactgtcagatcgcatcgttgtcatgcgtgccgggcggattgaacagaccgattcgccggaagccctttacgatcggccagcatcccgctttgtagcgaattttctcggtgaggccaacattctcgaaaatctcgattgtgatgtggaatccgatgtggcgcagccgtccggcaccgtgcccatgatcaggccagagcgtatccgcgcctccgcgccggcggcgccgaagagggccgatgcgagccagtgccagtccgttaccggcactgtcgacgatatgatctatgccggaccgttgcggaaataccatgtgcgcgtcggaagcaaagtgctcgtcgcgcgcgaacatgccgcctcggggcagcagatcttccaacccggcgacacagtgcggcttgattggctgcggtccgacgttcgcttcgtagcggcgtga

SEQ ID NO: 65717 - protein, 349 aa, Mesorhizobium loti MAFF303099
MEQNSIPAQIEFRNVTKMYGQVAAVQDLSLTVRRGEFLTILGPSGSGKTTALMLLAGFVAASKGDILIAGNSVAAVPSYRRDQGIVFQSYALFPHLTVRRNLEFPLEMRGVKTADRAKRVDRILERVHLKDFGRRMPSQLSGGQQQRVALARALIADPPFLLLDEPLGALDRNLREQMQIEMKNLHKEFNITTICVTHDQEEALTLSDRIVVMRAGRIEQTDSPEALYDRPASRFVANFLGEANILENLDCDVESDVAQPSGTVPMIRPERIRASAPAAPKRADASQCQSVTGTVDDMIYAGPLRKYHVRVGSKVLVAREHAASGQQIFQPGDTVRLDWLRSDVRFVAA

SEQ ID NO: 65718 - DNA, 1164 bp, Mesorhizobium loti MAFF303099
  CDS (1)..(1164): transl_table=11
atgattaagggtgaatcgctgcaattgcggcgcgtctgtaagcaatatggcgactaccacgcgatcaaagacgtttcggttcaaatcgaggctggagagttcgtgtcgttcttggggccgagcggctccggcaagacgacgacgctgatgatgattgctggtttcgaaacgccaacttcaggcgaaataattgttggcgaccgagcaatcaccagcctcccggtgcataggcgcaatatcggcgtcgtttttcagaactacgcactgttcccgcatttgtcggttttcgagaacgttgcatttgccctgaagatgagggccgtcgcgcgcgacgagatcagccgaggcgttgcggaggcgctaaacctcgtgcagctctctggctatgaaacccgaatgccacacgaactttcgggaggacagcagcagcgggtggcgctggcgcgctcgctagtatttcgtcctggagtaattctcatggacgaacccctcggcgctctagacaaacaacttcgcgagcacatgcaggttgaactcaagcgtcttcagcgctctttgggtacaactgtaatatttgttactcatgaccagagcgaagctttgacaatgtcagatcgcattgttgtaatgaacgaaggtcgaatagctcaggttgggacgccggaagagatctacgaggctcccagcagtcgcttcgtagctagcttcataggggaatcaaacttccttcaagcaacgatcattgaggcgtctaaaaatgggcccttactggatgtacatgggctacgcgtacgcgccacatgggcccaagggaagcgacctaaaggctctgctggcactctgatggtgcggccagaaaagataatccccctgggctcgtccggcaaagcggacaatgagtttgagggagtagtccaagaggcaatctactggggaaatatcatcaaatatcgcgttcacctccgtgaagcgaagtctgtctctctgaccgtagcgctcccctatcattcatcctcgcctaagtttcaactaaacgaaacaattcgagttggctgggatgctcgagattcccgccttctcgtcgatgaaagcgaacgtcaagctggaaatgcgccagaacccgaactgctcatcggtcaggggattgagcgggtggtttcatga

SEQ ID NO: 65719 - protein, 387 aa, Mesorhizobium loti MAFF303099
MIKGESLQLRRVCKQYGDYHAIKDVSVQIEAGEFVSFLGPSGSGKTTTLMMIAGFETPTSGEIIVGDRAITSLPVHRRNIGVVFQNYALFPHLSVFENVAFALKMRAVARDEISRGVAEALNLVQLSGYETRMPHELSGGQQQRVALARSLVFRPGVILMDEPLGALDKQLREHMQVELKRLQRSLGTTVIFVTHDQSEALTMSDRIVVMNEGRIAQVGTPEEIYEAPSSRFVASFIGESNFLQATIIEASKNGPLLDVHGLRVRATWAQGKRPKGSAGTLMVRPEKIIPLGSSGKADNEFEGVVQEAIYWGNIIKYRVHLREAKSVSLTVALPYHSSSPKFQLNETIRVGWDARDSRLLVDESERQAGNAPEPELLIGQGIERVVS

SEQ ID NO: 65720 - DNA, 1143 bp, Mesorhizobium loti MAFF303099
  CDS (1)..(1143): transl_table=11
atgaaatcgcttggcagcatccgtagggatttcgcgccatggaacgacccgaacgccaagccatacatccagttcgacaacgtcaccaagaagttcggtgacttcaccgccgtcaacaatctgtcgctgaccatcttcgagcgcgagttcttcgccttgctcggcgcctcgggttgcggcaagtcgacgctgctgcggatgcttgccggcttcgaggaaccgacggccggccgtatcctgctcgatggccaggatctgcgtggcatcccgccctatcgccggccggtcaacatgatgttccagtcctatgcgctgttcccgcatatgacggtggagaacaacatcgccttcggcctcaagcaggaaggcatgcctaagcccgatatcgaaaagcgcgtcgccgagatgctgaagctggtcaagttggagcagttcgccaagcgcaagccgcaccagctctccggtggccagcgccagcgcgtcgctctcgcccgctcggtcgccaagcggccgaaagtgctgctgctcgacgagccgctcggcgcgctcgacaaaaagctgcgcgaggaaacccagttcgaactgatggatttgcagcaggagctcggtctcaccttcgtcgtcgtcacccacgaccaggaagaagcgatgaccatggccgatcgcatcgccatcatggacaagggcgaggtcatgcaggtggcgacgccggcggaagtctatgaagccccggcctcgcgcttcgtcgcccatttcgtcggcaatgtgaacatgttcgagggcaaggtctccgagcggtcggccaacaccacccgcatcaccggagcgagcggagcccagatcgtggtcgagaatggtggtgccgcggccgcggccaatgccgatatcgtcttcgccatcaggccggagaagatcaaggtgtcgtcgaagaagccggcagatgccgtcaacgcgctggaaggcgaggtctatgacgtcgcctatctcggcgacatgaccgtctaccacatcaggctcgacgatgggcagatcgtgcgggcaagcgccttgaacgcggcgcgcgtgaccgaggatccactgacctggaacgaccgcgcctgggtgtccttccggcctgatgccggcgtcgtgctggcgcggtag

SEQ ID NO: 65721 - protein, 380 aa, Mesorhizobium loti MAFF303099
MKSLGSIRRDFAPWNDPNAKPYIQFDNVTKKFGDFTAVNNLSLTIFEREFFALLGASGCGKSTLLRMLAGFEEPTAGRILLDGQDLRGIPPYRRPVNMMFQSYALFPHMTVENNIAFGLKQEGMPKPDIEKRVAEMLKLVKLEQFAKRKPHQLSGGQRQRVALARSVAKRPKVLLLDEPLGALDKKLREETQFELMDLQQELGLTFVVVTHDQEEAMTMADRIAIMDKGEVMQVATPAEVYEAPASRFVAHFVGNVNMFEGKVSERSANTTRITGASGAQIVVENGGAAAAANADIVFAIRPEKIKVSSKKPADAVNALEGEVYDVAYLGDMTVYHIRLDDGQIVRASALNAARVTEDPLTWNDRAWVSFRPDAGVVLAR

SEQ ID NO: 65722 - DNA, 1134 bp, Mesorhizobium loti MAFF303099
  CDS (1)..(1134): transl_table=11
gtgattcattttggggacactatgaaagatgaatctacgccgggcgtagccatccgcttgaaccaggttaccaagacctacggttcgggaaacgccgtcgtcaccgcggtcaaaagcacgacgctggacatcttcaacaatgagtttttcacattgcttgggccatcgggctgcggaaaaaccactctattgcgcctgataggcggtttcgaatatccgacggccggcaccatccttctcggtggcgaggacattgcatcggtccctccgttccaacggcccatcaacaccgtcttccagaactatgctcttttcccgcacatgacggttgcgcagaacatcggctttgggctgcggatgctcaaacggccccgccacgaaatcgctgcccgtgtcgatgagatgttgaaactcgtgcgactggagaatctgtccgatcggcgaacaagtcagatatcgggcggccaacagcagcgggtcgcgctggcgcgcgcgctcgcatccgagccgaaggtcttgcttctcgacgagtcactttcagcgctggactacaaactccgcaaggaaatgcagatggagctcaagtcactccaggctgcgacggggatcactttcattttcgtgacgcatgaccaggaggaggctttgacgatgtccgatcgcgtcgctgtgctgtcttcaggcgagatcatgcaagtcggaaccccgcacgaagtctacatcaagcctgcaaatcacttcgtcgcgaacttcgtcggtgagacgaatttcctgcacgggcgggggctcaactcggatgaccgcggggctgtgatcgatgttcgaggggtcggcgccgtcgctatcccgacgaaggacagggttgcgcccggccaactggtgaacatcgtcgtgcggcccgagcatttgcgaattctaccgttggcccaggagccggccggccaacttaccggttctgtgaaagcggtaagcttctgcggtgccgaaacgcagtacacagtcgaattgagccgaggcgccgctgttgtcacggtccgtaagtataatacgccggaggaaaatctccccatcgtgatcggcgacgaggtctcggtgaatttcacaccgaactcagcccagatcctgcccggttga

SEQ ID NO: 65723 - protein, 377 aa, Mesorhizobium loti MAFF303099
MIHFGDTMKDESTPGVAIRLNQVTKTYGSGNAVVTAVKSTTLDIFNNEFFTLLGPSGCGKTTLLRLIGGFEYPTAGTILLGGEDIASVPPFQRPINTVFQNYALFPHMTVAQNIGFGLRMLKRPRHEIAARVDEMLKLVRLENLSDRRTSQISGGQQQRVALARALASEPKVLLLDESLSALDYKLRKEMQMELKSLQAATGITFIFVTHDQEEALTMSDRVAVLSSGEIMQVGTPHEVYIKPANHFVANFVGETNFLHGRGLNSDDRGAVIDVRGVGAVAIPTKDRVAPGQLVNIVVRPEHLRILPLAQEPAGQLTGSVKAVSFCGAETQYTVELSRGAAVVTVRKYNTPEENLPIVIGDEVSVNFTPNSAQILPG

SEQ ID NO: 65724 - DNA, 1086 bp, Mesorhizobium loti MAFF303099
  CDS (1)..(1086): transl_table=11
atggcgcctgatccactggtccggttgcaggcggtctccaaggtttttcccggcggcatcgtcgggctcgatgccgtcgatctcgacattgtcagcggcgagttcatcacgctgctcggaccgtcgggctgcggcaagaccaccagcctgcgcgtcatcgcgggcttcgaaagcccgtcgagcggcaaggtcttgctcgacggccgcgacatcacggcgctccggcctttcgaccggccggtcaatacggtgttccaggattacgcgctgttcccgcatatggacgtcgccgaaaatgtcggcttcggcctgtcgctacgaaaactgtcgggcgccgagcaggcaaagcgtgtcggtgaagccctcgacatggtcggtctcgccgacaagcttcgcgcccgtgtcccagaactctcgggcggccagcgccagcgcgtggcgctcgctcgcgccatcgtctgcgagccgcgcgtgctcttgctcgacgagccgctgtcggcgctcgatgcgcatctgcgcgaacagatgcaggtcgagttgaagcggctgcaatcgcggctcggcaccaccttcgtcatggtcacccacgaccagaccgaggcgctgtcgatctccgatcgcatcgtcgtcatgaacaagggccgcatcgagcagatcgcgccgccggcgacgctctatgaccggcctgcgacgaagttcgtggcgagcttcatcggcaccatgaacctgctgcagtcgcgctttgtcggccgcgatggcgatcgtttgcgtttcaccgccggcaccttgccgctggaggctacctccgaaaccggccagtcacccggcgaaggcgaggtgcgcaccatcggcgtgcgtccggaggatttgctggcagccaccgaggcgaccgaaggaaccgcgccggcgcgggtaaacagcatagtcttccacggccgtaccttgcggctgcatgctgaactggggcagggattgccggtggtgatcgatgcgccgcgccaggccgaggggtttcaattcagcattggcgacgtagcgcatgtcagcctgcgccgtggcgccaactgccccatgctgccgagctag

SEQ ID NO: 65725 - protein, 361 aa, Mesorhizobium loti MAFF303099
MAPDPLVRLQAVSKVFPGGIVGLDAVDLDIVSGEFITLLGPSGCGKTTSLRVIAGFESPSSGKVLLDGRDITALRPFDRPVNTVFQDYALFPHMDVAENVGFGLSLRKLSGAEQAKRVGEALDMVGLADKLRARVPELSGGQRQRVALARAIVCEPRVLLLDEPLSALDAHLREQMQVELKRLQSRLGTTFVMVTHDQTEALSISDRIVVMNKGRIEQIAPPATLYDRPATKFVASFIGTMNLLQSRFVGRDGDRLRFTAGTLPLEATSETGQSPGEGEVRTIGVRPEDLLAATEATEGTAPARVNSIVFHGRTLRLHAELGQGLPVVIDAPRQAEGFQFSIGDVAHVSLRRGANCPMLPS

SEQ ID NO: 65726 - DNA, 993 bp, Pyrococcus horikoshii OT3
  CDS (1)..(993): transl_table=11
atggtgagcattgaacttagggatataatcaagaggtttggggagttcgagttaaaggttagcttaagcgttaaagatggtgaactactcacccttttaggcccgagcggatgtggtaagacaacaaccctaaggataatagctgggcttgagaagccggataaaggtagggtgtactttgatggtagggatattacggatcttcccccttacgagaggaacatcggattagtcttccaggattatgccctcttcccccatatgacagtattcaaaaacgtagcctttggcttggaagttagacgggtacccaggatggaaatagaaaagagggttagggaagttctagacttagttgggctgagaggatttgaaaatagactacctgaggaactgagtggagggcaacagcagagggttgccctggcgagggcccttgtaatagagcccgatgtactgctcctcgatgagccccttagtaatctcgatgcgaaggtcagggaaaagcttaggggggaaattaagaggatagtgaaggagctcggcataacgacaatttacgttacccacgatcaggaagaggccatggtgctaagcgataggatagcggttatgaactttggaaggatagagcaggttggtgaaccttacgatctttactataacccgaaaaacgagttcgtcgcgaatttcctggggataagtaatatagtggaacttgaagctaaggaaggaagagcatgcttgggtgatctttgctttgaagttggtagggaggggaaggggaagatattctttaggcctgagaacgtagcggttggagaagggattgaggccgaggttataggttatgagctccttccagggagggtaaggctgaggttatcaatcgaggggagggagataatagctgaggaacttttgagtaggattggaaagaaaattccaaaaaaggttagaattagagttagagaattcaagatacttccttag

SEQ ID NO: 65727 - protein, 330 aa, Pyrococcus horikoshii OT3
MVSIELRDIIKRFGEFELKVSLSVKDGELLTLLGPSGCGKTTTLRIIAGLEKPDKGRVYFDGRDITDLPPYERNIGLVFQDYALFPHMTVFKNVAFGLEVRRVPRMEIEKRVREVLDLVGLRGFENRLPEELSGGQQQRVALARALVIEPDVLLLDEPLSNLDAKVREKLRGEIKRIVKELGITTIYVTHDQEEAMVLSDRIAVMNFGRIEQVGEPYDLYYNPKNEFVANFLGISNIVELEAKEGRACLGDLCFEVGREGKGKIFFRPENVAVGEGIEAEVIGYELLPGRVRLRLSIEGREIIAEELLSRIGKKIPKKVRIRVREFKILP

SEQ ID NO: 65728 - DNA, 1077 bp, Aeropyrum pernix K1
  CDS (1)..(1077): transl_table=11
gtggccgggatacggctcgagagcgttacgaaaaggttcggtaacactgttgcccttgatagagtgagcctgaatataagcgacggggagatcttcaccctcctaggccccagcggctgcggaaagacgactaccctaagggttatagcgggcttcgagacgcccgacgaggggagggtctacatagggtccagggatgttacgatgctgaagccttatgagaggaacacagccatggttttccaaaactacgctctctggccccatatgagggtgttcgacaatatagcgtacggcctcaagctcaggaagctccctaggagtgagattgttaggcgtgttaggtgggctgcggagctcttggagattgaccatcttttggatcgttacccccaccagctgagcggggggcagcagcagagggttgcagtggccagggccatagtgacggagcccgaggtcctcctcatggacgaacccctaagcaacctagacgcccacctgaggctgaaaatgcgtgaagaaatagttaggcttcagaagaggctcggggtcaccatagtatacgtaacccacgaccaggaggaggcccttagcataagccacagagtcgcagttatgaatagggggagggttgagcaggtcggcactcccatggaggtgtacgagaaaccggctacatacttcgttgcgacattcataggcaggtccaccgtgctggatggcagggtgtctgaggtcctcggcagcggaatggtcagggttgccttggaggggggattgtcaatagtgggtacagacatggaggggggtctcaggcagggtgagagggtgaaggtcgtgataaggcctgagagggtgaaggtcggccacgagtacaacggggagaacgtgttcgagggcaaagtctccctagccatgtttctcggctggaggacacagctcaaggtagaggttggcgggcaagagatcacaatctactcagacccgcgtagagcacccctccccggccagccggtgaggttctacatagaccccgaagaggccaaggtctacaggcaggctggcagcgcctag

SEQ ID NO: 65729 - protein, 358 aa, Aeropyrum pernix K1
MAGIRLESVTKRFGNTVALDRVSLNISDGEIFTLLGPSGCGKTTTLRVIAGFETPDEGRVYIGSRDVTMLKPYERNTAMVFQNYALWPHMRVFDNIAYGLKLRKLPRSEIVRRVRWAAELLEIDHLLDRYPHQLSGGQQQRVAVARAIVTEPEVLLMDEPLSNLDAHLRLKMREEIVRLQKRLGVTIVYVTHDQEEALSISHRVAVMNRGRVEQVGTPMEVYEKPATYFVATFIGRSTVLDGRVSEVLGSGMVRVALEGGLSIVGTDMEGGLRQGERVKVVIRPERVKVGHEYNGENVFEGKVSLAMFLGWRTQLKVEVGGQEITIYSDPRRAPLPGQPVRFYIDPEEAKVYRQAGSA

SEQ ID NO: 65730 - DNA, 1044 bp, Borrelia burgdorferi B31
  CDS (1)..(1044): transl_table=11
ttggataattgtatcctagagattaaaaatctaagtcattattatgataacaatggaaacaaaactttagataacataaatttaaaaattaaaaaaaatgagtttatcacactactaggcccatccggatgtggaaaaacaacattgataaaaatattgggtggttttttaagccaaaaaaatggagaaatttatttcttttctaaagaaatatctaaaaccagtccaaacaaaagagaaattaatactgtatttcaaaattatgcacttttcccacatatgaatgtttttgacaatatttcatttggacttagaatgaaaaaaacgccaaaagatataatcaaagaaaaagtaaaaacatcgctttcgctgataggaatgccaaaatacgcatacagaaatattaacgaactatcgggggggcaaaagcaaagagttgcaatagcaagagcaatggtaatggaacctaagcttttactcctagatgaaccactttccgcgcttgatttgaaaatgcgacaagagatgcaaaaagaattaaaaaaaatacagcgtcagcttggaatcacattcatatatgttactcacgatcaagaagaggcattgacaatgagtgacagaatcgttgtaatgaatgaaggaataattctgcaaataggaacacctgaggaaatttacaatgagcctaaaacaaagtttgtagccgattttattggagaaagcaatatttttgatggaacatataaaaaagagctggttgtaagtttgcttggtcatgaatttgaatgccttgacaaaggatttgaagctgaagaagcagttgaccttgtaatacgcccagaagatgtaaaactacttccaaaaggaaaaggacatttaagcggaactataacatcagcaatttttcaaggagttcattacgaaatgactctagaaatccaaaaaacaaattggatagttcaaagcacaagacttacaaaagttggagaagaagttgatatatttttagaacctgatgatattcatgttatgcataaggaataa

SEQ ID NO: 65731 - protein, 347 aa, Borrelia burgdorferi B31
MDNCILEIKNLSHYYDNNGNKTLDNINLKIKKNEFITLLGPSGCGKTTLIKILGGFLSQKNGEIYFFSKEISKTSPNKREINTVFQNYALFPHMNVFDNISFGLRMKKTPKDIIKEKVKTSLSLIGMPKYAYRNINELSGGQKQRVAIARAMVMEPKLLLLDEPLSALDLKMRQEMQKELKKIQRQLGITFIYVTHDQEEALTMSDRIVVMNEGIILQIGTPEEIYNEPKTKFVADFIGESNIFDGTYKKELVVSLLGHEFECLDKGFEAEEAVDLVIRPEDVKLLPKGKGHLSGTITSAIFQGVHYEMTLEIQKTNWIVQSTRLTKVGEEVDIFLEPDDIHVMHKE

SEQ ID NO: 65732 - DNA, 1140 bp, Treponema pallidum subsp. pallidum str. Nichols
  CDS (1)..(1140): transl_table=11
gtgcgacagaccgtgaaaggatgcgccgtcaccatcgaccaggtctcaaaagcatacggtcactgcctcgccgttgaccgtgccaccgttcacattcggcagggagagtttttctccatcctcggtccttcaggctgcggaaagaccacgcttttgcgtatcattgcagggtttgaacagccggactcaggagacttgaccttcgaccacgtgagtgtgctcggtgttggtgcaaataagcggaggtctaacaccgttttccagtcgtatgccctctttcctcacctttccgtgtacgagaacatcgccttccccctcaggctcaaacgcctctcaaagaacctcatccgcgagcgcgtgcacgagtaccttcacctggtacagctggacgagcacctgcacaagaaaccccatcagctgtcaggtggccaacaacagcgcgtcgccattgcccgtgcactcgtgtgcgagccaggggtgctcctgcttgacgagccgctttctgccctggatgcaaaacttcgctccaatttgctcatagagctcgatacactccacgatcagacgggcattaccttcgtttttatcacccatgaccagagcgaggctctgtccgtctccgaccgcatcgccgtcatgaacaaaggaaagatcctgcagatcggtactccctacgagatttatgagcaacctgcgactgactttgtcgctaagtttattggggaaactaatagcttcctgtcaactgtcgtctcctgcaccgccattgaaaacgaagagtttatgctcagtctccaggttccggaacttgaccgtacgctcaccgtaaccgccgataaccctatcgatcctggcaggcgggtgtgtttcaccgttcgcccagagaagatccacatttcccttgaagagccgggtaccaccagtgcgccgctcaatgtttttcgcggttttgtagaggagcctgtatatgcagggttccaatctaagtttttcgtccagttagaaagtggcgctattatccaagtgtttcagcaacaccagaagtatctcgacactggccctgagattgcgtggaaggacactgtttacgtgtcctggtctgcacacgacggctacgtggttgaggacatcgagtcgtga

SEQ ID NO: 65733 - protein, 379 aa, Treponema pallidum subsp. pallidum str. Nichols
MRQTVKGCAVTIDQVSKAYGHCLAVDRATVHIRQGEFFSILGPSGCGKTTLLRIIAGFEQPDSGDLTFDHVSVLGVGANKRRSNTVFQSYALFPHLSVYENIAFPLRLKRLSKNLIRERVHEYLHLVQLDEHLHKKPHQLSGGQQQRVAIARALVCEPGVLLLDEPLSALDAKLRSNLLIELDTLHDQTGITFVFITHDQSEALSVSDRIAVMNKGKILQIGTPYEIYEQPATDFVAKFIGETNSFLSTVVSCTAIENEEFMLSLQVPELDRTLTVTADNPIDPGRRVCFTVRPEKIHISLEEPGTTSAPLNVFRGFVEEPVYAGFQSKFFVQLESGAIIQVFQQHQKYLDTGPEIAWKDTVYVSWSAHDGYVVEDIES

SEQ ID NO: 65734 - DNA, 1068 bp, Thermotoga maritima MSB8
  CDS (1)..(1068): transl_table=11
ttggcgcaggtgaaaatagacggagtgaagaaatatttcgggaatgtgagggctctcgatggaatcgaccttgtcgtgaacgaaggggagttcctcgttcttctcggtccatctggttgtggaaagacgacccttctgaggtgtatagcgggtctcgaacaggtgaccgggggaaagatctttttcaacgatcgcgacgtgacgaaccttcctccaaaggacaggaacatttcgatggtcttccagagctacgcggtgtggccccacatgaaggtgtacgacaacatcgcgtatcctctgaaactgaaaaaagtcccgaaagaggagatagaaaagagggtaaagtgggcagcggatctccttcacatctccgaactcctcgacaggtaccccgcacagctctccggaggtcagagacagagggttgccgttgcccgagcgatcgttcacgaacccgaagtactcctgatggacgagcctctttccaatctggacgcacttttgagggtgaagatgagaagcgagctgaaaaagcttcaggaaagaattggagtcaccaccatctatgtgactcatgaccagacagaggccatgacgatgggagacagaatcgcggtgatgaaccagggaaagcttcagcaggttggaacgccctctgagatctatcaccatccggtgaacatcttcgtcgctggttttgtgggatcaccgcagatgaacttcttagagatggaagtgagatcggaaggaaatagcgttgtcctccaaaacggtgagataaagattcccgcgaagaccgatccaggtgcaaaaaaggtgatccttggtattcgaccggagaacgtctatctggaggaaaagccgaacactttgaagctggaaggagaggtttatttcgccgagaaactcatgtcggatacgattctccatctcaacgttggaagtgagaagatcgtcgcaaaaattccaggggatgtggatttcagaagcggtgagaagatcacgtttttcctggacgttgaaaagatccatctctttcaccctgagacgggagagagaatctcatga

SEQ ID NO: 65735 - protein, 355 aa, Thermotoga maritima MSB8
MAQVKIDGVKKYFGNVRALDGIDLVVNEGEFLVLLGPSGCGKTTLLRCIAGLEQVTGGKIFFNDRDVTNLPPKDRNISMVFQSYAVWPHMKVYDNIAYPLKLKKVPKEEIEKRVKWAADLLHISELLDRYPAQLSGGQRQRVAVARAIVHEPEVLLMDEPLSNLDALLRVKMRSELKKLQERIGVTTIYVTHDQTEAMTMGDRIAVMNQGKLQQVGTPSEIYHHPVNIFVAGFVGSPQMNFLEMEVRSEGNSVVLQNGEIKIPAKTDPGAKKVILGIRPENVYLEEKPNTLKLEGEVYFAEKLMSDTILHLNVGSEKIVAKIPGDVDFRSGEKITFFLDVEKIHLFHPETGERIS

SEQ ID NO: 65736 - DNA, 1107 bp, Thermotoga maritima MSB8
  CDS (1)..(1107): transl_table=11
ttgatcggaggagaagtttcaataaagaacgtcagcaaatttttcgatgatttccaggttttgaagaacgtttccctggatataaagaaaggagagtttttctccatactcggcccatcgggttgtggaaaaacaacgcttcttcgtgtgatagcgggcttcgagggtgtggaaagtggagatgttctcctggatggaaagtcgatactgaatttgcctccgaacaaaaggcccgtgaacatcatatttcagaactacgctctgttccctcatctcacagtttttgaaaacatcgcgttccccttgaaactcaaaaaactatccgagaacgaaataaatcagagagtgaacgaactgctttcgctcataagaatggaagaacacgctcagaaaatgccttcccaactgtctggtggtcagaagcagagagtggcgatagcgagggccctcgccaacgagccgagggtcctccttctcgatgaaccgctgagcgctctcgacgcaaaactgagacaggaactccttgtcgagctcgacaaccttcatgacagagtcggtatcaccttcatttacgtaacacacgatcaggctgaagcaatcagtgtttcagacagagtcgccctcatgaacgaaggagaaatcgttcaggttggaactccctacgaggtgtatgagagcccggtcaacgtctttgcagcgactttcatcggagaaacgaacctcatgaaagccgaggttgttgaagtggaagatgaatattacgtcgtagaaagtccgggaatcggccagttcaggtgttacagagacaaggaagcaaagaagggtgatagattgctcatcacccttagacccgaaaagatcagaatctcaaggaaacagtttcgttccgaggaaaccttcaatgtatttcacggagttgtggatgaggaaatatacatggggcaccagacgaagtacttcgttcgactcgacgaaggctacataatgaaagtttacaagcaacatgcaaggtacatactcgatgagccgatcataaaatgggaagatgaagtgttcatcacatggaatccagatgacagcttcattgtagaggtgcttgaagaatga

SEQ ID NO: 65737 - protein, 368 aa, Thermotoga maritima MSB8
MIGGEVSIKNVSKFFDDFQVLKNVSLDIKKGEFFSILGPSGCGKTTLLRVIAGFEGVESGDVLLDGKSILNLPPNKRPVNIIFQNYALFPHLTVFENIAFPLKLKKLSENEINQRVNELLSLIRMEEHAQKMPSQLSGGQKQRVAIARALANEPRVLLLDEPLSALDAKLRQELLVELDNLHDRVGITFIYVTHDQAEAISVSDRVALMNEGEIVQVGTPYEVYESPVNVFAATFIGETNLMKAEVVEVEDEYYVVESPGIGQFRCYRDKEAKKGDRLLITLRPEKIRISRKQFRSEETFNVFHGVVDEEIYMGHQTKYFVRLDEGYIMKVYKQHARYILDEPIIKWEDEVFITWNPDDSFIVEVLEE

SEQ ID NO: 65738 - DNA, 1134 bp, Vibrio cholerae O1 biovar eltor str. N16961
  CDS (1)..(1134): transl_table=11
gtgggagaaatacagacgttgaacgaacaacattcagtaggaaagccagtcattcgtttatctggcattagcaaaagtttcgatggtaaggaaatcattggtaacctaaatcttgatgtgaatcatggcgagttcttaaccatcctaggtccatcgggctgtggtaaaacgacggtgttaagaatgattgctggttttgaaactgcagatcaaggtcagattctgctagatgatcaagacgttactcaagttcctgctgaacaacgacacgtcaatacggtcttccaaagctatgctctattcccccacatgacagtgttcgaaaacgtcgcttttggtttgcgcatgcaaaaagtccctcaaagcgaaatcgaacctcgtgttatggaagcactacgcatggtgcgccttgccgaaatggcacagcgtaaaccgcatcaactttctggtggccagcagcaacgtatcgctattgcgcgcgcagtggttaacaaacctaaagtactgctacttgacgaatcgctctccgctttggattacaaattgcgtaaacaaatgcagagcgagctcaaacaactacaacgtcaattaggcattacctttatcttcgttactcacgatcaagaagaagcgctgtctatgtcagatcgcatcatcgttatgcgttcaggcaaaattgaacaagacggctctcctcgtgaaatctacgaagatccaaaaaatctctttgttgctcgttttatcggcgaaatcaacgtcttccaagcaacgactatcgatcgtatcgacgaaaaacgcatccgcgttgacatcgaaggtatcgagtcgattgtttactatgaagatgaagtgaaggctggtgacaagctgcaagtgctcctccgtcctgaagacttacgtatcgaagaaatcaaagagtcagaagaaaaaggcattgtgggtcacgtgactgaccgtacctacaaaggcatgactctggaatcagtggtagaactggaatccggtatgtgtgtgatggttagcgaattctttaacgaagatgatccagatgttgatcactctatcggacagaaagttgccgtcacttgggttgaaagctgggaggtagtcctcaatgatgagcaaaaagcttaa

SEQ ID NO: 65739 - protein, 377 aa, Vibrio cholerae O1 biovar eltor str. N16961
MGEIQTLNEQHSVGKPVIRLSGISKSFDGKEIIGNLNLDVNHGEFLTILGPSGCGKTTVLRMIAGFETADQGQILLDDQDVTQVPAEQRHVNTVFQSYALFPHMTVFENVAFGLRMQKVPQSEIEPRVMEALRMVRLAEMAQRKPHQLSGGQQQRIAIARAVVNKPKVLLLDESLSALDYKLRKQMQSELKQLQRQLGITFIFVTHDQEEALSMSDRIIVMRSGKIEQDGSPREIYEDPKNLFVARFIGEINVFQATTIDRIDEKRIRVDIEGIESIVYYEDEVKAGDKLQVLLRPEDLRIEEIKESEEKGIVGHVTDRTYKGMTLESVVELESGMCVMVSEFFNEDDPDVDHSIGQKVAVTWVESWEVVLNDEQKA

SEQ ID NO: 65740 - DNA, 1143 bp, Pasteurella multocida subsp. multocida str. Pm70
  CDS (1)..(1143): transl_table=11
attggtacattagggagaaaaccaaagctagtggaaagttcagttcaaaacaagcctattattgagcttcgttctattactaaatcttatggtgataaaactatcattgaaaactttaacttaacaatcaacaatggtgagtttttaaccattcttggtccttcaggttgtggtaaaacaacagttttacgtttacttgcagggttagaagaattagattcaggcaatattattcttgacggagaggacattactcatgtccctgcagaacagcgtcacgtcaatactgttttccaaagttatgccttattcccacatatgacaatttttgaaaatgtggcatttggcttacgcatgcaaaaagtaccgaatgaggaaattaaacctcgcgtgttagaagcattacgtatggtacaacttgaagaatatgcgtacagtaaacctgctcaattatcgggtggtcaacaacaacgtattgccattgcgcgtgcggtggttaacaaaccgaaagtgttgctactggatgaatccctttccgcattagattataaattgcgtaaacaaatgcaaaatgaattaaaggcattgcaacgtaaattgggcattacctttatttttgtgactcacgatcaagaagaagctcttacgatgtctgatcgtattattgtgttacgtaaaggtcatatacaacaagatggttccccgcgtgaaatttatgaagagccaaaaaatctgtttgttgccaaatttattggtgaaatcaatatcttcaatgcaacggtattaacgcgtgtcgatgagaaacgtgttcgcgccaatgtggaaggacgcgtttgcgatatttataccaatcttgatgttgttgctgagcaaaaactcaaagttttattacgtccggaagatatcttaattgaagaattggatgaaaaccaaagttcaaaagcgattattggtcacgtggcagatcgtaactataaaggaatgacgttagaatcaaacatcacgctagaccataatggaatgaccgtgcttgttagcgaattctttaacgaagacgatccaaatatcgatcactctttaggtcaaaaagtggcattaacatggcacgaaggctgggaggtagtgttgagcgatgaagaataa

SEQ ID NO: 65741 - protein, 380 aa, Pasteurella multocida subsp. multocida str. Pm70
MGTLGRKPKLVESSVQNKPIIELRSITKSYGDKTIIENFNLTINNGEFLTILGPSGCGKTTVLRLLAGLEELDSGNIILDGEDITHVPAEQRHVNTVFQSYALFPHMTIFENVAFGLRMQKVPNEEIKPRVLEALRMVQLEEYAYSKPAQLSGGQQQRIAIARAVVNKPKVLLLDESLSALDYKLRKQMQNELKALQRKLGITFIFVTHDQEEALTMSDRIIVLRKGHIQQDGSPREIYEEPKNLFVAKFIGEINIFNATVLTRVDEKRVRANVEGRVCDIYTNLDVVAEQKLKVLLRPEDILIEELDENQSSKAIIGHVADRNYKGMTLESNITLDHNGMTVLVSEFFNEDDPNIDHSLGQKVALTWHEGWEVVLSDEE

SEQ ID NO: 65742 - DNA, 1113 bp, Pseudomonas aeruginosa PAO1
  CDS (1)..(1113): transl_table=11
atgagtgccctgcattcgctgcgtacccatgcagtgtccatccgcgcggtacgcaaggtgtacggcgatcccgagagcggcccggtggcactgaagcgcgtcgacctggatatccgcgacaatgagttcttcaccctcctcggcccgtctggctgcggcaagaccaccctgctgcggatgatcgccggcttcgagtttcccacggagggcgagatcctcctctacggcgagaacatcgccgcgcgaccgcccttcgagcgcccggtgaacaccgtgttccagcactatgcgctgttcccgcacatgagcatcgccgagaacctcgccttcggcctcgaatcgcgcccactgggacgcagcctgggcaaggcggagatcgccgagcgggtccgcgagatgctcgccctggtgcagatggaacgtttcgccgatcgccgtcccgggcagctttcaggaggccagcagcaacgcgtggcactggcccgtgcgctggcgccgcaaccgcgggtgctgctgctcgacgaaccgctctcggccctcgacctgaagctgcgccaggcgatgcgcgaggaactcaaggcgatccaagcgaagaccgggatcaccttcattttcgtcacccacgaccaggaggaggcgctgaccatgtccgatcgcatcgccgtgctctccgagggccaggtgcaacaggtcggaccgccggaagagatctacgagcgccccggcaaccgctttgtcgccgacttcattggcgagaccaatttcatcgaagccgagctgctccagcgcgacggcccgctggcgctgtaccgcggtcccggcggtgaagcgttcgaggccgccgcgcgcgacggcctggcagccggagcccgggtctgcctgtcgatccgcccggaacgcctggacctgctggcggccaacaccggcggcggcctgccctgcacggtggaaagccaggtctacctcggcaccgacctgcaataccgggtgcgcctggccgacggcagcctgctgacggtgcgcacaccgaacggcacggcacggcgcttcgccaccggtgaagctgcctgcctggccgtggccaaagacagcgccagcgtcctgctggattga

SEQ ID NO: 65743 - protein, 370 aa, Pseudomonas aeruginosa PAO1
MSALHSLRTHAVSIRAVRKVYGDPESGPVALKRVDLDIRDNEFFTLLGPSGCGKTTLLRMIAGFEFPTEGEILLYGENIAARPPFERPVNTVFQHYALFPHMSIAENLAFGLESRPLGRSLGKAEIAERVREMLALVQMERFADRRPGQLSGGQQQRVALARALAPQPRVLLLDEPLSALDLKLRQAMREELKAIQAKTGITFIFVTHDQEEALTMSDRIAVLSEGQVQQVGPPEEIYERPGNRFVADFIGETNFIEAELLQRDGPLALYRGPGGEAFEAAARDGLAAGARVCLSIRPERLDLLAANTGGGLPCTVESQVYLGTDLQYRVRLADGSLLTVRTPNGTARRFATGEAACLAVAKDSASVLLD

SEQ ID NO: 65744 - DNA, 1155 bp, Pseudomonas aeruginosa PAO1
  CDS (1)..(1155): transl_table=11
atggcgatagcctccggtgcctacaagaaagccctagagggcaaccagcagccgaaagaggtgctggtaaagatcgaccgggtaaccaagcagttcgacgagacgctggcggtggacaccgtgtccctgaccatcaacaagggcgagatcttcgccctgctcggcggctccggctcgggtaaatccaccctgttacgcatgctcgccggtttcgagcggcccaccgaggggcggatcttcctcgatggccaggacatcaccgacctgccgccctacgagcggccgatcaacatgatgttccagtcctatgcgctgttcccgcacatgagcgtggcgcagaacatcgccttcggcctcaagcaggacggcctgcccaaggccgagatcgacgagcgcgtggccgagatgctcaagctggtgcacatgacccagtacgccaagcgcaagccgcaccagctctccggcggccagcgccagcgggtggccctggctcgttcgctggccaagcggccgaagctgctgctgctcgacgagccgatgggcgcgctggacaagaagctgcgctcgcagatgcaactggaactggtggagatcatcgagcgcgtcggcgtgacctgcgtgatggtgacccacgaccaggaagaggccatgaccatggcccagcgcatcgccatcatgcacctgggctgcatcgagcagatcggcagcccgatggacatctacgagaccccggcgagccgcctggtctgcgagttcatcggcaacgtcaacctgttcgacggcgtgctggtggaggacgtgcaggaccatgcggtgatcgcctgcccgcagctggagaacccgatctacatcggccacggcatcagcacccgcgccgaggacaagcgcatcacctacgcgctgcggccggagaaagtgatgatcagcgcgcagaagccggacaacctggaacacgccgggcacaactgggcccagggcaccgtctacgacatcgcctaccttggcggccactcggtgtactacatcaagctggcgtccgggatgatcgtccaggccttcatggccaacgccgagcgccacgtcgcccggccgacctgggaccagtcggtgtacatcagctggtacgacgacagcggcgtggtactgcagtcatga

SEQ ID NO: 65745 - protein, 384 aa, Pseudomonas aeruginosa PAO1
MAIASGAYKKALEGNQQPKEVLVKIDRVTKQFDETLAVDTVSLTINKGEIFALLGGSGSGKSTLLRMLAGFERPTEGRIFLDGQDITDLPPYERPINMMFQSYALFPHMSVAQNIAFGLKQDGLPKAEIDERVAEMLKLVHMTQYAKRKPHQLSGGQRQRVALARSLAKRPKLLLLDEPMGALDKKLRSQMQLELVEIIERVGVTCVMVTHDQEEAMTMAQRIAIMHLGCIEQIGSPMDIYETPASRLVCEFIGNVNLFDGVLVEDVQDHAVIACPQLENPIYIGHGISTRAEDKRITYALRPEKVMISAQKPDNLEHAGHNWAQGTVYDIAYLGGHSVYYIKLASGMIVQAFMANAERHVARPTWDQSVYISWYDDSGVVLQS

SEQ ID NO: 65746 - DNA, 1050 bp, Pseudomonas aeruginosa PAO1
  CDS (1)..(1050): transl_table=11
atgaccagcgcgatagccatcgagcggatctgcatggaattcggtacccccggccaaggcctgaaggcccttgacgatgtgtccctggatatccacgccaacgaattcttcaccctcctcggcccttccggctgcggcaagaccaccctcctccgcctcatcgccggcttcgaacagcccagttccggcagcatccgcctctatggcgaacacatggaaggcctgccgccgttccgccgcccggtcaacacggtgttccagagttatgcgctgttcccgcacatgagcgtcgccgacaacatcggcttcggcctggagatgcagggccgcccgcgcagcgagatcgacgccaccgtgagccgcatgctcgacctggtgaagctgccggaggtcggcaagcgccgcgccgaccagttgtccggtggccagcagcaacgcatcgccctggcccgcgcgctggccagccggcccaaggtgctgctgctcgacgagtcgctgtcggcgctggacctgaagctgcgcaaggaaatgcagatcgagctgaagcgcctgcagcacgagaccgggatcaccttcatcttcgtcacccacgaccaggaggaagcgctgaccatgtccgaccgcatcgcggtgatgagcaagggcaaggtgttgcaggtcggcacgcccagcgacatctacgaggcgccgctgaaccgggcggtcgccgacttcatcggcgaaaccaacttcctcgagggccaggccgacgccgacggcgtgcgcctggcggacggccagcggctggccgcgacgaccccgggcagcggcgctgtgaccttggcgatccgcccggagcgcaccgaactggccgccgacggccagttggaaggcgtgctggaaaacatcgtctatgtcggcaccgataccgtctaccacctgaacgtggccggacagccgggcttccgcgtgcgccagcagaaccgcgacggcgcacgctgcccgcacagtccgggggcgaaggtgcgggtgcggattcccgccgccgccatccgggtgctcgccgaatga

SEQ ID NO: 65747 - protein, 349 aa, Pseudomonas aeruginosa PAO1
MTSAIAIERICMEFGTPGQGLKALDDVSLDIHANEFFTLLGPSGCGKTTLLRLIAGFEQPSSGSIRLYGEHMEGLPPFRRPVNTVFQSYALFPHMSVADNIGFGLEMQGRPRSEIDATVSRMLDLVKLPEVGKRRADQLSGGQQQRIALARALASRPKVLLLDESLSALDLKLRKEMQIELKRLQHETGITFIFVTHDQEEALTMSDRIAVMSKGKVLQVGTPSDIYEAPLNRAVADFIGETNFLEGQADADGVRLADGQRLAATTPGSGAVTLAIRPERTELAADGQLEGVLENIVYVGTDTVYHLNVAGQPGFRVRQQNRDGARCPHSPGAKVRVRIPAAAIRVLAE

SEQ ID NO: 65748 - DNA, 1110 bp, Pseudomonas aeruginosa PAO1
  CDS (1)..(1110): transl_table=11
atggccgagactcaaggcggcgatgtgctggtcagcttccgtggcgtgcagaaaagctacgacggcgagaccctcatcgtgaaggatctcaacctggacattcgcaagggcgaattcctcaccctgctcggcccctccgggtccggcaagaccaccagcctgatgatgctggccggtttcgaaacccccaccgccggcgaaatcctcctggccggtcgctcgatcaacaatgtccctccgcacaagcgcgacatcggcatggtgttccagaactatgcgctgttcccgcacatgaccgtggccgagaacctggcctttcccctcagcgtccgtggcatgagcaagaccgacgtgaaggaaagggtcaagcgcgcgttgtcgatggtccagctcgacgccttcgccgggcgttatccggcgcagctttccggtggccagcagcagcgcgtggcgctggcccgcgcgctggtcttcgagccgcaactggtgctgatggacgagcccctgggagcgctggacaagcaacttcgcgagcacatgcagatggaaatcaagcatctgcaccagcgcctcggtgtcaccgtggtctacgtcacccacgaccagggcgaggcgctgaccatgtccgaccgggtggcggtgttccaccagggcgaaatccagcagatcgagccgccgcgcaatctctacgagcagccgcgcaacaccttcgtggccaacttcatcggtgagaacaaccgtctatccgggcagcttctcagttgcgacggcgagcgctgcgtggtcggactgccgcgcggcgagaaggtcgaggcgctggcggtcaacgtcggccagccgggcgagccggtgaccttgtcgatccgccccgagcgggtgcgcctgaacggtgccagcgagtcttgcgtcaaccgtttctccggccgcgtggccgagttcgtctacctgggcgaccacgtgcgtgtgcgcctggaggtctgcggccgcgacgacttcttcgtcaagcagccgatcgccgagctggacccgacgctgagcgtcggtgatgtggttccgctgggctggcaggtcgagcatgtgagggcgctcgaccctctgccggcggcgtga

SEQ ID NO: 65749 - protein, 369 aa, Pseudomonas aeruginosa PAO1
MAETQGGDVLVSFRGVQKSYDGETLIVKDLNLDIRKGEFLTLLGPSGSGKTTSLMMLAGFETPTAGEILLAGRSINNVPPHKRDIGMVFQNYALFPHMTVAENLAFPLSVRGMSKTDVKERVKRALSMVQLDAFAGRYPAQLSGGQQQRVALARALVFEPQLVLMDEPLGALDKQLREHMQMEIKHLHQRLGVTVVYVTHDQGEALTMSDRVAVFHQGEIQQIEPPRNLYEQPRNTFVANFIGENNRLSGQLLSCDGERCVVGLPRGEKVEALAVNVGQPGEPVTLSIRPERVRLNGASESCVNRFSGRVAEFVYLGDHVRVRLEVCGRDDFFVKQPIAELDPTLSVGDVVPLGWQVEHVRALDPLPAA

SEQ ID NO: 65750 - DNA, 996 bp, Pseudomonas aeruginosa PAO1
  CDS (1)..(996): transl_table=11
atgtcgttcgtcagcgtcgaacagctcgacaagagctacggtgccaccagcatcttccgcgatatcgacttcgccgccgcccgcggcgagttcgtcaccctgctcggccccagcggctgcggcaagtccaccctgctgcgctgcatcgccgggctgaccgaggtcgacagcgggcgcatcctcatcgacggcgaggatgtggtgcctttgccgccgcagaagcgcgggatcgccatggtgttccagagctacgcgctgttccccaacatgaccgtgcaacagaacgtcgccttcggcctgcgcatgcagaaggtgcctgcggcggaactgaagcagcgggtcgccgaagccatcgaactggtggaactgggcgagtacgccgcacgctacccgcaccaactctccggcggccagtgccagcgcgtggcgctggcccgctcgctggtgacgcgcccgcgcctgctgctgctcgacgagccgctgtcggccctcgacgcgcgcatccgcaagcacctgcgcgaacagatccgccgcatccagcaggagctggggctgaccacggtgttcgtcacccatgaccaggaggaagcgctgaccctgtccgaccgcatcgtcctgatgaacgccggacgcatcgtccagagcggcgacgcggagaccctctacaccgcgccggaaaacgccttcgccgccggcttcatcggcaactacaacctgctcgacgccgaacaggccagccgcctgctcggccagtcctgcgcgcaacaggtggcgatccgcccggaatccctgcgcctgggcaacgaaccgagcgaaggcgtgccggcgctggtacgctcgcacagtctgctcggcaacgtgatccgttaccgcgtcgaggccgccggggtggaactcaccgtcgacgtcctcaaccgcagcgcagaccgcctgtatccggccggcagtcagctgacgctggtcatcgatcgcaacagtattcgagaggtagcttga

SEQ ID NO: 65751 - protein, 331 aa, Pseudomonas aeruginosa PAO1
MSFVSVEQLDKSYGATSIFRDIDFAAARGEFVTLLGPSGCGKSTLLRCIAGLTEVDSGRILIDGEDVVPLPPQKRGIAMVFQSYALFPNMTVQQNVAFGLRMQKVPAAELKQRVAEAIELVELGEYAARYPHQLSGGQCQRVALARSLVTRPRLLLLDEPLSALDARIRKHLREQIRRIQQELGLTTVFVTHDQEEALTLSDRIVLMNAGRIVQSGDAETLYTAPENAFAAGFIGNYNLLDAEQASRLLGQSCAQQVAIRPESLRLGNEPSEGVPALVRSHSLLGNVIRYRVEAAGVELTVDVLNRSADRLYPAGSQLTLVIDRNSIREVA

SEQ ID NO: 65752 - DNA, 1092 bp, Pseudomonas aeruginosa PAO1
  CDS (1)..(1092): transl_table=11
gtgacgccccccttgctcgagatccgcaacgtgacccgccgcttcggcgacttcaccgccgtcgacaatgtcagcctgacgatcaacaccggcgaattcttcaccctcctcggcccttccgggtgcggcaagaccaccctcctgcgcatgctcgccggcttcgaccagccggacagcggcgagatccgcctcaacggccaggacctcgccggcgtcgagccggagaagcgcccggtgcatacggtgttccagagctacgcgctgttcccgcacatgagcgtagcgcagaacatcgccttcccgctgaagatggccggagtggcgaagagcgagatcgacgcccgcgtcgaacaggccctgaaggacgtacgcctggcggacaagggcgggcgcatgccgacacagctttccggcggccagcgccagcgcgtggcgatcgcccgcgcgctggtcaaccggccgcgcctgctgctgctcgacgaaccgctgtcggcgctggacgccaagctgcgcgaagaaatgcagatcgaactgatcaacctgcagaaggacgtcggcatcaccttcgtctatgtcacccacgatcagggcgaagccctggcgctgtcgcaccgcatcgcagtgatgaaccagggccgggtggagcaactggacgccccggaaaccatctacagcttcccgcgcagtcgtttcgtcgccgacttcatcggccagtgcaacctgctcgacgccacggtcgaggcggtcgacggcgaacgcgtgcgcatcgacctccggggcctgggcgaggtccaggcgctgaaatccttcgacgcccagcccggcgaggcctgcgtgctgaccctgcggccggagaagatccgcctggcgcagagcgtcaccgccgacagcgacgaggtgcacttccgcggtcgcgtcgccgaactgctctacctgggcgacgtgaccctgtacatcgtcgagctggagaacggcgagcgcctggaaaccctgctgcccaacgccacgcccggccgagccaagttcttcgaggtgggcgacgcggtggaagccgcctggcgcttcgatgccggccatctggtcagggcctga

SEQ ID NO: 65753 - protein, 363 aa, Pseudomonas aeruginosa PAO1
MTPPLLEIRNVTRRFGDFTAVDNVSLTINTGEFFTLLGPSGCGKTTLLRMLAGFDQPDSGEIRLNGQDLAGVEPEKRPVHTVFQSYALFPHMSVAQNIAFPLKMAGVAKSEIDARVEQALKDVRLADKGGRMPTQLSGGQRQRVAIARALVNRPRLLLLDEPLSALDAKLREEMQIELINLQKDVGITFVYVTHDQGEALALSHRIAVMNQGRVEQLDAPETIYSFPRSRFVADFIGQCNLLDATVEAVDGERVRIDLRGLGEVQALKSFDAQPGEACVLTLRPEKIRLAQSVTADSDEVHFRGRVAELLYLGDVTLYIVELENGERLETLLPNATPGRAKFFEVGDAVEAAWRFDAGHLVRA

SEQ ID NO: 65754 - DNA, 1260 bp, Neisseria meningitidis MC58
  CDS (1)..(1260): transl_table=11
atgctgcccgtgcgctttacaagagtttcagacggcatcaaacgtttaactcccgccagcaatcaaacagctttttatcacccattcgaaaatccgttttgccggtactcgtctttttattggagtattgccattatgaccgcaaccactgcgtcttcagccaaaccttatctcaaaatccaaggtttggtgaaaaagtttggtgacaattacgctgtcgataacatcgacttggacatttatcaacacgaaatcttcgcccttttgggcagttccggcagcggaaaatctacactgctgcgtatgctggcgggtatggaaagtcccaatcagggaaaaattatccttgatggtcaggatattaccaaacttgcaccctatgatcgccccatcaatatgatgttccaaagttacgcgctttttccgcatatgaccgtagaacaaaacattgccttcggtctgaaacaggacaaaatgcctaaaggcgaaatcgccgcgcgcgtcgaagaaatgctccgcctggttcagatgaccaaatttgctaaacgcaaaccgcaccaattgtccggcggtcagcagcagcgcattgctttggcacgcagtctggcaaaacgtccgaaaattctactgctggatgagcccctcggtgcattggacaaaaaactgcgccaacaaacccagcttgagttggtcaatacgctggaacaagtcggcgtaacctgtattatggttacgcacgaccaagaagaggcgatgacgatggcgacccgcatcgccattatgtctgacggtcagttgcagcaagtcggcacacccagcgacgtgtacgactatcccaacagccgcttcactgccgagtttatcggcgaaaccaacatctttgacggtgtggtgattgaagatcatgccgactatgccgttatcgaatgcgaaggtttggaaaaccacgtccgcatcgatcacggtttgggtggtccgagcgagcaggacctttgggttagtattcgaccagaggatattgatttatataaagaaaaacccgaatatttgggcgactacaactgggcgaaaggcacggtaaaagaaatcgcctatttgggcagcttcgccatttaccatatcaagctcggcaacgggcgcgtcgtcaaaagccaagtccccgccccttactggtatgtgcgcaacattacaccgccgacttgggacgaaaccgtctatatcagctggccggaaaaccaaccgactccgttgttccgttga

SEQ ID NO: 65755 - protein, 419 aa, Neisseria meningitidis MC58
MLPVRFTRVSDGIKRLTPASNQTAFYHPFENPFCRYSSFYWSIAIMTATTASSAKPYLKIQGLVKKFGDNYAVDNIDLDIYQHEIFALLGSSGSGKSTLLRMLAGMESPNQGKIILDGQDITKLAPYDRPINMMFQSYALFPHMTVEQNIAFGLKQDKMPKGEIAARVEEMLRLVQMTKFAKRKPHQLSGGQQQRIALARSLAKRPKILLLDEPLGALDKKLRQQTQLELVNTLEQVGVTCIMVTHDQEEAMTMATRIAIMSDGQLQQVGTPSDVYDYPNSRFTAEFIGETNIFDGVVIEDHADYAVIECEGLENHVRIDHGLGGPSEQDLWVSIRPEDIDLYKEKPEYLGDYNWAKGTVKEIAYLGSFAIYHIKLGNGRVVKSQVPAPYWYVRNITPPTWDETVYISWPENQPTPLFR

SEQ ID NO: 65756 - DNA, 1125 bp, Neisseria meningitidis Z2491
  CDS (1)..(1125): transl_table=11
atgaccgcaaccactgcgtcttcaaccaagccttatctgcaaatccaaggtttggtgaaaaagtttggtgacaattacgctgtcgataacatcgacttggacatttatcaacacgaaatcttcgcccttttgggcagttccggcagcggaaaatctacactgctgcgtatgctggcgggtatggaaaatcccaatcagggaaaaattatccttgatggtcaggatattaccaaacttgcaccctatgatcgccccatcaatatgatgttccaaagttacgcgctttttccgcatatgaccgtagaacaaaacattgccttcggtctgaaacaggacaaaatgcctaaaggcgaaatcgccgcgcgcgtcgaagaaatgctccgcctggttcagatgaccaaatttgctaaacgcaaaccgcaccaattgtccggcggtcagcagcagcgcattgctttggcacgcagtctggcaaaacgtccgaaaattctactgctggatgagcccctcggtgcattggacaaaaaactgcgccaacaaacccagcttgagttggtcaatacgctggaacaagtcggcgtaacctgtattatggttacgcacgaccaagaagaggcgatgacgatggcgacccgcatcgccattatgtctgacggtcagttgcagcaagtcggcacacccagcgacgtgtacgactatcccaacagccgcttcactgccgagtttatcggcgaaaccaacatctttgacggtgtggtgattgaagatcatgccgactatgccgttatcgaatgcgaaggtttggaaaaccacgtccgcatcgatcacggtttgggtggtccgagcgagcaggacctttgggttagtattcgaccagaggatattgatttatataaagaaaaacccgaatatttgggcgactacaactgggcgaaaggcacggtaaaagaaatcgcctatttgggcagcttcgccatataccatatcaaactcgccaacgggcgcgtcgtcaagagccaagtccccgccccttactggtatgtgcgcaacattacaccgccaacttgggacgaaaccgtctatatcagctggccggaaaaccagcctacgccactgttccgttga

SEQ ID NO: 65757 - protein, 374 aa, Neisseria meningitidis Z2491
MTATTASSTKPYLQIQGLVKKFGDNYAVDNIDLDIYQHEIFALLGSSGSGKSTLLRMLAGMENPNQGKIILDGQDITKLAPYDRPINMMFQSYALFPHMTVEQNIAFGLKQDKMPKGEIAARVEEMLRLVQMTKFAKRKPHQLSGGQQQRIALARSLAKRPKILLLDEPLGALDKKLRQQTQLELVNTLEQVGVTCIMVTHDQEEAMTMATRIAIMSDGQLQQVGTPSDVYDYPNSRFTAEFIGETNIFDGVVIEDHADYAVIECEGLENHVRIDHGLGGPSEQDLWVSIRPEDIDLYKEKPEYLGDYNWAKGTVKEIAYLGSFAIYHIKLANGRVVKSQVPAPYWYVRNITPPTWDETVYISWPENQPTPLFR

SEQ ID NO: 65758 - DNA, 1089 bp, Deinococcus radiodurans R1
  CDS (1)..(1089): transl_table=11
gtgagcgtggtggacgtgttcaagagctaccgcaatgcggcgggcgccgagacgccggtgctgaaagacatcgacctcgacatccggcgcggcgagtttttcagcttgttggggccgtcgggctgcggcaagaccacgctcttgcggattctggcgggcttcgagcaggccgattcgggcgcggtggtcatcggtgggcgcgacatgaccggcattccggcgcaccgccgtccggtcaacaccgtgtttcaaagctacgcgctgtttccgcatctgtcggtggccgacaatgtggcctttggcctcaagcaaaaaggcgtgcgcggtgcggagttgcgccaacgggtcgagcgggcgatggaaacggtgcagattggacagttcggcaaccgcaagcccgaccagctctcgggcgggcagcggcaacgggtggccctcgcccgcgccatcgtcaaccagccggaagtgctgctgctggacgaacctctttcggcgctcgacctcaagctgcgcaagcagttgcaggtggaactgagcaatttgcaggaagacctcggcatcaccttcgtgttcgtgacccacgaccaggaagaagcgctggtcatgagtgaccgcatcgccgtgatgaaccagggccgcatcgagcaactcgggcgcgccgaggacctctacgagcgcccgcgcaccgcctttgtcgccaactttctgggcagctccaacctgctcgcgggccgggtcgccgagctgcacggcaccgaggccaccgtccagaccgagttcggcccgctgcggaccctgcacggcgcaggcctgagcgtgggccaggaagtcacgctgagtattcgcccggaaaaacttcgcatggagcgcgacgacgaaaccgagggcaacgaggtgcgcgcccgggtggacgacatcgtgtacaccggcgccgagaaccagtatctgctcgaagcacatgggcagcgactggtggccttccagctcaatgccgacatcggggccgacgaggacttcgactacgacgaggaagtggcgctgtacctgccgcccgcgagcttggttgtgctggaggagggggaagcatga

SEQ ID NO: 65759 - protein, 362 aa, Deinococcus radiodurans R1
MSVVDVFKSYRNAAGAETPVLKDIDLDIRRGEFFSLLGPSGCGKTTLLRILAGFEQADSGAVVIGGRDMTGIPAHRRPVNTVFQSYALFPHLSVADNVAFGLKQKGVRGAELRQRVERAMETVQIGQFGNRKPDQLSGGQRQRVALARAIVNQPEVLLLDEPLSALDLKLRKQLQVELSNLQEDLGITFVFVTHDQEEALVMSDRIAVMNQGRIEQLGRAEDLYERPRTAFVANFLGSSNLLAGRVAELHGTEATVQTEFGPLRTLHGAGLSVGQEVTLSIRPEKLRMERDDETEGNEVRARVDDIVYTGAENQYLLEAHGQRLVAFQLNADIGADEDFDYDEEVALYLPPASLVVLEEGEA

SEQ ID NO: 65760 - DNA, 1134 bp, Escherichia coli O157:H7
  CDS (1)..(1134): transl_table=11
gtgaatgacgctatccctcgcccccaggcgaaaacccgtaaggcgctgaccccgctattagaaatccgcaatctgaccaaatcctacgatggtcagcatgcggttgatgatgtcagcctgaccatctacaaaggtgaaatctttgcgctgctgggcgcatccggctgtggcaagtccacgctgctgcgtatgctggcaggtttcgaacaaccttcagccgggcagattatgcttgatggcgtcgatttgtcacaggtgccgccttacctgcgccccatcaatatgatgtttcagtcttacgcgctgtttccgcatatgaccgtggaacagaacatcgcttttggcctgaaacaggacaaactaccgaaagcggaaattgccagccgggtcaatgagatgctcggccttgtgcatatgcaggagttcgccaaacgcaaaccgcatcagctttccggtggtcagcgacagcgtgtggcactggcccgaagccttgccaagcgcccgaaactattactgctcgacgagccgatgggcgcgctggataaaaagctgcgtgaccggatgcagcttgaagtggtggatattctggaacgcgtcggtgtgacttgtgtgatggtcacccacgatcaggaagaggcgatgaccatggcggggcgtatcgccattatgaatcgtgggaaatttgtccagattggcgaaccggaagagatctacgagcatccgactacccgctatagcgccgaatttattggctcggttaatgtctttgaaggtgtactcaaagagcgtcaggaagatggtctggtgctttattcgccggggctggtgcatccactgaaagtcgatgcggatgcttcagtggtcgataacgtgccggtacacgtagcgctgcgtccggaaaaaatcatgctttgcgaagagccgcccgccaatggttgtaacttcgcggtgggggaggtgatacacattgcctatctcggcgatctttcggtgtatcacgttcgtctgaaaagtgggcagatgattagcgcccagctacaaaacgcccatcgtcatcgtaaagggttaccgacctggggcgacgaagtgcgtttgtgctgggaagtggacagctgtgtggtgctgacggtttaa

SEQ ID NO: 65761 - protein, 377 aa, Escherichia coli O157:H7
MNDAIPRPQAKTRKALTPLLEIRNLTKSYDGQHAVDDVSLTIYKGEIFALLGASGCGKSTLLRMLAGFEQPSAGQIMLDGVDLSQVPPYLRPINMMFQSYALFPHMTVEQNIAFGLKQDKLPKAEIASRVNEMLGLVHMQEFAKRKPHQLSGGQRQRVALARSLAKRPKLLLLDEPMGALDKKLRDRMQLEVVDILERVGVTCVMVTHDQEEAMTMAGRIAIMNRGKFVQIGEPEEIYEHPTTRYSAEFIGSVNVFEGVLKERQEDGLVLYSPGLVHPLKVDADASVVDNVPVHVALRPEKIMLCEEPPANGCNFAVGEVIHIAYLGDLSVYHVRLKSGQMISAQLQNAHRHRKGLPTWGDEVRLCWEVDSCVVLTV

SEQ ID NO: 65762 - DNA, 1092 bp, Streptococcus pneumoniae TIGR4
  CDS (1)..(1092): transl_table=11
atgagtgagatcaaaattattaacgccaaaaaaatctaccacgatgtccctgttattgagaatttgaacattacaattccaaaaggaagtctctttacccttcttggagcttcaggatgtgggaaaacgacccttcttcgtatgattgcaggtttcaacagtatcgaaggtggagaattttacttcgatgatacaaaaatcaataatatggaacccagcaaacgcaatatcgggatggttttccaaaactacgctattttcccacatttgactgtccgagacaacgttgcttttggtcttatgcaaaagaaggttccaaaagaagaattgattcaacagaccaacaagtatcttgaactcatgcaaattgctcaatatgcggatcgaaagcccgataaactcagtggtggacaacaacaacgtgtcaccttggcatgcgccttagcggttaatccaagtgttctcctcatggacgagccacttagtaatctggaggccaaacttcgcttggatatgcgtcaagccatccgagaaatccaacacgaagtgggaattacaactgtttatgtaacccacgaccaagaagaagccatggctatttcagaccaaattgctgttatgaaagatggggtgatccaacaaatcggccgaccaaaagaactctatcataaaccagctaatgagtttgtggcaacctttatcggacgcacaaatattatccctgccaatcttgaaaaacggagcgacggcgcttatatcgtcttttcagatggctatgcccttcgaatgccagctcttgatcaggttgaggagcaagctattcatgtaagcattcgtcccgaagagtttatcaaagatgaatctggagatattgaaggaactattagagatagcgtctatcttggactaaatacggattatttcattgagacaggttttgcctcaaaaattcaagttagtgaagaatcaacttttgaagaagatctacaaaaaggcaatcgtattcgtctacgaatcaatacgcaaaaattaaacatcttttctgcagatggttcccaaaacctgataaaaggagtcaaccatggaacgtaa

SEQ ID NO: 65763 - protein, 363 aa, Streptococcus pneumoniae TIGR4
MSEIKIINAKKIYHDVPVIENLNITIPKGSLFTLLGASGCGKTTLLRMIAGFNSIEGGEFYFDDTKINNMEPSKRNIGMVFQNYAIFPHLTVRDNVAFGLMQKKVPKEELIQQTNKYLELMQIAQYADRKPDKLSGGQQQRVTLACALAVNPSVLLMDEPLSNLEAKLRLDMRQAIREIQHEVGITTVYVTHDQEEAMAISDQIAVMKDGVIQQIGRPKELYHKPANEFVATFIGRTNIIPANLEKRSDGAYIVFSDGYALRMPALDQVEEQAIHVSIRPEEFIKDESGDIEGTIRDSVYLGLNTDYFIETGFASKIQVSEESTFEEDLQKGNRIRLRINTQKLNIFSADGSQNLIKGVNHGT

SEQ ID NO: 65764 - DNA, 1059 bp, Clostridium acetobutylicum ATCC 824
  CDS (1)..(1059): transl_table=11
atggaaaaagacatacttattgaacttaagaacgtttcaaagaaatatggcgaaaattatgtaattaaaaatttgaacttatttgtcagacgaaatgaatttcttacatttttaggtccaagcggatgcggtaaaacaacaaccttaaacatgattgctggttttgaaactcctgatgaaggaaacataatatttgaagacagtagtataaatattgttccccctcacaagaggcaaataaatactgtgtttcaaaaatatgctcttttttcacacatgaatgtatatgaaaatgtagcctttggtcttaggataaagaagcttccagaaaaacaaataagggaagaagttgaaaaaatgctttctctggtagacttaaaaggctttgaaaaaagatcaactgattctttaagcggtggtcaacagcagagggtagctattgcacgggcgcttgtaaataaaccaaagcttcttcttctagatgaacctcttggtgctcttgatttaaaacttagaaaagaaatgcagcttgaactgaaaaacatacaacaaaaacttggaataacctttatctttgtgactcatgatcaagaagaggcacttaccatgtctgatactattgtagtattaaacaaaggtacggttcaacaaataggtacccctgaagatatatacaacgaacctaaaaataaattcgttgcaaattttataggtgtaagtaatattttaaatggagttatgctacacgattacaaggtaaaatttgatgatgaaacttttgattgcgtagatactggatttaatgaaaatgaagatgttgatgttgttgtaagacctgaagatataaaaattgtgtccaaagaaaatggaaaactctttggaaaagttatttctgctgtttttagaggtgttcattatgaaatcaaggttgaagtaaaaaatactacgtggataatccataatacaaagcatgtaagagttggagatagtattggcttagatattcttcctgatgatatacatattatgagaaaggaaaaaatagatgaagaagcatag

SEQ ID NO: 65765 - protein, 352 aa, Clostridium acetobutylicum ATCC 824
MEKDILIELKNVSKKYGENYVIKNLNLFVRRNEFLTFLGPSGCGKTTTLNMIAGFETPDEGNIIFEDSSINIVPPHKRQINTVFQKYALFSHMNVYENVAFGLRIKKLPEKQIREEVEKMLSLVDLKGFEKRSTDSLSGGQQQRVAIARALVNKPKLLLLDEPLGALDLKLRKEMQLELKNIQQKLGITFIFVTHDQEEALTMSDTIVVLNKGTVQQIGTPEDIYNEPKNKFVANFIGVSNILNGVMLHDYKVKFDDETFDCVDTGFNENEDVDVVVRPEDIKIVSKENGKLFGKVISAVFRGVHYEIKVEVKNTTWIIHNTKHVRVGDSIGLDILPDDIHIMRKEKIDEEA

SEQ ID NO: 65766 - DNA, 1041 bp, Agrobacterium tumefaciens str. C58
  CDS (1)..(1041): transl_table=11
atgagtgaactcgagatcagcaatatcagcaaggattacggggcgagccgggcgcttcatccggtatcgatcaccgtggagcggggcgagttcgtcaccattcttggtccctccggttgcggcaagtcgacgcttttgcgcatcctcaccggcatcagccagccttcgggcggcgaaatccggctgggcggcaagcgtattgatcaggcgcagccggaagcgcgcgatatcgccatggtattccagtcctatgcgcttttcccgcatatgtcggtcgcgaaaaaccttggcttcggtctgaagatgaagaaggtcgcgaaggacgagcgtgcccgccgcatcgcccatgcgctggaaatttgcaatctcaccgggctagtggatcgcatgcctcggcaattgtccggtgggcagcagcagcgtgtggcgctggcgcgcgccatcgtcatgcagccgagcctgcttctcttcgacgagccgctctccaacctcgacgccaagctccgcgacacactgcgccatgagttgaccgaactgcaccgccgtatcggcgccaccagcctttatgtgacgcatgatcaggccgaggcgatggcgatgtcggaccggatcgtcgtcatgaatgccggccgggtggtcgagatcggcacgccgcttgagctttaccgcgcaccgaaacacgcctttaccgccggctttctcggccagaccaatcttctgccggtctccgctgagggccagcaggcgcaattgccctggggccagtccgtgacattggatcaggctgctgccggcaatgtgcagatttccgctcgcccggaaaacatccacatctgcgccgatcaggccggtgacggcacggtttccgccgtttccttcatgggtgcgaatgcgctttacaccgtcgagatcggcggtcgccagatccgggtcagccagtccggcgcggaaacgctgatcgatgccggacagagggtcgcgctgcagtttcccggctcagtccatcttcttgatgacagtgtggcgggggaggcggcatga

SEQ ID NO: 65767 - protein, 346 aa, Agrobacterium tumefaciens str. C58
MSELEISNISKDYGASRALHPVSITVERGEFVTILGPSGCGKSTLLRILTGISQPSGGEIRLGGKRIDQAQPEARDIAMVFQSYALFPHMSVAKNLGFGLKMKKVAKDERARRIAHALEICNLTGLVDRMPRQLSGGQQQRVALARAIVMQPSLLLFDEPLSNLDAKLRDTLRHELTELHRRIGATSLYVTHDQAEAMAMSDRIVVMNAGRVVEIGTPLELYRAPKHAFTAGFLGQTNLLPVSAEGQQAQLPWGQSVTLDQAAAGNVQISARPENIHICADQAGDGTVSAVSFMGANALYTVEIGGRQIRVSQSGAETLIDAGQRVALQFPGSVHLLDDSVAGEAA

SEQ ID NO: 65768 - DNA, 1083 bp, Agrobacterium tumefaciens str. C58
  CDS (1)..(1083): transl_table=11
atgaccaaaccgctcctgcaaattcgcggaatccgcaagcaatacggaccgttggtcgccgttcaggatgtcaatctcgacgttcagccgggcgagttcatgaccttcctcggtccttccggttccggcaagagcaccactctttatatccttgccggtttcgaacagccgacctcgggggatatcctgctgaacggcgagagcctgctgtcgactccatcgcacaagcgcaatatcggcatggtcttccagcgttacaccctgtttccgcatctgtcggtcggcgaaaacatcgcctttccgctgaaagttcgccgcaggagcaaggcggacatcgatgccaaggtgaaggagatgctgcggctcgtccgcctcgaaggtttcgaggacaggaagcccgcgcagatgtccggcggtcagcagcagcgcgtggcgctggcgcgtgcgcttgcttatgatccgccggtacttttgatggatgagccgctgtcggcgctcgacaagaagctgcgcgaggaaatccaattcgaaatccgtcgcatccaccagcagacggaagtgacgatcctttacgtcacccatgatcaggaagaagccttgcgtctttctgaccggatcgccgtgttttccaagggggtgatcgatcagatcggcacggggcccgagctttatgctcatcctactacccgtttcgtggctgaattcattggtgacagcgatttcatcgcctgcgatctgatcgcggcatcgggcggcaaggcgacggtgtcgcttggccgggatatcatcttcgatcatattcccatgcatggcgaggccgcgccgggcaagaaagcggcactgatgctgcgtccggaacgcctgcagctcagccgcaacagaccggttgcttccgccggttttcaggccacggtcagcgacatcaccttccttggcaacaatgtccatgtggttgctcataccggttcgggcgaaccgcttgccgtgcggctgccctttggccacgaggcgatttccggtctcaaccggggcgacctcgtgcacttggccttcgacccggcgtcagcccaggttttctgttga

SEQ ID NO: 65769 - protein, 360 aa, Agrobacterium tumefaciens str. C58
MTKPLLQIRGIRKQYGPLVAVQDVNLDVQPGEFMTFLGPSGSGKSTTLYILAGFEQPTSGDILLNGESLLSTPSHKRNIGMVFQRYTLFPHLSVGENIAFPLKVRRRSKADIDAKVKEMLRLVRLEGFEDRKPAQMSGGQQQRVALARALAYDPPVLLMDEPLSALDKKLREEIQFEIRRIHQQTEVTILYVTHDQEEALRLSDRIAVFSKGVIDQIGTGPELYAHPTTRFVAEFIGDSDFIACDLIAASGGKATVSLGRDIIFDHIPMHGEAAPGKKAALMLRPERLQLSRNRPVASAGFQATVSDITFLGNNVHVVAHTGSGEPLAVRLPFGHEAISGLNRGDLVHLAFDPASAQVFC

SEQ ID NO: 65770 - DNA, 1092 bp, Streptococcus pneumoniae R6
  CDS (1)..(1092): transl_table=11
atgagtgagatcgaaattattaacgccaaaaaaatctaccacgatgtccctgttattgagaatttgaacattacaattccaaaaggaagtctctttacccttcttggagcttcaggatgtgggaaaacgacccttcttcgtatgattgcaggtttcaacagtatcaaagatggagaattttacttcgatgatacaaaaatcaataatatggaacccagcaaacgcaatatcgggctggttttccaaaactacgctattttcccacatttgactgtccgagacaacgttgcttttggtcttatgcaaaagaaggttccaaaagaagaattgattcaacagaccaacaagtatcttgaactcatgcaaattgctcaatatgcggatcgaaagcccgataaactcagtggtggacaacaacaacgtgtcaccttggcatgcgccttagcggttaatccaagtgttctcctcatggacgagccacttagtaatctggaggccaaacttcgcttggatatgcgtcaaaccatccgagaaatccaacacgaagtgggaattacaactgtttatgtaacccacgaccaagaagaagccatggctatttcagaccaaattgctgttatgaaagatggggtgatccaacaaatcggccgaccaaaagaactctatcataaaccagctaatgagtttgtggcaacctttatcggacgcacaaatattatccctgccaatcttgaaaaacggagcgacggcgcttatatcgtcttttcagatggctatgcccttcgaatgccagctcttgatcaggttgaggagcaagctattcatgtaagcattcgtcccgaagagtttatcaaagatgaatctggagatatcgaaggaactattagagatagcgtctatcttggactaaatacggattatttcattgagacaggttttgcctcaaaaattcaagttagtgaagaatcaacttttgaagaagaactacaaaaaggcaatcgtattcgtctacgaatcaatacgcaaaaattaaacatcttttctgcagatggttcccaaaacctgataaaaggagtcaaccatggaacgtaa

SEQ ID NO: 65771 - protein, 363 aa, Streptococcus pneumoniae R6
MSEIEIINAKKIYHDVPVIENLNITIPKGSLFTLLGASGCGKTTLLRMIAGFNSIKDGEFYFDDTKINNMEPSKRNIGLVFQNYAIFPHLTVRDNVAFGLMQKKVPKEELIQQTNKYLELMQIAQYADRKPDKLSGGQQQRVTLACALAVNPSVLLMDEPLSNLEAKLRLDMRQTIREIQHEVGITTVYVTHDQEEAMAISDQIAVMKDGVIQQIGRPKELYHKPANEFVATFIGRTNIIPANLEKRSDGAYIVFSDGYALRMPALDQVEEQAIHVSIRPEEFIKDESGDIEGTIRDSVYLGLNTDYFIETGFASKIQVSEESTFEEELQKGNRIRLRINTQKLNIFSADGSQNLIKGVNHGT

SEQ ID NO: 65772 - DNA, 1146 bp, Sinorhizobium meliloti 1021
  CDS (1)..(1146): transl_table=11
atgatgaagtctctcggaagtatccggcgttctttcgcgccatgggcggaccccgcctccaagcctttcatttccgtcaagaacgtcaccaaaaagttcggtgacttcaccgccgtggacgatctttcgctgaacatctacacgcgcgaattcttcgcgctcctcggcgcttcgggctgcggcaaatccaccctcctgcggatgctggccggtttcgagcagccgacatcaggcgaaatcatcctcgacggccagagcctggcgggcatcccgccctaccgccgcccggtcaatatgatgttccagtcctatgcgctgtttccgcacatgacggtcgaaaacaacgtcgccttcggcctgaagcaggacggaatgccgaaagcggacatcgccgaacgcgtcgcgcagatgctgaagctcgtcaagctggagaagttcgccaagcgcaagccgcatcagctttccggcggccagcgccagcgcgtcgcccttgcccgttcgctggcaaagcggccgaaggtgctgctgctcgacgagccgctcggcgcgctcgacaagaagctgcgcgaggaaacgcaattcgagctcatggacctgcagcaggaactcggcctcaccttcgtcgtcgtcacccacgaccaggaagaggcgatgaccatggcggaccgcatcgccgtcatgagccacggcaaggtcgtccaggtggcgacgccggcggagatctacgaagcgccgaattcgcgcttcgtcgctgacttcatcggcgacgtgaacatattcgacggtaaggtgacctcggctgaagacggctatatccgtgtcgagacgacgggcggcatcccggtccggatggcgtcgccggaaaaaccggggaacggcgcaaaggcggctgtcgccatccggcccgagaagatcagaatcggccgacagccgccggcgcatgcgccggtgaacgccgccgaaggcgagatatgggacatcggctacctcggcgacatgacggtttttcacatccggctgaaggacggcaaggtcgtcaaggcgtcatcgctgaatgcggtgcgggcggtcgaggacccgctcggctacgaccagcaggtctggatctccttcggcgacgacgcgggcgtcgtattgaaggattga

SEQ ID NO: 65773 - protein, 381 aa, Sinorhizobium meliloti 1021
MMKSLGSIRRSFAPWADPASKPFISVKNVTKKFGDFTAVDDLSLNIYTREFFALLGASGCGKSTLLRMLAGFEQPTSGEIILDGQSLAGIPPYRRPVNMMFQSYALFPHMTVENNVAFGLKQDGMPKADIAERVAQMLKLVKLEKFAKRKPHQLSGGQRQRVALARSLAKRPKVLLLDEPLGALDKKLREETQFELMDLQQELGLTFVVVTHDQEEAMTMADRIAVMSHGKVVQVATPAEIYEAPNSRFVADFIGDVNIFDGKVTSAEDGYIRVETTGGIPVRMASPEKPGNGAKAAVAIRPEKIRIGRQPPAHAPVNAAEGEIWDIGYLGDMTVFHIRLKDGKVVKASSLNAVRAVEDPLGYDQQVWISFGDDAGVVLKD

SEQ ID NO: 65774 - DNA, 1062 bp, Sinorhizobium meliloti 1021
  CDS (1)..(1062): transl_table=11
atggcattcctgcaattgaccaatattcagaaatccttcggcccggttcaggtcgtgcataatttcgacatggggatcgacaagggcgagttcgtctcctttctcggcccctccggctgcggcaagacgaccatcctgcgcatgattgccggcttcgagaccccgtccggcggctcgatcttcatcgacggcaaggaccagggtgcgctgaagccgaaccagcgcaatatcggcatggtgttccaggcctatgcgctctttcccaacatgaatgtccacgacaatgtcgccttcggcctcaaggtcgccggcgcctccagaacggagatcgaggcacgggttaagcagatgctcggactgatcaagctagagcatctggcggaccgcttcccctatcaattgtccggcggacagcagcagcgcgtggcgcttgcccgcgccctcgccgtcaagccgcaggtgctgctcctcgacgagccgctctccgcgctcgatgcaaagatccgcatctcgctgcgggaggagatccgccagatccagcagcagctcggcatcaccacggtattcgtgacgcacgaccaggaggaggcactgtcgatctccgaccggatcgtcgtcatgaattccggccgcgccgatcagatcggcacccctttcgagatctacaacaccccggcgacacgcttcgtcgcctccttcgtcggcacgctcaacatcatcgagggcaaggtggccgatcccgcaagcggcgcagtcaccatcggcgggcagcgcatctcactgaaagagccgattgccggggcaaaaggcggcgacagcatctcgctggcgctcaggccggaagcaggctcgatcgccgagggcgccaggggcgataccgcacttccgggcgaagtggtatcgaggagctttctcggctccgtcatccgcaccaagctgcgggtcggcaaagacatcatctccttcgatatgttcaacgatccgggcatgaccccaccggtcgccggcgagagcgtcacgctgcgtttcgcggcaaaggacctgctcgtcatccgcgaatag

SEQ ID NO: 65775 - protein, 353 aa, Sinorhizobium meliloti 1021
MAFLQLTNIQKSFGPVQVVHNFDMGIDKGEFVSFLGPSGCGKTTILRMIAGFETPSGGSIFIDGKDQGALKPNQRNIGMVFQAYALFPNMNVHDNVAFGLKVAGASRTEIEARVKQMLGLIKLEHLADRFPYQLSGGQQQRVALARALAVKPQVLLLDEPLSALDAKIRISLREEIRQIQQQLGITTVFVTHDQEEALSISDRIVVMNSGRADQIGTPFEIYNTPATRFVASFVGTLNIIEGKVADPASGAVTIGGQRISLKEPIAGAKGGDSISLALRPEAGSIAEGARGDTALPGEVVSRSFLGSVIRTKLRVGKDIISFDMFNDPGMTPPVAGESVTLRFAAKDLLVIRE

SEQ ID NO: 65776 - DNA, 1080 bp, Sinorhizobium meliloti 1021
  CDS (1)..(1080): transl_table=11
gtgacatccgcttcgacgaacgacatcgaattccgttcggtcgccaaacgctatggcagcgtgacggcggtatcggacatcaacctgacggtgccgaagggcgccttcgttgcgctgctcggcccatccggctgcggcaagaccacatgcctgcgcatgatcggcggcttcgagcagccgagcgaaggcatggtctatatcggcggccagccgatgaacggcgtgcctgcctatcgccggccggtcaacatggtgttccagcaatatgcgcttttcccgcatctcgatgtcgagcagaacgtcgcctacggcttgaagcagacgcgtccccgtatcccggcggccgagatcacccggcgcgcccaggaggcgctggagatggtccgactcggcggcttcggcaagcgccgcatccacgaaatgtccggcggacaacagcagcgcgtggcgctcgcccgtgccatcgtcaacaagccgaaggtgctgctcctcgacgagccgctcgcagcgctcgacaagaagctgcgcaccgccatgcagatcgagctgcagagcctgcagcgcgagctcggcatcaccttcgtgctcgtcacgcacgatcaggaagaggcgctctctatgagcgacttcgtctgcgtcatgagcactggccgcatcgtgcagatcgggccgccgcaggagatctacgaccgcccggcaagcctcttcgtcgccgacttcgtcggcaagaccaaccgcatcgccgggacgatcgaacccggcgccggcgcggtcctcctcgccaatggcgtcggacttgccaagcccgcccgcgccaacggcacggcaggcccggtcatggtggcgctgcgcccggaggcgataagcctggtgcgcgacggcagcgctgcgctgcggggcacggtgacccaccgcatcttcctgggctcgtccgtcgaatattcggtcgaggtcgagggcctcggcgattttctcgttaccgccgaccgccgcagcctgaacgacagcgatctcgccgaacccggtgaaaggatcgggctcagcttcgacccgaatgcaatgcatgtctttccggcctga

SEQ ID NO: 65777 - protein, 359 aa, Sinorhizobium meliloti 1021
MTSASTNDIEFRSVAKRYGSVTAVSDINLTVPKGAFVALLGPSGCGKTTCLRMIGGFEQPSEGMVYIGGQPMNGVPAYRRPVNMVFQQYALFPHLDVEQNVAYGLKQTRPRIPAAEITRRAQEALEMVRLGGFGKRRIHEMSGGQQQRVALARAIVNKPKVLLLDEPLAALDKKLRTAMQIELQSLQRELGITFVLVTHDQEEALSMSDFVCVMSTGRIVQIGPPQEIYDRPASLFVADFVGKTNRIAGTIEPGAGAVLLANGVGLAKPARANGTAGPVMVALRPEAISLVRDGSAALRGTVTHRIFLGSSVEYSVEVEGLGDFLVTADRRSLNDSDLAEPGERIGLSFDPNAMHVFPA

SEQ ID NO: 65778 - DNA, 1041 bp, Sinorhizobium meliloti 1021
  CDS (1)..(1041): transl_table=11
atgaggggccgaaatctcgccgaaatctcctggagtatcgcaatgaacgccgccgtcctcttcgacaatgtttcccgctatttcggcgccgtgcgtgccgtcgatcgcgtgaacctcgagatcgccgagggcgagttcttcgcgatgctcggtccatcgggctcgggcaagaccacctgcctgaggctgatggcaggcttcgagcagccgaccggaggccacatcgagatcttcggcgagaccgccgaaggcgtgccgccctaccggcgcagcgtcaacaccgtctttcaggactacgccctcttcccgcatctctccattctcgacaacgtcgcctatggcctgatggtcaagggcgtcggacgcgaggagcgccgcagggcggccgaggatgcgctcgccatggtgaagcttccgggctacggcacgcgccggcccggacagctttccggcggccagcgccagcgcgtggcgctcgcccgcgcgctcgtcaacaagccgaaggttctgcttctcgacgagccgttgggcgcgctcgatctgaagctgcgcgaacagatgcaggaggaattgaaaacgctgcagaagtcgttgggcatcaccttcgtcttcgtcacccatgatcagggcgaagcgctctcgatggccgacaggatcgccgttttcaacgagggccgtatccagcaactgggaagcccggaggaggtctacaaccgtccgcagacccgtttcgtcgccgatttcgtcggctcctccaacgtgctttccgaggacctctgccgccgactggggctgaaggcttccttcgcgagcctgcgcccggaggctgtggccattgcgccgccgagcgacggagcgctgagcctttccggcactgtcgcttcgcagagcttcctcggcgccaccaaccgaatcctgatcgacgtcgagggtgcccgcatcgccgtggcgagcccggcggcgcgtggcgttccagcggtcggcagtccggtcacgatcagcttcgccgcgcacgacctccacccgatggaggacgcatga

SEQ ID NO: 65779 - protein, 346 aa, Sinorhizobium meliloti 1021
MRGRNLAEISWSIAMNAAVLFDNVSRYFGAVRAVDRVNLEIAEGEFFAMLGPSGSGKTTCLRLMAGFEQPTGGHIEIFGETAEGVPPYRRSVNTVFQDYALFPHLSILDNVAYGLMVKGVGREERRRAAEDALAMVKLPGYGTRRPGQLSGGQRQRVALARALVNKPKVLLLDEPLGALDLKLREQMQEELKTLQKSLGITFVFVTHDQGEALSMADRIAVFNEGRIQQLGSPEEVYNRPQTRFVADFVGSSNVLSEDLCRRLGLKASFASLRPEAVAIAPPSDGALSLSGTVASQSFLGATNRILIDVEGARIAVASPAARGVPAVGSPVTISFAAHDLHPMEDA

SEQ ID NO: 65780 - DNA, 1038 bp, Sinorhizobium meliloti 1021
  CDS (1)..(1038): transl_table=11
atgtcgggacttgcccttcaaaacgtcgtcaaggaattcgggtcgttcagggccgtcaacgatgtcgacctgacggtgccgcacggcaccttcgtctgcatgctcgggccgtcgggctgcggcaagaccacgctcctgcgcatgatcgcgggtctggacctgccgacctcgggttccatagggctcgacggcgaggacatcacccgggttccgacgcataagcgcaatctcggcatggtgttccagtcgctggcgctgttcccccacctgaccgtcggcgagaatatcgcctatccgctgcgcatccgcggcgcgccgaaggaagaccagaagaaacgggtcgacgagctgctttcgatgatccacctgtcgggctatgccgaccggccggtctcgaagctctccggcggccagcgccagcgcgtggcgatagcccgggcgctggcgatctcgccgaagctcttcctgctcgacgaacccctgtcggcgctcgatgccaagctgcgcgaggcgatgcaggtcgagctcaggcagttgcagcagaagctcggcatcaccaccatcgtcgtcacccacgaccagcgcgaggcgatgaccatggccgatacggtcgtggtcatgaacggcggcgagatccggcaggctgcctcgccgatcgagatctaccgccggccggccgacagcttcgtcgccgacttcatcggacagacgaatctgatcgaagcggaggcggacacttcgggtcgcgtgacggtgctcggtcagccggtgccgggcctgcagttgccgccgggtgcggcgaaggcgatgctttcgatccgcccggaagacgtgcacctgaccgcgccgggtgccggagcgctttccggcacggtgaccttcgtgcgcgatctcgggggcacgatcgagacattcgtcgatgtcgccggccggcagatcgtagcggtctcgacgccgcgcgcccggccgcaggtgacggtcggccaacaggtcggcgtcgctctcacacccgatgtctgtgtggtgctcgccagatga

SEQ ID NO: 65781 - protein, 345 aa, Sinorhizobium meliloti 1021
MSGLALQNVVKEFGSFRAVNDVDLTVPHGTFVCMLGPSGCGKTTLLRMIAGLDLPTSGSIGLDGEDITRVPTHKRNLGMVFQSLALFPHLTVGENIAYPLRIRGAPKEDQKKRVDELLSMIHLSGYADRPVSKLSGGQRQRVAIARALAISPKLFLLDEPLSALDAKLREAMQVELRQLQQKLGITTIVVTHDQREAMTMADTVVVMNGGEIRQAASPIEIYRRPADSFVADFIGQTNLIEAEADTSGRVTVLGQPVPGLQLPPGAAKAMLSIRPEDVHLTAPGAGALSGTVTFVRDLGGTIETFVDVAGRQIVAVSTPRARPQVTVGQQVGVALTPDVCVVLAR

SEQ ID NO: 65782 - DNA, 1179 bp, Agrobacterium tumefaciens str. C58
  CDS (1)..(1179): transl_table=11
ttgaaagccgctccgagcactcgttttcacgttcgtcgcggcaataaaaaacggaggggtgaggtattgataggtgagactctaaatcttgacgggctcgcgaagagctatggcaacgtcgttgcagtcgctggtgttgacgtccgcgtggagccaggcgagttcgtgtcagtgctgggcccatctgggtcaggcaagaccagcgtcctgacgatgattgccggttttgagcgtcccacggcaggcaggatcgtgatcggcgaccgagacgtgaccgaccttgcgccgaataagcgaaatatcgggatggtctttcagaaatacgcgcttttcccccatctcactgtccgtcagaacattgctttcccgctaaagctcagatcgcggtggcgctccggatggaggcagcgggcagacgacatgcttgacctcgttcacctagccggttttgctgacaggtttccttctgaactttcgggtggccagcagcagcgtgtggcggtcgcacgagcgcttgcgtttgagccgcccgttatgctgatggacgagcccctcggcgcgcttgacaagaaattgcgtgaagccatgcagttcgaaatcaagcgcatccagagacaggtgggagcaaccgtcctttacgtaacgcatgatcaggaagaagcgctgacgatgtccgatcgcgttgcgataatgcagggcggaaacatcgtccagataggggctccttctagtctttaccacgcgcccgcaacccgttttgttgctgatttcgtcggaaaaatgagcttcgtcggaggagagattgtttcttttgaagacgacgggatgctcgtgcgattggcggacgacgtatttgtccggaccgcttctgtcgatgcggcacgggcggcactccggcttggtgacgaggtaatcctggccatgcgtcccgagaggatcgccttgaaaaaacgaggtcctcgaggttttggggcaataccagctcagatcgagagccttgcattcgttggatcattccatgcgtacatggtccgtctggacctgcctggatcaccgctggtggaggttcaggtcgtgaccggaagtgaggtaaatttccgcgccggtgatacggtcgatctcgtacccgacccgcaggctgtcagctttttttcaaaagaggagacgtctgcggcatga

SEQ ID NO: 65783 - protein, 392 aa, Agrobacterium tumefaciens str. C58
MKAAPSTRFHVRRGNKKRRGEVLIGETLNLDGLAKSYGNVVAVAGVDVRVEPGEFVSVLGPSGSGKTSVLTMIAGFERPTAGRIVIGDRDVTDLAPNKRNIGMVFQKYALFPHLTVRQNIAFPLKLRSRWRSGWRQRADDMLDLVHLAGFADRFPSELSGGQQQRVAVARALAFEPPVMLMDEPLGALDKKLREAMQFEIKRIQRQVGATVLYVTHDQEEALTMSDRVAIMQGGNIVQIGAPSSLYHAPATRFVADFVGKMSFVGGEIVSFEDDGMLVRLADDVFVRTASVDAARAALRLGDEVILAMRPERIALKKRGPRGFGAIPAQIESLAFVGSFHAYMVRLDLPGSPLVEVQVVTGSEVNFRAGDTVDLVPDPQAVSFFSKEETSAA

SEQ ID NO: 65784 - DNA, 1272 bp, Agrobacterium tumefaciens str. C58
  CDS (1)..(1272): transl_table=11
ttgcaacatagcactgaaagcgtggttggcacgcggcttgcctctgctgtttccatgacccaaagcgaacccaaaattgttgatcgaaaacatttccccctgataccgacgagcaccgtgccctcggctgttcaggcgcaaccgaaggggacattcatgtcgcagacctcgaatgcagcagaaggcaagcagcttagcgttcgtggcctgacccatagctatggcggactgaatgcgatcagcgacatttctttcgagatagccgccggtgagatcgtcgcgctcctcggaccgagcggctgcggaaaatccaccgtgttgcgcgccatcgcaggcctgatccaaccgaaaagcggtgtgatccagctcggaggcgaagacatcgccaatgtttcggcgcgtgcgcgcggtatcggcatggttttccagaactatgcgctgtttccacacctgacggtcgccgagaacatcgcctatccgctggcatgccagaaagtgggacgcaccgagcgccgcgagcggattgaggaaatgctctcgctcgtgcagttgaagggatttggccatcggctgccgcgtgagctttccggtggccagcagcaacgcgtggcagtggcccgcgcgattgccggaaggccttcacttctgcttctcgacgaaccgttcggtgccttggaccgggcgctccgtttcgacctgcaggtcgagcttctccatctgcagaagacgcttggcatcacgacgttgatcgtgacgcatgaccaggaggaggcgcagagcctagctggccgtctggtgctcatgaacaagggcaatgtcgagcaaattgatacaccgatggccgtttatgaccgaccgaggtctctcttcgtcaataccttcatcggtcaggccaatgtgttgcatggaacggtggaccgggtggaggcggaggcaaccaccatctccctcgcgaatggcagggtcctcgttctgccgcgccgcctgaatttcacgacgggctccaagatcacgatcacctgccgccccgaagatgtgcgtctgtctgcggcaccgggcgcaccggccctgccggcacggctgaccgtgtcagtgccgcttggtcccacccttgtccatgatctccttctcgaagacgggacaaaccttcgctcctcggaggtccgcggaccttcgaccttcattcccgagccgggagcagagctctttgccgagatagacaccatcaggtgtcacgcctttccgagcgaaccggaagcatcccgtgaataa

SEQ ID NO: 65785 - protein, 423 aa, Agrobacterium tumefaciens str. C58
MQHSTESVVGTRLASAVSMTQSEPKIVDRKHFPLIPTSTVPSAVQAQPKGTFMSQTSNAAEGKQLSVRGLTHSYGGLNAISDISFEIAAGEIVALLGPSGCGKSTVLRAIAGLIQPKSGVIQLGGEDIANVSARARGIGMVFQNYALFPHLTVAENIAYPLACQKVGRTERRERIEEMLSLVQLKGFGHRLPRELSGGQQQRVAVARAIAGRPSLLLLDEPFGALDRALRFDLQVELLHLQKTLGITTLIVTHDQEEAQSLAGRLVLMNKGNVEQIDTPMAVYDRPRSLFVNTFIGQANVLHGTVDRVEAEATTISLANGRVLVLPRRLNFTTGSKITITCRPEDVRLSAAPGAPALPARLTVSVPLGPTLVHDLLLEDGTNLRSSEVRGPSTFIPEPGAELFAEIDTIRCHAFPSEPEASRE

SEQ ID NO: 65786 - DNA, 1071 bp, Agrobacterium tumefaciens str. C58
  CDS (1)..(1071): transl_table=11
atgcagccggttgttcattttaaaaacgtcaacaagtcttacggcgcttcccttgctgtcgacgatctagacctggaggtcgcgccgggccaattcgttaccctgcttggcccctccggttgcggcaaatccacgacactgagaatgttgggcgggttcgaaacgccgtcctccggcgagatttaccttgacgggcagccgatctcgcatctgccgcccaacaggcgaaacgtcaatatcgtctttcaggactatgccctgtttccgcacctgtcagtccagcgcaacattgctttcggacttgaactgaaggggctggattcggcgtccatccaccgccgggtcatggaactcctcggtctcgtcaagctgcaggattttgccggacgcatgcctgaacaattgtcgggtggtcagcgccagcgcgtcgccctcatgcgggcactggcgccggacccgaatgtcttgttgctcgacgagccgctatcggcactcgacgccaagctgcgtcatgagatgcagatcgagttgaagtcgatccagcagacgaccggcaaaaccttcatcttcgtcacccatgaccaggaagaggcgctgaccatgtctgacgtcgtggtggtgatgaacaaggggcggatcgagcagatgggagcgcctgatgatctctatgcacgcccccgcagccgcttcgtcgccgactttattggtcagagcaactttctcgatggccgtttggtgtctgccgagagcggggtcgctacggtcgactggcagggtagtttgatccgggcggatcttaacggccaccatcacgccattggcagccacgtcacgattgcgctgcgtccggaggctctgttctgtctgcccgagcagccgagtgatcgttttgccctcaagggccagatcgagcggcgcgtgttcaagggcgcacataccacgttgacgatccgcctcgataacggcgcactcctgtcggcccagctcgatccggtggcgctctcgcatcttgatggcgagacggtctggatgggttggcgcgatcgcgacgccgttgtcctggccgattaa

SEQ ID NO: 65787 - protein, 356 aa, Agrobacterium tumefaciens str. C58
MQPVVHFKNVNKSYGASLAVDDLDLEVAPGQFVTLLGPSGCGKSTTLRMLGGFETPSSGEIYLDGQPISHLPPNRRNVNIVFQDYALFPHLSVQRNIAFGLELKGLDSASIHRRVMELLGLVKLQDFAGRMPEQLSGGQRQRVALMRALAPDPNVLLLDEPLSALDAKLRHEMQIELKSIQQTTGKTFIFVTHDQEEALTMSDVVVVMNKGRIEQMGAPDDLYARPRSRFVADFIGQSNFLDGRLVSAESGVATVDWQGSLIRADLNGHHHAIGSHVTIALRPEALFCLPEQPSDRFALKGQIERRVFKGAHTTLTIRLDNGALLSAQLDPVALSHLDGETVWMGWRDRDAVVLAD

SEQ ID NO: 65788 - DNA, 1086 bp, Yersinia pestis CO92
  CDS (1)..(1086): transl_table=11
atgagaacctatgtcagcttcaaaaatatcaagaagagctacgatggcgacaagttggtcgttaaaaacctgaatctggacattcatgagggggattttttaaccctgctcggtccttctggttcaggtaaaaccaccagcctaatgatgctagccgggtttgaaacccccactcaaggcgagattacgctgcgtgataaacccctgcataacctgccccctcaccaacgggggatcggtatggttttccaaaattatgccctcttcccacatatgaccgtaactgaaaatctggcctttccactcacgatccgccgattgaataaggctgatatcaaagagaaaattgaccgtatattggatatggtgaagttgaagaatttggctgaccgctatcccgcgcagatgtctggtgggcagcagcaacgggttgcattggcacgtgccttggtatttgagcccaaactggtgctgatggatgaaccactcggggcgctggataagcagttacgtgagcatatgcaattggaaatcaaacagttacataaaatgcttgaattgaccattgtctacgtcacccatgaccaaagcgaagcaatgactctgtcaaatcgggtggtggtatttaacgatggtattattcagcaaatggatagcccaagcgtgatttatgaacagccaagcaatacttttgtggcgcaatttattggtgaaaacaactgcttactggccgttaatcagggcagtgacggggaatattaccgtgccatgttggacgatggcacccgcctgcaagcattaaaagtgtgccccagctcaccgggtaaaaaaattatgttatgtattcggccggagcgcgtcagtgtgaatcatcctgcggcgggcagccagcagatcaaggcccgcattcagcaatttatttatctgggggatcatgtgcggatgatgacggaagttgcaggccaagggaatttcatggtgaaactctctgccgcgcatatcgaaccacactggcagccgggaagtgaggtgttgctgtcgtggatgcctgcgcatttaagggcactggagggggtgacacactga

SEQ ID NO: 65789 - protein, 361 aa, Yersinia pestis CO92
MRTYVSFKNIKKSYDGDKLVVKNLNLDIHEGDFLTLLGPSGSGKTTSLMMLAGFETPTQGEITLRDKPLHNLPPHQRGIGMVFQNYALFPHMTVTENLAFPLTIRRLNKADIKEKIDRILDMVKLKNLADRYPAQMSGGQQQRVALARALVFEPKLVLMDEPLGALDKQLREHMQLEIKQLHKMLELTIVYVTHDQSEAMTLSNRVVVFNDGIIQQMDSPSVIYEQPSNTFVAQFIGENNCLLAVNQGSDGEYYRAMLDDGTRLQALKVCPSSPGKKIMLCIRPERVSVNHPAAGSQQIKARIQQFIYLGDHVRMMTEVAGQGNFMVKLSAAHIEPHWQPGSEVLLSWMPAHLRALEGVTH

SEQ ID NO: 65790 - DNA, 1146 bp, Caulobacter crescentus CB15
  CDS (1)..(1146): transl_table=11
gtgtgtcgggggatatccgcaatgaccacgccgaaacccatcatcaccttcgagaacgtcaccaagcgcttcggcaagctggcggccgtcgacaacgtgtcgctgacggtcaacgagggcgagttctttgcgctcttgggaccgtcgggctgcggcaagaccaccctgctgcggatgctggccggcttcgagacgcccaccgaagggcgcatcctgatcgacggccaggacatctccaacgtgccgcccaacaagcggccggtgaacatggtgttccagtcctatgcggtgttcccgcacatgactgtcgccgacaacgtcgcctacggcctgaaggtcgacaacgtgcccaaggccgagcgcgaggcgcgtgtcgccgaggcgctggagttggtgcaactgggcggcctgggcgggcgcaagcctgaccagctgtcgggcggtcaaaggcaacgggtcgcgcttgcccgagccctggtcaagcgcccccgcgtactgctgctggacgagccgctgtcggccctggacgccaagctgcgcgagcagatgcgcaccgagctgtgcaccctgcaggaaaaggtcgggatcaccttcatcatggtcacccacgaccaggacgaggccctggccctggcctcgcgctgcgcggtgatgagcaaggggctcctgcagcaggtggctacgcccagcgacctctatgagttccccaacagccgcttcgtcgccgacttcatcggccaggtgaacctgttcgagggcgtgctggcggtcgacgagcccagccacgcggtgatcaagtcgcccgacctcccggtcgacatcttcctggatcacggggtcaccgggccgcgtggcggcacggtgtgggcggcgatccgtcccgagaagatcgagctgcacaagaaggccgacgacaccccgcccaacctcggcgacgcgcccaaggggaccaacgccgtagagggcgtgatcaagcacgaggcctatctgggcggctcatccacctatgaggtcgagatcgccggcggtcgccgcgtcaaggtccagcgttcgaacctgacgcgctgggaccaggaagacttcaagctgggcgagaccgtctggctgtgctggcacgcctgttcacccgctgtgttgttgagctga

SEQ ID NO: 65791 - protein, 381 aa, Caulobacter crescentus CB15
MCRGISAMTTPKPIITFENVTKRFGKLAAVDNVSLTVNEGEFFALLGPSGCGKTTLLRMLAGFETPTEGRILIDGQDISNVPPNKRPVNMVFQSYAVFPHMTVADNVAYGLKVDNVPKAEREARVAEALELVQLGGLGGRKPDQLSGGQRQRVALARALVKRPRVLLLDEPLSALDAKLREQMRTELCTLQEKVGITFIMVTHDQDEALALASRCAVMSKGLLQQVATPSDLYEFPNSRFVADFIGQVNLFEGVLAVDEPSHAVIKSPDLPVDIFLDHGVTGPRGGTVWAAIRPEKIELHKKADDTPPNLGDAPKGTNAVEGVIKHEAYLGGSSTYEVEIAGGRRVKVQRSNLTRWDQEDFKLGETVWLCWHACSPAVLLS

SEQ ID NO: 65792 - DNA, 1080 bp, Sinorhizobium meliloti 1021
  CDS (1)..(1080): transl_table=11
atgaatagacccttcctgcagatccgcggcatccgcaaggagtatggcccggtgacggccgtgcaagatgttactctcgatgttgcacagggggaattcctgacctttcttggcccttcgggatccggaaaaagcacgacgctttacatcctggccggctttgagaacccgacgcgcggcgacatcttgctaaatggcgaaacgctgctggcgacgccttcgcacaaacgcaatatcggcatggtgttccagcgctacacgctgtttccgcatctttccgtcggcgagaatatcgcctttccgctaaaggtcaggcgtcttccgaaggcggagatcgacgccaaggtgcgcgcgatgctgaagctcgtccggttggaaggctttgaggaccgtaagcccgctcagatgtccggcggccagcagcagcgtgtggccttggcccgcgcactcgcctatgacccgccagtgctgctgatggatgagccgctttctgccctcgacaaaaagctgcgcgaggagatccagcacgaaatccgccggatccaccagcagacggaagtcacaatcctgtatgtcacgcatgaccaggaggaggcacttcgtctttccgatcgcatcgccgttttctcaaagggcgtgatcgatcagataggcacagggccggaactatacgccaacccggccactcggttcgtggccgagtttatcggcgacagcgattttcttccttgcgacgtggtctctacggtcaatggccgagccgagattgctgtgtgcggttccatgaccttttcgaacattccgcttcatgggactgcttctttggggagcaaagcggcgcttatgcttaggccggagcggctactgttgtcaaagacgaagtcagacatcgggttgccggtcacggtcagcgatatcaccttcctcggcaacaacgtccatgtggccacgaaaacccgcaaaggcaacgacctgtccgtccgccttcccttcggtcatgaagcgatctcgggactcaatcggggagatgccgtttggctcagattcgatgccgggtcggcgcacgttttcggtcagtga

SEQ ID NO: 65793 - protein, 359 aa, Sinorhizobium meliloti 1021
MNRPFLQIRGIRKEYGPVTAVQDVTLDVAQGEFLTFLGPSGSGKSTTLYILAGFENPTRGDILLNGETLLATPSHKRNIGMVFQRYTLFPHLSVGENIAFPLKVRRLPKAEIDAKVRAMLKLVRLEGFEDRKPAQMSGGQQQRVALARALAYDPPVLLMDEPLSALDKKLREEIQHEIRRIHQQTEVTILYVTHDQEEALRLSDRIAVFSKGVIDQIGTGPELYANPATRFVAEFIGDSDFLPCDVVSTVNGRAEIAVCGSMTFSNIPLHGTASLGSKAALMLRPERLLLSKTKSDIGLPVTVSDITFLGNNVHVATKTRKGNDLSVRLPFGHEAISGLNRGDAVWLRFDAGSAHVFGQ

SEQ ID NO: 65794 - DNA, 1119 bp, Sinorhizobium meliloti 1021
  CDS (1)..(1119): transl_table=11
ttgatcggtcaatctctgtcccttgcgggacttcaaaaacgatacggtgaggccctcgcggttcgcgagctgtcgctcgagatcgcagccggggaatttgtctcccttctggggccctccggctccggcaagacgacagccttgacgatgattgccggcttcgaaagcccaaatgccggcaagattgccatcggcggccgggacgtaacctttcttgcgcccaatcaccggaacatcggaatggtgttccagaagtacgcactctttccgcacctgacgatccgccagaacgtcgcattcccgctcaggatgcgcgggcgcatgcagaagaccgcgatcgcgcaacgcgtcgaggagatgctggatctggtgcaactctccagttacgcagagcgctatcccaaccagctctcgggcggtcaacagcaacgcgtcgccctcgcgcgggctctggcttttgaaccgcccgttctcctgatggacgaaccgcttggagcgctcgacaacaaattgcgagaggcgatgcagttcgagataaagcggctgcaggagcgacttggcgccacggtcgtctacgtgacccacgatcaggacgaagcgatgacgatgtcggatcgggtcgccatcatgtccaacggcggcctgatacaggtgggcacgccgacggagctctaccggcagccgaagaccgagttcgtcgcggacttcatcggccgaatgaattttctcgatggcgattgccttgactgtacggctgagcaaacggttgtccgtttctcggagagaaccgtgcttaggctccgtgctgcagcaaacgagcgagcgcgcaaatatgatgtcggaacggcgctgcgtgtggcaatccgtccggagcggatgcgccttgcgaagcgaggcgacggcggggcggacgcgctgccgggcgtcgtcgatgccgcggtgttcatcggttcgacatacatctttctcgtccgcctggccgatcgcccggaagtaagcctgcaggtgcaggtcgccgctgacggactgttgccattccaaagggacgacgaggtggacatcgtcctcgacggtgcagcaatgcacgtctttccagtggcagagaggtgcgccgcatga

SEQ ID NO: 65795 - protein, 372 aa, Sinorhizobium meliloti 1021
MIGQSLSLAGLQKRYGEALAVRELSLEIAAGEFVSLLGPSGSGKTTALTMIAGFESPNAGKIAIGGRDVTFLAPNHRNIGMVFQKYALFPHLTIRQNVAFPLRMRGRMQKTAIAQRVEEMLDLVQLSSYAERYPNQLSGGQQQRVALARALAFEPPVLLMDEPLGALDNKLREAMQFEIKRLQERLGATVVYVTHDQDEAMTMSDRVAIMSNGGLIQVGTPTELYRQPKTEFVADFIGRMNFLDGDCLDCTAEQTVVRFSERTVLRLRAAANERARKYDVGTALRVAIRPERMRLAKRGDGGADALPGVVDAAVFIGSTYIFLVRLADRPEVSLQVQVAADGLLPFQRDDEVDIVLDGAAMHVFPVAERCAA

SEQ ID NO: 65796 - DNA, 1080 bp, Sinorhizobium meliloti 1021
  CDS (1)..(1080): transl_table=11
atggagtcttccgtggccgaattcattcaatttgaccgcatcactaagttttacggccccctatgtgtggttgaaaacctcgttctcggtatcgggcagggcgagttcgtcagcctgctcggcccctccggctctggcaagacgacgctcctgatgatgctggcgggtttcgagcagccgacctccggcaatatcctgctggacgggacggcgatcaacgacgttccgacccacaagcgggacatgggcgtcgtctttcagagttatgccctgttcccgcatatgtcggtcggcgagaacgtcgccttcccgttgcagatgcgcggtttgggcaaagcggagattgccgagtgcgtggcgcgggcgctggacatggtgcaactgtcggccttcgcggaccgccggccctcacaactctccggtgggcagcaacagcgggtggcgctttcccgcgccctggtgttcgagccgcgcgtcgtgctgatggacgagccgctcggcgcgctcgacaagcagttgcgcgagcagatgcagttcgacatccgcgacctgcaccgccgccttggcctgacaatcgtcttcgtcacacatgaccagtcggaggcgctgaccatgtcggaccgcgtcgccgtcttcaacaggggcaaaatcgagcagatcggtacgccgcggcaggtctatgacgaaccggcgacgcgcttcgtcgcggaattcatcggcgagaccaatctggtcgaaggtgtcgtcgagaccgtgcaggggcaggaggcgatcgtgcgcctcccgtccggtgcgcacatcgtttcagccggttccggcagcttggtctctggccagtccgtttttctctccatccggccggagcgggtcgacctcagcgagacgcgcggcgacgctcgcaattgcctggaaacggaagtgaccgattccgtttaccaaggtgaccacctgcgcgtgcagttgcaaagcgccgcccatccgctgatcgccaagctcggtcgccggtcgcgcgaatttccgcctggcaccaaggtctatgcggccttttctgccaacgattgccgggtcatcgcaccatga

SEQ ID NO: 65797 - protein, 359 aa, Sinorhizobium meliloti 1021
MESSVAEFIQFDRITKFYGPLCVVENLVLGIGQGEFVSLLGPSGSGKTTLLMMLAGFEQPTSGNILLDGTAINDVPTHKRDMGVVFQSYALFPHMSVGENVAFPLQMRGLGKAEIAECVARALDMVQLSAFADRRPSQLSGGQQQRVALSRALVFEPRVVLMDEPLGALDKQLREQMQFDIRDLHRRLGLTIVFVTHDQSEALTMSDRVAVFNRGKIEQIGTPRQVYDEPATRFVAEFIGETNLVEGVVETVQGQEAIVRLPSGAHIVSAGSGSLVSGQSVFLSIRPERVDLSETRGDARNCLETEVTDSVYQGDHLRVQLQSAAHPLIAKLGRRSREFPPGTKVYAAFSANDCRVIAP

SEQ ID NO: 65798 - DNA, 1086 bp, Sinorhizobium meliloti 1021
  CDS (1)..(1086)
atgtccaatgattcaattcaggtcgagggaatcacaaagcgctatggcgcgatgacggccgtcgacaatgtatccttcgatgttggccagggggagttcgtgtcgctgctcggcccgagcggttgtggaaagaccacgacgctcaggatgatcgcgggcttcgtcgatccctccggcggcttactccgggtccgtggccgcgacgttacccacctaccgccggaaaagcgcgatctgggcttcgtcttccaaaattatgcactctggccccatatgacggtcgctgagaatgtcgctttcggcctgaaactgcgaaagaaaaatcggaacttcatccgcgacaaagtcgcggaagcgcttacgacaaccggcctctcggggtatgagaaccggctgccgcgccagctttcgggcgggcaacagcagcgcgtggcgctcgcccgcgcgctggcactggaaccgcaggttctactcatggacgagccgctctcgaatctcgaccgcgcgctccgcgtcaccatgcgccgggaactcaaggaactccaggcgcggatgaaaatgaccacactctacgtgacccacgaccaggaagaggcgctttcaatgtcgaaccgcgtggtgatcatgaacaaggggcaagtggaacaggttgcagcgccattcgagctttatgaaaatcctgcgaccggcttcgtggcagattttgtcggcattaccaatttcctcggaggcatcgtaacaagcgcggaaggcggaggagtcgaggtgaaactcggctcaggtcagatgttgcgcgcagttacgaaacaacccgtagctctggggaccaaggtgcgtgcactcattcgccccgaacgggtgacgctcaaaacgaccgccgctgacggcgacaacattttgacagggcaagtggtcctggccgaatatttcggcgcgctgctgcgctattcggtgcgcctcgacagcggtgatatcctgcgcgccgaagttcacaatttcgacagtttcatcgagagtggaagccgcgtctgggtttgcgtttcaccggaacatctgcgcctcattcccgacgagaggaatgcctga

SEQ ID NO: 65799 - protein, 361 aa, Sinorhizobium meliloti 1021
MSNDSIQVEGITKRYGAMTAVDNVSFDVGQGEFVSLLGPSGCGKTTTLRMIAGFVDPSGGLLRVRGRDVTHLPPEKRDLGFVFQNYALWPHMTVAENVAFGLKLRKKNRNFIRDKVAEALTTTGLSGYENRLPRQLSGGQQQRVALARALALEPQVLLMDEPLSNLDRALRVTMRRELKELQARMKMTTLYVTHDQEEALSMSNRVVIMNKGQVEQVAAPFELYENPATGFVADFVGITNFLGGIVTSAEGGGVEVKLGSGQMLRAVTKQPVALGTKVRALIRPERVTLKTTAADGDNILTGQVVLAEYFGALLRYSVRLDSGDILRAEVHNFDSFIESGSRVWVCVSPEHLRLIPDERNA

SEQ ID NO: 65800 - DNA, 1071 bp, Sinorhizobium meliloti 1021
  CDS (1)..(1071): transl_table=11
atgcagcctgtggtccacttcaaaaacgtcaacaaatattacggcggattgcctgcggtcgatgacctggacctcgccgtagaatccggacaattcgtgacgctgctcggcccctccggctgcggcaagtctacgacgctcaggatgctcggcggcttcgaacagccctcgtcgggggagatctatctggaaggcaagccgatcacccatctgccgccgaacagacgcaacgtcaacatcgtcttccaggactatgcgctctttccgcacctcaacgtcggccgcaacatcgccttcggactggagttgaaagggctgtcttcggacgcgatccacaagcggaccatggaactgctggctctcgtcaagctccaggatttcgccgaccgcatgcccgaccagctttcgggcggccagcgtcagcgcgtcgcgctgatgcgcgcgctcgcccccgacccgaacgtgcttctgctcgacgagcccctttcggcgctcgacgccaagctgcgccagcagatgcagatcgaactgaaaaccatccagcggaccaccggcaagaccttcatcttcgtcacccacgatcaggaggaggcgctgaccatgtccgacgtcatcgtggtgatgaacaaaggcaggatcgagcagatgggcggcccgaacgagctctattcccgcccgcgcagccgcttcgtcgccaacttcatcggccagagcaacttcctcgaaggcaagctgctttcccacgatggaacgaccgcggccatcgactggaacggaagcatcatccacgccgacctcaacgggacgaagctgccagccggcagcggcgcgaccgtcgcgcttcgtcccgaggcgctctactgcatggcggaacagccgaaggaccggttcgcactgagggggcgcatcgtccagcgcgtcttcaagggtgcgcacacctccctcacgatcgaactcgaaaatggcgcggagctggctttgcagctcgacccggtagcgctttcgcacctggagagggacgaggtgtgggtgggctggcgcgagcgcgacgcggtcgttctggccgactga

SEQ ID NO: 65801 - protein, 356 aa, Sinorhizobium meliloti 1021
MQPVVHFKNVNKYYGGLPAVDDLDLAVESGQFVTLLGPSGCGKSTTLRMLGGFEQPSSGEIYLEGKPITHLPPNRRNVNIVFQDYALFPHLNVGRNIAFGLELKGLSSDAIHKRTMELLALVKLQDFADRMPDQLSGGQRQRVALMRALAPDPNVLLLDEPLSALDAKLRQQMQIELKTIQRTTGKTFIFVTHDQEEALTMSDVIVVMNKGRIEQMGGPNELYSRPRSRFVANFIGQSNFLEGKLLSHDGTTAAIDWNGSIIHADLNGTKLPAGSGATVALRPEALYCMAEQPKDRFALRGRIVQRVFKGAHTSLTIELENGAELALQLDPVALSHLERDEVWVGWRERDAVVLAD

SEQ ID NO: 65802 - DNA, 1050 bp, Sinorhizobium meliloti 1021
  CDS (1)..(1050): transl_table=11
atgattgcccgttccctcacccttcgcaacatcaccaagacctatgacggcaggcatatggctgccgacgacgtttcgctcgacatcaaggccggcgagttcgtctccttcctcggcccctccggctccggcaagacgacgacgctgatgatgatcgccgggttccagcacccgacaagcggcgagatccgcctcggcgaacgcgcgatcgacaacctgccgccgcacaagcgcaatatcggcatggtctttcagaactatgcgctcttcccgcacatgacggtcgccgacaatgtgggatttccgctgcgcatgcgcggcgtcgccaagcaagacaaggagcgccgttgccgcgaggcactggccaaggtcgggcttcagggtttcgaagggcgcgtgcccgccgaactctccggcgggcagcagcagcgcgtggcgcttgcccgtgctctcgtcttcgaaccggacatcattctgctcgacgagccgctcggcgccctcgacaaggcgctgcgcgagcacatgcaggtggaactgaagcgcatccacaaggacctcggcgtcaccatggtctatgtcacccacgaccagtcggaggccatgaccatgtcagaccggatcgccgtcttcaatcagggccggatcgaacaggtcggcacgccgaacgagatctaccgcgcgccgaagacccgcttcgtcgcatccttcatcggcgacagcaacctcatcgagggctcctcgctgggcaacggaaggttcgacacgccggtcgggatcgtcgaggcgcggagccgccaagcggaccgcaaccgccgggccgatctgctgctgagaccagaaatgatccgcatcgccgaaacctcacaggacggacgccaaacgctgaagatcgacagcacgatcaactatggcgacaacctgctcgtcatcggaaagctcggcacgcagccaatccgcatgcgggtccccggcgccgatgcgcgcaggctcgaaggcatttccgaatgccacgtgacctggcgcgccgaggatgtccacgtgatcgcctga

SEQ ID NO: 65803 - protein, 349 aa, Sinorhizobium meliloti 1021
MIARSLTLRNITKTYDGRHMAADDVSLDIKAGEFVSFLGPSGSGKTTTLMMIAGFQHPTSGEIRLGERAIDNLPPHKRNIGMVFQNYALFPHMTVADNVGFPLRMRGVAKQDKERRCREALAKVGLQGFEGRVPAELSGGQQQRVALARALVFEPDIILLDEPLGALDKALREHMQVELKRIHKDLGVTMVYVTHDQSEAMTMSDRIAVFNQGRIEQVGTPNEIYRAPKTRFVASFIGDSNLIEGSSLGNGRFDTPVGIVEARSRQADRNRRADLLLRPEMIRIAETSQDGRQTLKIDSTINYGDNLLVIGKLGTQPIRMRVPGADARRLEGISECHVTWRAEDVHVIA

SEQ ID NO: 65804 - DNA, 1149 bp, Haemophilus influenzae Rd KW20
  CDS (1)..(1149): transl_table=11
ttggtgaaattagggagaaaaccaaagctagtggaaaatcagcttcaaaacaagcctattattgagcttcgttcaatcaaaaaatcctatggttctaacaccattattaatgatttcaatcttacaattaataacggtgagtttgtcactattcttggcccctcaggctgtggtaagaccacagttttacgcttacttgcaggcttagaagaattggattcaggtagcattattttagatggtgaagatatcaccaatgtgccagcggaaaaacgtcatattaatacggtattccaaagctatgcgctatttccacatatgacaatttttgagaacgtggctttcggtttgcgtatgcaaaaagtaccaaacgaggaaattaaaccgcgtgttttagaagccttgcgtatggtacagctagaagaaatggcggatcgtaagccaactcaactttctggcggacaacaacaacgtattgccatcgctcgtgccgtagtaaataaaccaaaagtgttgttacttgatgagtctttatctgcattggattacaaattgcgtaaacaaatgcagcaagaactcaaaatgttacaacgtcagcttggcattacctttattttcgtcacccacgatcaagaagaagcgattacaatgtctgatcgtattgtattattgcgtaaaggtaaaatcgcacaggatggttctccacgtgaaatctatgaagatccagctaacttattcgttgctcgtttcattggcgaaattaacgtatttgaagccactgtgattgaacgaaaatcagaacaagttgtactggcaaatgttgaaggtcgtatttgtgatatttatacggatatgcctgtggaaaaagatcaaaaacttcaagtactccttcgccctgaagatattgtgattgaagaattagatgaaaatgaacattctaaagcaattatcggtcatattattgaccgcacttataaaggaatgacattagaatcaacggtagagtttgatcataacggaatgcgtgtccttgtaagtgaattctttaatgaagatgatccacatatggatcatagcataggacaacgcgtaggtatcacatggcacgaaggctgggaggttgtactcaacgatgaagataatcaataa

SEQ ID NO: 65805 - protein, 382 aa, Haemophilus influenzae Rd KW20
MVKLGRKPKLVENQLQNKPIIELRSIKKSYGSNTIINDFNLTINNGEFVTILGPSGCGKTTVLRLLAGLEELDSGSIILDGEDITNVPAEKRHINTVFQSYALFPHMTIFENVAFGLRMQKVPNEEIKPRVLEALRMVQLEEMADRKPTQLSGGQQQRIAIARAVVNKPKVLLLDESLSALDYKLRKQMQQELKMLQRQLGITFIFVTHDQEEAITMSDRIVLLRKGKIAQDGSPREIYEDPANLFVARFIGEINVFEATVIERKSEQVVLANVEGRICDIYTDMPVEKDQKLQVLLRPEDIVIEELDENEHSKAIIGHIIDRTYKGMTLESTVEFDHNGMRVLVSEFFNEDDPHMDHSIGQRVGITWHEGWEVVLNDEDNQ

SEQ ID NO: 65806 - DNA, 1134 bp, Salmonella typhimurium LT2
  CDS (1)..(1134): transl_table=11
gtgaatgatgtcccccaccgcccgcaggtgaaaacccgtaaagcgctgacgccgcttctggaaattcgcaacctgacgaagtcattcgacgggcaacatgctgtcgatgatgtcagtctgactatctataaaggcgagatttttgccctgctgggcgcgtcaggttgtggaaaatcgactctgctacggatgctggcaggttttgaaccgccgagcagcgggcaaattatgctcgacggcgtcgatctggcgcatgttccgccgtatcagcgtccgattaatatgatgtttcagtcctatgcgttgtttccgcatatgacggtagagcagaacatcgcttttggtctgaagcaggacaaactgccgaaggcggagattaccagccgcgtcaatgagatgctgggtctggtgcacatgcaggagtttgcgaaacgtaagccgcatcagctttccggcggtcagcgtcagcgcgtggccctggcgcgcagcctggcgaaacgtcctaagctgctcttgttggatgaaccgatgggcgcgctggataaaaaattacgcgaccggatgcagctggaagtggtggatatccttgagcgcgtcggcgtgacctgcgtcatggtgacgcacgatcaggaagaagccatgacgatggcggggcgcattgccatcatgaaccgtggaaaatttgtgcaaattggcgaaccggaggagatttacgagcatccgacgacccgctacagcgccgaatttatcggatcggtaaatgtttttgagggcttactgaaagcgcgtgaggaggacggtctggtcattgacgcgcccggtttggttcatccgttaaaagtcgatgcagatgcctctgtcgttgataatgtgccggtatatgtggcgctacgtccggaaaaaatcatgctgtgtgagtcgccgcctgccgatggctataatttcgccgtcggcgaagtggcgcatattgcgtatctcggcgatctgtctatttatcatgtgcggctaaaaagcgggcagatgatcagcgctcaactgcagaatgcgcaccgttaccggaaagggttaccgacctggggcgatgaagtgcgtttgtgctgggaagcggatagctgcgtggtcctgacggtataa

SEQ ID NO: 65807 - protein, 377 aa, Salmonella typhimurium LT2
MNDVPHRPQVKTRKALTPLLEIRNLTKSFDGQHAVDDVSLTIYKGEIFALLGASGCGKSTLLRMLAGFEPPSSGQIMLDGVDLAHVPPYQRPINMMFQSYALFPHMTVEQNIAFGLKQDKLPKAEITSRVNEMLGLVHMQEFAKRKPHQLSGGQRQRVALARSLAKRPKLLLLDEPMGALDKKLRDRMQLEVVDILERVGVTCVMVTHDQEEAMTMAGRIAIMNRGKFVQIGEPEEIYEHPTTRYSAEFIGSVNVFEGLLKAREEDGLVIDAPGLVHPLKVDADASVVDNVPVYVALRPEKIMLCESPPADGYNFAVGEVAHIAYLGDLSIYHVRLKSGQMISAQLQNAHRYRKGLPTWGDEVRLCWEADSCVVLTV

SEQ ID NO: 65808 - DNA, 1146 bp, Nostoc sp. PCC 7120
  CDS (1)..(1146): transl_table=11
atgaatatggctcaaactgtaacgcagaatcccaggggcgtaaaaacactcctcccccttgatgttgaactacgtaacgtgttcaagtttttcaaccaagaaccggcggtacatggagtggacttagatgtaagacaaggggagttctttagtattcttggcccttctggctgtggtaagacaacgacactacgtttaatagccggatttgaacaagttgatgctggtaaattattgattcagggtcagccgatgaccaatattcccccttaccgccgaccagttaatacagtatttcaaagttacgctctatttaatcaccttaacgtctgggataatgttgctttcgggttgcggctaaagaaatcccggaaatcagaagtagaaagcagagttaaagaggctttaaagctggtaaaaatggaaagtttgcgatcgcgctttcctagccaactctccggtggtcaacagcagcgcgttgctttggctagggctttggtgaatcgtccggctgtggtgttgctggatgaacctttgggggcgttggatttaaagttacgtaaggaaatgcaggttgagttatcaaatttacataaaaacctgggtttaaccttcgttatggtaactcatgaccaagaagaggcgttatctttaagcgatcgcattgcggtgatgaatcaggggaaaattgaacaaattggtactccccaagagatttacgaacgtcctaaaacctcctttgtcgccgatttcatcggtgatactaatttgtttagtggtgaaatcaccgtattagaagctgaatatattcaaattgttaccaaaactggactcacaattgtagtcgcccgaaatgaagatacacccgcagaattattaaaacctgtagttgtgagtgtgcgaccagaaaaaattcaactttccctttatccgcctagttccctcaataactgttttgaaggaaggctgataaatgttatgtatttaggaactcacgttaattatgttgtccaattaattaacggtatgaatattaatgttttacaacctaatacttttggcaatttaccagaccgtgaaacacctatttatgcttggtgggcggaaagtgattgtttggctattaatcaaatgactaatgactaa

SEQ ID NO: 65809 - protein, 381 aa, Nostoc sp. PCC 7120
MNMAQTVTQNPRGVKTLLPLDVELRNVFKFFNQEPAVHGVDLDVRQGEFFSILGPSGCGKTTTLRLIAGFEQVDAGKLLIQGQPMTNIPPYRRPVNTVFQSYALFNHLNVWDNVAFGLRLKKSRKSEVESRVKEALKLVKMESLRSRFPSQLSGGQQQRVALARALVNRPAVVLLDEPLGALDLKLRKEMQVELSNLHKNLGLTFVMVTHDQEEALSLSDRIAVMNQGKIEQIGTPQEIYERPKTSFVADFIGDTNLFSGEITVLEAEYIQIVTKTGLTIVVARNEDTPAELLKPVVVSVRPEKIQLSLYPPSSLNNCFEGRLINVMYLGTHVNYVVQLINGMNINVLQPNTFGNLPDRETPIYAWWAESDCLAINQMTND

SEQ ID NO: 65810 - DNA, 1092 bp, Ralstonia solanacearum GMI1000
  CDS (1)..(1092): transl_table=11
atgaagaccgacgacgtgatcgtcagctttcgcggtgtgcgcaagacctacgacggcgagaccctggtggtcaagcacctggacctggacatctatcagggcgagttcctgacgctgctcggcccgtccggctccggcaagacgacctgcctgatgatgctggccggcttcgagtttccgaccggcggcgagatccgcctcgaaggcaccctgctcaacaccgtgccgccgcacaagcgcaacatcggcatggtgttccagaactacgcgctgttcccgcacctcacggtcgcgcagaacgtcgagtacccgctcaccgtgcgcaagcttgccgccgccgagcgcgccgagcgtgtccaccatgccctgaagatggtgcgcatggagggcttcgccaagcgctatcccgcgcagctctccggcggccagcagcagcgcatcgccctggcgcgcgcgctggtgttcgagcccaagctggtgctgatggacgaaccgctcggcgcgctcgacaagcagctgcgcgagcatatgcagtacgagctgaagtcgctgcacgagaagctgggcgtgaccttcgtctacgtcacgcacgaccagggcgaggcgctgaccatgtccgaccgcgtggccgtgttcgacaagggcgtggtgcagcagctcgacacggtcgaccgcctctacgaatccccctgcaacgcattcgtcgccaacttcatcggcgacagcaacacgctgcgcggcactgtcgtcggcctcgacggcgactactgccaactgcaattgaacgacggcgcgcgcgtgatcggccgcaacgtcgccggcgcgccggtcggggccgccgccgtcggctgcatccggcccgagcgcatgcgcctggccgagcccgccgatgccggcgccggcaacgcgctcgccggccagacgcgcggcctggtgtatttcggcgaccacgtccgcatgcgctgcgccctgcccgagcaggcggagtgcttcgtcaaggtgccgctcggcacgcgcgcgctcgaatcgttcgcgccgggcgcgccgatccggctggaattcgcgcccgagcacctgcgcgtcttcacctga

SEQ ID NO: 65811 - protein, 363 aa, Ralstonia solanacearum GMI1000
MKTDDVIVSFRGVRKTYDGETLVVKHLDLDIYQGEFLTLLGPSGSGKTTCLMMLAGFEFPTGGEIRLEGTLLNTVPPHKRNIGMVFQNYALFPHLTVAQNVEYPLTVRKLAAAERAERVHHALKMVRMEGFAKRYPAQLSGGQQQRIALARALVFEPKLVLMDEPLGALDKQLREHMQYELKSLHEKLGVTFVYVTHDQGEALTMSDRVAVFDKGVVQQLDTVDRLYESPCNAFVANFIGDSNTLRGTVVGLDGDYCQLQLNDGARVIGRNVAGAPVGAAAVGCIRPERMRLAEPADAGAGNALAGQTRGLVYFGDHVRMRCALPEQAECFVKVPLGTRALESFAPGAPIRLEFAPEHLRVFT

SEQ ID NO: 65812 - DNA, 1158 bp, Agrobacterium tumefaciens str. C58
  CDS (1)..(1158): transl_table=11
atggcaaagacactcggaccggtcaaacgcaaattcagcccttgggacaatcccgatgcggtgcctttcatccgatttgaaaacgtcaccaagcgctttggcgattttgtcgccgtcaacaatctgacgctcgatatttacgagcgcgaattcttctcgctgcttggtccttccggttgcggcaagaccacgctgatgcgcatgctggccggtttcgaggaaccgaccgagggtcgtatcctgctgcaaggcaaggatatttccggcgtgccgccctataagcgccccaccaacatgatgttccagtcctatgcgcttttcccgcatatgtcggtggaaaagaacgtcgccttcggcctcgagcaggatggccttcccaaggcggatatcgctgcccgcgtcgaggaaatgctgcggctcgtcaagctcacggagtttgccaagcgcaagccaagccagctttccggtggccagcgccagcgcgtggcgctcgcccgttcgcttgccaagcggccgaaggtgctgctgctggacgaaccgctcggcgcgctcgacaagaagctgcgcgaagaaacgcagttcgagctgatggatatccagaccaatctcggtctcaccttcctcatcgtcacccatgatcaggaagaggcgatgacggtgtcggaccgcatcgcggtcatggacaagggcaacgtcgtgcaggtggcgacgccggccgagatctatgaagcgccgaatacccgttatgtggccgacttcatcggcgacatcaatattttcgacgcccacgtcgtggccaacgcctccgatatcggcaagcccggtctggtgacgatggactgcgacggtctgaaagtttcagtggaacaggagtgtgccgccgccgccggcagccaggtggcttacgccattcgcccggaaaaggtccgcatctcgctcgaccagcccgccgacagcagcatcaattccgcctatggcgaagtctgggacatcggttatctcggtgatttttcggtattcatcgtcaagctggccgatggtcgcgtcatccgcgccgcgcaggcgaacgtctcgcgtctcgtcgatcgccccatcactttcggcgatatggtgtggctgaactggaaaccggattcagggcttgtcctgacacgctga

SEQ ID NO: 65813 - protein, 385 aa, Agrobacterium tumefaciens str. C58
MAKTLGPVKRKFSPWDNPDAVPFIRFENVTKRFGDFVAVNNLTLDIYEREFFSLLGPSGCGKTTLMRMLAGFEEPTEGRILLQGKDISGVPPYKRPTNMMFQSYALFPHMSVEKNVAFGLEQDGLPKADIAARVEEMLRLVKLTEFAKRKPSQLSGGQRQRVALARSLAKRPKVLLLDEPLGALDKKLREETQFELMDIQTNLGLTFLIVTHDQEEAMTVSDRIAVMDKGNVVQVATPAEIYEAPNTRYVADFIGDINIFDAHVVANASDIGKPGLVTMDCDGLKVSVEQECAAAAGSQVAYAIRPEKVRISLDQPADSSINSAYGEVWDIGYLGDFSVFIVKLADGRVIRAAQANVSRLVDRPITFGDMVWLNWKPDSGLVLTR

SEQ ID NO: 65814 - DNA, 1059 bp, Agrobacterium tumefaciens str. C58
  CDS (1)..(1059): transl_table=11
atgagctttttgacacttagcaacatcaagaaatccttcggctccgtgcaggtcgtgcatgatttcaacatggccatcgaaaagggcgaattcgtctcctttctcgggccatcgggctgtggcaagaccaccgtgctgcgcatgatcgccggtttcgaaatcccgaccggcggatcgatcgtcatcaacggcaaggaccagacgacgctcagaccgaaccagcgcaatatcggcatggtgttccaggcctatgccctgttcccgaacatgaatgtctatgaaaacgtcgccttcggtctgaaagtcgccggcaaaccaaaagccgagatcgacgcccgcgtgaaggaaatgctccagctcatccatctggaacatctggcggaccgctacccctatcagatgtcgggcggtcagcagcagcgcgtggcgctcgcccgggcgcttgcgccgaagccggaagtgcttctgctggacgaaccgctctccgccctcgacgccaagatccgcgtctcgctgcgtgaggaaatccgccagatccagcagaaactcggcatcaccaccattttcgtgacccacgatcaggaagaggccctgtcgatatccgaccgcatcgtcgtgatgaatggcggccgtgccgaccagatcggttcgcccttcgatatctacaacaaacccgccacccgcttcgtcgcctccttcgtcggtacgttgaacctcatcgacgccaccgtggtggattcctcatccaataccatccgtgtcggagagcagcagatcaccctgccgaagccggtcgatgcagcgaatggcgaaaaaatcacgctggcacttcgcccggaagcaggttccctcggcagcgatgcgaaaggcgatgttgccatttccggcctcgtcacctccagccagttcctcggctccgtcatccgcacccgccttgatctgggcggttcgacgctgtccttcgacatgttcaacgaccccggcacagcgccgcccgctgtcggtgagcgggtgacactgaaattcgctgccggcgacctgatgctcatcaaggactga

SEQ ID NO: 65815 - protein, 352 aa, Agrobacterium tumefaciens str. C58
MSFLTLSNIKKSFGSVQVVHDFNMAIEKGEFVSFLGPSGCGKTTVLRMIAGFEIPTGGSIVINGKDQTTLRPNQRNIGMVFQAYALFPNMNVYENVAFGLKVAGKPKAEIDARVKEMLQLIHLEHLADRYPYQMSGGQQQRVALARALAPKPEVLLLDEPLSALDAKIRVSLREEIRQIQQKLGITTIFVTHDQEEALSISDRIVVMNGGRADQIGSPFDIYNKPATRFVASFVGTLNLIDATVVDSSSNTIRVGEQQITLPKPVDAANGEKITLALRPEAGSLGSDAKGDVAISGLVTSSQFLGSVIRTRLDLGGSTLSFDMFNDPGTAPPAVGERVTLKFAAGDLMLIKD

SEQ ID NO: 65816 - DNA, 1113 bp, Agrobacterium tumefaciens str. C58
  CDS (1)..(1113): transl_table=11
ttgataggtgagactctaaatcttgacgggctcgcgaagagctatggcaacgtcgttgcagtcgctggtgttgacgtccgcgtggagccaggcgagttcgtgtcagtgctgggcccatctgggtcaggcaagaccagcgtcctgacgatgattgccggttttgagcgtcccacggcaggcaggatcgtgatcggcgaccgagacgtgaccgaccttgcgccgaataagcgaaatatcgggatggtctttcagaaatacgcgcttttcccccatctcactgtccgtcagaacattgctttcccgctaaagctcagatcgcggtggcgctccggatggaggcagcgggcagacgacatgcttgacctcgttcacctagccggttttgctgacaggtttccttctgaactttcgggtggccagcagcagcgtgtggcggtcgcacgagcgcttgcgtttgagccgcccgttatgctgatggacgagcccctcggcgcgcttgacaagaaattgcgtgaagccatgcagttcgaaatcaagcgcatccagagacaggtgggagcaaccgtcctttacgtaacgcatgatcaggaagaagcgctgacgatgtccgatcgcgttgcgataatgcagggcggaaacatcgtccagataggggctccttctagtctttaccacgcgcccgcaacccgttttgttgctgatttcgtcggaaaaatgagcttcgtcggaggagagattgtttcttttgaagacgacgggatgctcgtgcgattggcggacgacgtatttgtccggaccgcttctgtcgatgcggcacgggcggcactccggcttggtgacgaggtaatcctggccatgcgtcccgagaggatcgccttgaaaaaacgaggtcctcgaggttttggggcaataccagctcagatcgagagccttgcattcgttggatcattccatgcgtacatggtccgtctggacctgcctggatcaccgctggtggaggttcaggtcgtgaccggaagtgaggtaaatttccgcgccggtgatacggtcgatctcgtacccgacccgcaggctgtcagctttttttcaaaagaggagacgtctgcggcatga

SEQ ID NO: 65817 - protein, 370 aa, Agrobacterium tumefaciens str. C58
MIGETLNLDGLAKSYGNVVAVAGVDVRVEPGEFVSVLGPSGSGKTSVLTMIAGFERPTAGRIVIGDRDVTDLAPNKRNIGMVFQKYALFPHLTVRQNIAFPLKLRSRWRSGWRQRADDMLDLVHLAGFADRFPSELSGGQQQRVAVARALAFEPPVMLMDEPLGALDKKLREAMQFEIKRIQRQVGATVLYVTHDQEEALTMSDRVAIMQGGNIVQIGAPSSLYHAPATRFVADFVGKMSFVGGEIVSFEDDGMLVRLADDVFVRTASVDAARAALRLGDEVILAMRPERIALKKRGPRGFGAIPAQIESLAFVGSFHAYMVRLDLPGSPLVEVQVVTGSEVNFRAGDTVDLVPDPQAVSFFSKEETSAA

SEQ ID NO: 65818 - DNA, 1116 bp, Agrobacterium tumefaciens str. C58
  CDS (1)..(1116): transl_table=11
atgtcgcagacctcgaatgcagcagaaggcaagcagcttagcgttcgtggcctgacccatagctatggcggactgaatgcgatcagcgacatttctttcgagatagccgccggtgagatcgtcgcgctcctcggaccgagcggctgcggaaaatccaccgtgttgcgcgccatcgcaggcctgatccaaccgaaaagcggtgtgatccagctcggaggcgaagacatcgccaatgtttcggcgcgtgcgcgcggtatcggcatggttttccagaactatgcgctgtttccacacctgacggtcgccgagaacatcgcctatccgctggcatgccagaaagtgggacgcaccgagcgccgcgagcggattgaggaaatgctctcgctcgtgcagttgaagggatttggccatcggctgccgcgtgagctttccggtggccagcagcaacgcgtggcagtggcccgcgcgattgccggaaggccttcacttctgcttctcgacgaaccgttcggtgccttggaccgggcgctccgtttcgacctgcaggtcgagcttctccatctgcagaagacgcttggcatcacgacgttgatcgtgacgcatgaccaggaggaggcgcagagcctagctggccgtctggtgctcatgaacaagggcaatgtcgagcaaattgatacaccgatggccgtttatgaccgaccgaggtctctcttcgtcaataccttcatcggtcaggccaatgtgttgcatggaacggtggaccgggtggaggcggaggcaaccaccatctccctcgcgaatggcagggtcctcgttctgccgcgccgcctgaatttcacgacgggctccaagatcacgatcacctgccgccccgaagatgtgcgtctgtctgcggcaccgggcgcaccggccctgccggcacggctgaccgtgtcagtgccgcttggtcccacccttgtccatgatctccttctcgaagacgggacaaaccttcgctcctcggaggtccgcggaccttcgaccttcattcccgagccgggagcagagctctttgccgagatagacaccatcaggtgtcacgcctttccgagcgaaccggaagcatcccgtgaataa

SEQ ID NO: 65819 - protein, 371 aa, Agrobacterium tumefaciens str. C58
MSQTSNAAEGKQLSVRGLTHSYGGLNAISDISFEIAAGEIVALLGPSGCGKSTVLRAIAGLIQPKSGVIQLGGEDIANVSARARGIGMVFQNYALFPHLTVAENIAYPLACQKVGRTERRERIEEMLSLVQLKGFGHRLPRELSGGQQQRVAVARAIAGRPSLLLLDEPFGALDRALRFDLQVELLHLQKTLGITTLIVTHDQEEAQSLAGRLVLMNKGNVEQIDTPMAVYDRPRSLFVNTFIGQANVLHGTVDRVEAEATTISLANGRVLVLPRRLNFTTGSKITITCRPEDVRLSAAPGAPALPARLTVSVPLGPTLVHDLLLEDGTNLRSSEVRGPSTFIPEPGAELFAEIDTIRCHAFPSEPEASRE

SEQ ID NO: 65820 - DNA, 1068 bp, Brucella melitensis 16M
  CDS (1)..(1068): transl_table=11
ttgacggactatcgcacccgctttgaaaatatcagtaaatcctatggcgatttcaaagttatagacggcctgaacctcgatatcgaacggggcgaattcgtaagcctgctggggccctcggggtcgggcaagaccacccttttgatgatgctcgccggttttgaaaatccaagtagcggcacgatccatgtggacggaaagtccatcaactccgtcccttcctataagcgcaatatgggcgtcgttttccagaattatgcgctgtttccacatatgacggtggcggaaaacattgcctttcccttgcagatgcggggggtgggcaaggcgcaagcagctgagaaggtcgcgcgcgtgctggatatggtgcagctttcggccatgagcgagcgtaaaccatcgcaactttcgggtggtcagcaacagcgtgtcgctttggcgcgtgcgctggtgttcgagccgcatgtggtgctgatggatgagccgctcggcgcgctcgacaagcagttgcgcgagcagatgcagcttgatatccgcgccctgcacaaccggcttggcctcaccatcgttttcgtcacacatgaccagagcgaggcactcaccatgtcggaccgcatcgcggtcttcaacaagggcaagatcgagcagatcggctcgccacgcgctatttatgacgagccgcagacacgtttcgtcgccgaattcatcggcgagacgaacctggccgaaggcacggtggaaagcgttgaaggttcaagaattcttatccgtttgaaggacgccaccgccattgccgcttcatccgcttccaggcccatcagcggccagaatgtgcttctttccattcgcccggagcgcatcgagcttggagaggcggatggcgcggaaaaccggctggcggcgcgcgtgatggacagtgtttatcagggcgaccatctgcgtatccagcttgaggccaaggcgcataattttgtggttcgccttgatcgcaaggcgcgcgaatggcagccgggtgcggacgtggccgcaagcttcaaggccgccgattgctggaccatcctcgtatga

SEQ ID NO: 65821 - protein, 355 aa, Brucella melitensis 16M
MTDYRTRFENISKSYGDFKVIDGLNLDIERGEFVSLLGPSGSGKTTLLMMLAGFENPSSGTIHVDGKSINSVPSYKRNMGVVFQNYALFPHMTVAENIAFPLQMRGVGKAQAAEKVARVLDMVQLSAMSERKPSQLSGGQQQRVALARALVFEPHVVLMDEPLGALDKQLREQMQLDIRALHNRLGLTIVFVTHDQSEALTMSDRIAVFNKGKIEQIGSPRAIYDEPQTRFVAEFIGETNLAEGTVESVEGSRILIRLKDATAIAASSASRPISGQNVLLSIRPERIELGEADGAENRLAARVMDSVYQGDHLRIQLEAKAHNFVVRLDRKAREWQPGADVAASFKAADCWTILV

SEQ ID NO: 65822 - DNA, 1062 bp, Brucella melitensis 16M
  CDS (1)..(1062): transl_table=11
atggcttttctgaatatcaaaaacctgaaaaagagcttcggcaccaatacggtcgtccatgatttcaacctcgccgtggaaaagggtgaattcgtctcctttctcggcccatcgggctgcggcaagaccacagttctgcgcatgattgccggctttgaaaccccggacaacggctcgattgaaatcgacggcaaggacgtggtgaacctgaggcccaaccagcgcaatatcggcatggtgtttcaggcttatgcgctctttcccaatatgaccgttgcacagaacgtttcgttcggcctgcgcgtttcgggcaagtcccgctcggaaatcgatgccaccgtgaaggaaatgctgagcctcatccggctcgaccatctggccgaccgctacccctaccagatgtccggtggccagcagcagcgcgtggcgcttgcccgtgcactcgccaccaagccgcaggttctcctgctcgacgagccactttcggcgctcgatgcgaaaatccgcatatccttgcgggaagaaatccgcgccatccagcaaaagctcggcatcaccacggttttcgtcacgcatgaccaggaagaggcgctgtcgatctccgaccgcatcgtggtgatgcatgaaggccgcgccgaccagatcggctcacccttcgatatttataaccgcccggcctcgcgcttcgtcgcatccttcgtcggcacgctcaacatgctggaagcttctgtcagcgaaccggcacagaacagcatcgatctcgacgggcgccagatcaccgtgcaggaaacgctcgctcatcaccccaagggcaagccattgacgctggcgctccgcccggaggcggtgagccttgaagcccgcaagagccacgacacttcgctggaagccactattgatgacgtgcacttcctcggctccgtcatccgtacgcgcgtgatactcggcaagaaccggctgtccttcgacacgtttaacgacccgacccacccgccgccacaacgcggcgacaaggtgaaagtgcatttcgcctcacacgatcttctcgtgctggcagattag

SEQ ID NO: 65823 - protein, 353 aa, Brucella melitensis 16M
MAFLNIKNLKKSFGTNTVVHDFNLAVEKGEFVSFLGPSGCGKTTVLRMIAGFETPDNGSIEIDGKDVVNLRPNQRNIGMVFQAYALFPNMTVAQNVSFGLRVSGKSRSEIDATVKEMLSLIRLDHLADRYPYQMSGGQQQRVALARALATKPQVLLLDEPLSALDAKIRISLREEIRAIQQKLGITTVFVTHDQEEALSISDRIVVMHEGRADQIGSPFDIYNRPASRFVASFVGTLNMLEASVSEPAQNSIDLDGRQITVQETLAHHPKGKPLTLALRPEAVSLEARKSHDTSLEATIDDVHFLGSVIRTRVILGKNRLSFDTFNDPTHPPPQRGDKVKVHFASHDLLVLAD

SEQ ID NO: 65824 - DNA, 1032 bp, Clostridium perfringens str. 13
  CDS (1)..(1032): transl_table=11
atggatttaataaacctacagaatataaatgtttcttatgataagaaaaataatatattggaaaatctaaatttaaaagttaaaaaaggagaattagtttctcttttaggaccaagtgggtgtggaaagacaacaacattaagggttgtagctggatttatagaaccaacagcaggaaagtttttattaggagatgaagattatacaaatatacctgttcataatagaaactttggattagtctttcaaagctatgcattatttcctcacttaacagtagaagaaaatgtagcttttggattaaaaatgaaaaagatgagcaaagaagaaataagaaaaaaggttgatgatatattaaaagttgttgatatgagccatttagcaaagaggtatccaaaggaattatctggaggacaaagacaaagggttgccatagcaagagccttagtaatagagccaagtcttttattactagatgaacctttaagcaacttagatgctaaattaagattaaaaatgagagttgaaataagaaaacttcaacaaaagcttggaataacaacattattcgtaactcatgaccaagaagaatgtttttcaatttcagataaagtagcagttttaaataaaggggtaatagaacaatttgatactccagaaaatatttattcaaatccagcaacagagtttgttgcaagatttgtaggttttgaaaactttatagatttaataaaggtatcagatggtatatacaaaaatgagagtggaattaacttaaaagttaacaaggttaaggataagaatgaagtaaaagcaactataagaccagatgatataaagattgtaaaagaggatttagaaaacacagtaaatggagttatagaggttagaactttcttaggaaaggcataccaatatgatattaaaacaaaacttgggaatctaattgtaaatagtgaaaatgacagcatatatgaaaagggacaaaatataaaacttcaattaccagtggataaaatagtaattttataa

SEQ ID NO: 65825 - protein, 343 aa, Clostridium perfringens str. 13
MDLINLQNINVSYDKKNNILENLNLKVKKGELVSLLGPSGCGKTTTLRVVAGFIEPTAGKFLLGDEDYTNIPVHNRNFGLVFQSYALFPHLTVEENVAFGLKMKKMSKEEIRKKVDDILKVVDMSHLAKRYPKELSGGQRQRVAIARALVIEPSLLLLDEPLSNLDAKLRLKMRVEIRKLQQKLGITTLFVTHDQEECFSISDKVAVLNKGVIEQFDTPENIYSNPATEFVARFVGFENFIDLIKVSDGIYKNESGINLKVNKVKDKNEVKATIRPDDIKIVKEDLENTVNGVIEVRTFLGKAYQYDIKTKLGNLIVNSENDSIYEKGQNIKLQLPVDKIVIL

SEQ ID NO: 65826 - DNA, 1050 bp, Clostridium perfringens str. 13
  CDS (1)..(1050): transl_table=11
ttgaaagataataatattattgaattaaaaggaataactaaatcatatggaaaagatacaattttagataatctttccctaaatataaaaaagaatgaattcctaactcttttaggacctagtggatgtggtaaaacaaccactttaaaaattatagctggctttgaaacggcagatagtggccaggtggtctttgaaaataatattattaacgatataccaccttacgaaagacaattaaatactgtattccaaaaatatgctctattccctcatatgaatgtatatgaaaatatagcttttggattaaaactaaaaaaaatgcctaaagatgttatagatcaaaaagttaaggaaatgcttaagttagttgcccttgaaggatatgaaaacagagatattgaagcccttagtggtggtcaacaacaaagggttgccatagctagagctttagtaaatgaaccaaaggtacttttattagatgagccacttggtgcattagatatgaaacttagaaaaggaatgcaaatagagcttaagagaattcaacaaaaattaggaattacatttatatttgtaactcatgatcaagaagaagctttaacaatgtcagatacaatagttgttatgaataaaggtgaaattcaacaaatgggaagcccagaagatatatataatgaacctgctaactcatttgtagcaaaattcatcggtgaaagtaatatagttgatggaactatgttagatgactttaaggttgaatttgctggaagaatatttaactgtgttgataaaggttttgaaaagaacgaagctattgaagttgtaataagaccagaggattttgaaatggttaaatatgaagaaggtatgttaaaaggaactgttacttcagttatatttaaaggtgttcactatgaaatagaagtaaaggatgaaaaccacacttggatattacacaatacaaaacatgctgaaataggatctaaaataggattatctcttgatccagaaagcatacacataatgaaaaaagagagtgatgtttaa

SEQ ID NO: 65827 - protein, 349 aa, Clostridium perfringens str. 13
MKDNNIIELKGITKSYGKDTILDNLSLNIKKNEFLTLLGPSGCGKTTTLKIIAGFETADSGQVVFENNIINDIPPYERQLNTVFQKYALFPHMNVYENIAFGLKLKKMPKDVIDQKVKEMLKLVALEGYENRDIEALSGGQQQRVAIARALVNEPKVLLLDEPLGALDMKLRKGMQIELKRIQQKLGITFIFVTHDQEEALTMSDTIVVMNKGEIQQMGSPEDIYNEPANSFVAKFIGESNIVDGTMLDDFKVEFAGRIFNCVDKGFEKNEAIEVVIRPEDFEMVKYEEGMLKGTVTSVIFKGVHYEIEVKDENHTWILHNTKHAEIGSKIGLSLDPESIHIMKKESDV

SEQ ID NO: 65828 - DNA, 1131 bp, Fusobacterium nucleatum subsp. nucleatum ATCC 25586
  CDS (1)..(1131): transl_table=11
ttggaaaaaaaagatataaatatagttaatgtaaataaaagttttgatggagttcaaattttgaaagacattaatttaaagatagaacagggagaatttttttctataataggtccatcaggttgtggtaaaaccacacttttaagaatgatagctggatttatttctccagatagtggggctatatatcttggtgatgaaaatatagttaacttaccaccaaatcttagaaatgtaaatactatatttcaaaaatatgctcttttcccacatttgaatgtttttgaaaatgtagcatttcctttaagacttaaaaaagttgatgaaaaaacaataaatgaagaagttaataaatatttaaaacttgtgggcttggaagaacacagcacaaaaaaagttagccaattatcaggaggacaacaacaaagaatttcaatagcaagagctttaatcaataaaccaggagttctattgctggatgaacctttatcagctcttgatgcaaaattaaggcaaaatcttttaatagaacttgacttaattcatgatgaagttggaataacttttatctttattacccatgatcaacaagaagccctttctatctcagatagaatagcagttatgaatgcaggaaaagttttacaagttggtactcctgctgaagtctatgaagctcctgctgatacttttgttgcagatttcttaggagaaaataattttttcagtggaaaggttactgagattataaatgaagaattagctaaaataaatttagaaggtattggagaaataattattgaactggataaaaaggttaaaattggggataaggttactatctctttaagacctgaaaaaataaaactttctaaaaacgaaataaaaaagactaaaaattacatgaatagcgcagctgtttatgttgatgaatatatttattctggtttccaaagtaaatattatgtacatttaaaaaataatgaaaagttaaaatttaaaatctttatgcaacatgcagctttctttgatgataatgatgaaaaagctatatggtgggatgaagatgcttacatcacttgggatgcctatgatggttatctagtggaggtggaaagtgaaaaaaaatag

SEQ ID NO: 65829 - protein, 376 aa, Fusobacterium nucleatum subsp. nucleatum ATCC 25586
MEKKDINIVNVNKSFDGVQILKDINLKIEQGEFFSIIGPSGCGKTTLLRMIAGFISPDSGAIYLGDENIVNLPPNLRNVNTIFQKYALFPHLNVFENVAFPLRLKKVDEKTINEEVNKYLKLVGLEEHSTKKVSQLSGGQQQRISIARALINKPGVLLLDEPLSALDAKLRQNLLIELDLIHDEVGITFIFITHDQQEALSISDRIAVMNAGKVLQVGTPAEVYEAPADTFVADFLGENNFFSGKVTEIINEELAKINLEGIGEIIIELDKKVKIGDKVTISLRPEKIKLSKNEIKKTKNYMNSAAVYVDEYIYSGFQSKYYVHLKNNEKLKFKIFMQHAAFFDDNDEKAIWWDEDAYITWDAYDGYLVEVESEKK

SEQ ID NO: 65830 - DNA, 1194 bp, Streptomyces coelicolor A3(2)
  CDS (1)..(1194): transl_table=11
atgacgacgaatccgacgaagaaccagacggccgcgaaggacggcggcggcgacgtccgcctcgccggcatcagcaagacctacggctccttcaccgccgtgcacccgctcgacctgaccgtgccccagggctccttcttcgccctgctcggcgcctccggctgcggcaagaccaccaccctgcgcatgatcgccggactggaggagccgagcggcggcaccgtccacctcggcgaccaggacgtgaccgcgctgccgccctacaaacggccggtcaacacggtcttccagtcctacgccctcttcccgcacctggacatctacgagaacgtcgccttcggcctgcgccggcgcggcatcaagagcgtgaagaagcaggtcggcgagatgctcgacctggtgcagctcggtgagcaggcgcgcaagaagccgcaccagctctccggcggccagcagcagcgcgtagcagtcgcccgcgccctgatcaaccaccccaaggtgctgctcctcgacgaacccctcggcgccctcgacctcaagctgcgccgccagatgcaactggagctcaagcgcatccagaccgaggtcggcatcaccttcgtgcacgtcacccacgaccaggaggaggccatgacgatggccgaccaggtcgccgtgatgaacgcgggccgcgtcgagcaactgggcgcccccgccgacctgtacgagaacccgaggaccacgttcgtcgccaacttcctcggcacctccaacctcatcgaggccgaggtcgacacccgcagcggcgacgacgtcgtcgtgaaggcggccggtgacaagctcgtcctgcccggcgccaggtgctccgccccggcgaaaacgggcggcaaggtcctggtcggggtccgccccgagaagatcagcctcacccacgcggacgacgcgggctccatccccgagggccgcaaccggatcaccggcaggatcggcagcaccagtttcatcggcgtctccacccagtacgtggtcgactgcgccgcctgccccgagttcgaggtctacgcccagaacatcgaccgcgacccccgcctcacgcccggcgccgaggtcgtcctgcactggaacccggcgcacaccttcgggctcgacgccgaccagtccgtgcttgcagggacgatgggcgacgcgggtgtcgccgagggcgaggccgcctga

SEQ ID NO: 65831 - protein, 397 aa, Streptomyces coelicolor A3(2)
MTTNPTKNQTAAKDGGGDVRLAGISKTYGSFTAVHPLDLTVPQGSFFALLGASGCGKTTTLRMIAGLEEPSGGTVHLGDQDVTALPPYKRPVNTVFQSYALFPHLDIYENVAFGLRRRGIKSVKKQVGEMLDLVQLGEQARKKPHQLSGGQQQRVAVARALINHPKVLLLDEPLGALDLKLRRQMQLELKRIQTEVGITFVHVTHDQEEAMTMADQVAVMNAGRVEQLGAPADLYENPRTTFVANFLGTSNLIEAEVDTRSGDDVVVKAAGDKLVLPGARCSAPAKTGGKVLVGVRPEKISLTHADDAGSIPEGRNRITGRIGSTSFIGVSTQYVVDCAACPEFEVYAQNIDRDPRLTPGAEVVLHWNPAHTFGLDADQSVLAGTMGDAGVAEGEAA

SEQ ID NO: 65832 - DNA, 1134 bp, Xanthomonas axonopodis pv. citri str. 306
  CDS (1)..(1134): transl_table=11
atggcatcccccgaggccaccccgcagccccacctcaccgctggcgacggcggctacctgagcatcgacgcggtccgcaaggagttcgacggcttcgtcgcggtcgacgacgtcagcctgcagattcgcaagggcgagatcttcgcgttgctcggtggttcgggcagcggcaaatccacgctgctgcgctgccttgccggcttcgagcggccgaccaaggggcgcatcgtcctggatggtcaacccatcgacgcgctgccgccgtacgagcgcccgatcaacatgatgttccagtcgtacgcgctgtttccgcatatgagcgtggagcagaacatcgccttcgggctgaagcaggaaggcttgtccaaggctgcgatcgccacccgcgtcggcgagatgctcgcgctggtgcagcttggcgcgctggccaggcgcaagccgcaccagctctccggcgggcagcagcagcgcgtggccctggcgcgctcgctggccaagcggcccaagctgctgttgctggacgaaccgatgggtgcgctggataaaaaactgcgctcgcagatgcagctggaactggtcaacatcatcgaaacctccggcgtgacctgcgttatggtcacccacgatcaggaagaggccatgaccatggccacgcggatcgcgttgatggaccagggctggatccagcaggtcggcacgcccgatgaaatctacgagcagccggccaaccggtttgcggccgagttcatcggctcggtcaatctgatcgacgcgctcatcgccgacgacgcgcccgaatacgtcaccttgaaaacgcctgcgttcgatgcctgcatccgcatcggccacggcatcaccggcttcgaagggcaggcggtggcgttcgcgctgcgcccggaaaagctcgcgatcggcaaggacgagccggcgcaggcctgcaacaaggcgcagggcgtgatcgaagacatcgcctatttcggcagccattcggtgtaccacgtgcgcttgcccagcggggtcaagctgatggccaatttcgccaatcgccagcgttgggccagcgaagcgttgacctggggcgacaccgtgtgggtagggtggggcgaagacgacggcgtggtgttcaccgcatga

SEQ ID NO: 65833 - protein, 377 aa, Xanthomonas axonopodis pv. citri str. 306
MASPEATPQPHLTAGDGGYLSIDAVRKEFDGFVAVDDVSLQIRKGEIFALLGGSGSGKSTLLRCLAGFERPTKGRIVLDGQPIDALPPYERPINMMFQSYALFPHMSVEQNIAFGLKQEGLSKAAIATRVGEMLALVQLGALARRKPHQLSGGQQQRVALARSLAKRPKLLLLDEPMGALDKKLRSQMQLELVNIIETSGVTCVMVTHDQEEAMTMATRIALMDQGWIQQVGTPDEIYEQPANRFAAEFIGSVNLIDALIADDAPEYVTLKTPAFDACIRIGHGITGFEGQAVAFALRPEKLAIGKDEPAQACNKAQGVIEDIAYFGSHSVYHVRLPSGVKLMANFANRQRWASEALTWGDTVWVGWGEDDGVVFTA

SEQ ID NO: 65834 - DNA, 1116 bp, Yersinia pestis KIM
  CDS (1)..(1116): transl_table=11
ttgttcaacaataaattgagagtgtgcgcaatgagaacctatgtcagcttcaaaaatatcaagaagagctacgatggcgacaagttggtcgttaaaaacctgaatctggacattcatgagggggattttttaaccctgctcggtccttctggttcaggtaaaaccaccagcctaatgatgctagccgggtttgaaacccccactcaaggcgagattacgctgcgtgataaacccctgcataacctgccccctcaccaacgggggatcggtatggttttccaaaattatgccctcttcccacatatgaccgtaactgaaaatctggcctttccactcacgatccgccgattgaataaggctgatatcaaagagaaaattgaccgtatattggatatggtgaagttgaagaatttggctgaccgctatcccgcgcagatgtctggtgggcagcagcaacgggttgcattggcacgtgccttggtatttgagcccaaactggtgctgatggatgaaccactcggggcgctggataagcagttacgtgagcatatgcaattggaaatcaaacagttacataaaatgcttgaattgaccattgtctacgtcacccatgaccaaagcgaagcaatgactctgtcaaatcgggtggtggtatttaacgatggtattattcagcaaatggatagcccaagcgtgatttatgaacagccaagcaatacttttgtggcgcaatttattggtgaaaacaactgcttactggccgttaatcagggcagtgacggggaatattaccgtgccatgttggacgatggcacccgcctgcaagcattaaaagtgtgccccagctcaccgggtaaaaaaattatgttatgtattcggccggagcgcgtcagtgtgaatcatcctgcggcgggcagccagcagatcaaggcccgcattcagcaatttatttatctgggggatcatgtgcggatgatgacggaagttgcaggccaagggaatttcatggtgaaactctctgccgcgcatatcgaaccacactggcagccgggaagtgaggtgttgctgtcgtggatgcctgcgcatttaagggcactggagggggtgacacactga

SEQ ID NO: 65835 - protein, 371 aa, Yersinia pestis KIM
MFNNKLRVCAMRTYVSFKNIKKSYDGDKLVVKNLNLDIHEGDFLTLLGPSGSGKTTSLMMLAGFETPTQGEITLRDKPLHNLPPHQRGIGMVFQNYALFPHMTVTENLAFPLTIRRLNKADIKEKIDRILDMVKLKNLADRYPAQMSGGQQQRVALARALVFEPKLVLMDEPLGALDKQLREHMQLEIKQLHKMLELTIVYVTHDQSEAMTLSNRVVVFNDGIIQQMDSPSVIYEQPSNTFVAQFIGENNCLLAVNQGSDGEYYRAMLDDGTRLQALKVCPSSPGKKIMLCIRPERVSVNHPAAGSQQIKARIQQFIYLGDHVRMMTEVAGQGNFMVKLSAAHIEPHWQPGSEVLLSWMPAHLRALEGVTH

SEQ ID NO: 65836 - DNA, 1113 bp, Oceanobacillus iheyensis HTE831
  CDS (1)..(1113): transl_table=11
atgaaaaataatcaaccaattattcaattcaagaatgtctccaaacagtttgataacgatcctcttgtcttggatcatgtcagctttacaatagaaaaaggaaagttttacacattacttggtccttcaggttgtggaaaaacgactattttacgtctaatcgctgggtttacagaagcatcatcaggtgacatcatttttgaaggaaaaagaataaaccatatacctgccaataaacgtccaattaatacagtcttccaggactatgccttatttcctcaccttaacgtctatgaaaatgttgcttttgggttacgaattaagaaattgaaaaaatccatgatcgatgaaaaagtcaaggaagcactttcttttgtcaatttagttggatatgaaaatcgtgaaattaaggacatgtcagggggacaacgacaacgtgtagcaattgcacgtgcaatcgttaatgagcctgcagtaattttactagatgaaccattatccgcattagatcttaaattaaggtatcaaatgcagtatgagctccgtgaacttcaacaaagacttggcattacctttatttttgttacgcatgatcaagaagaagcgctcgcaatgtccgatgagatatttgttttaaataaaggaaaaatccaacaaagcggaacaccaaatgatatctatgatgagccgattaaccgttttgtcgctgactttattggtgaatcaaatattactaaagcaacaatgattgaagactaccttgtagaatttgcaggaaaacaattcacatgtgtagatatgggaatgaatgcaaatgaacctgtcgaagtcgttattcgtccagaagacatggagatcacttctgtagaacaagggatgatttccgttaccgtacacactcaattattccgtggtgtgcattatgaaattacttgtttggatagcgaaggaaacgaatggctcgttcaatcgacgaaaaaagccattgtcggtgaacaaattggattgagatttcatccagaagatatacatgttatgcgatttaatgagtccgaagcagactttgaccgccgtttagattcttattcggagggagaaacagatggagaataa

SEQ ID NO: 65837 - protein, 370 aa, Oceanobacillus iheyensis HTE831
MKNNQPIIQFKNVSKQFDNDPLVLDHVSFTIEKGKFYTLLGPSGCGKTTILRLIAGFTEASSGDIIFEGKRINHIPANKRPINTVFQDYALFPHLNVYENVAFGLRIKKLKKSMIDEKVKEALSFVNLVGYENREIKDMSGGQRQRVAIARAIVNEPAVILLDEPLSALDLKLRYQMQYELRELQQRLGITFIFVTHDQEEALAMSDEIFVLNKGKIQQSGTPNDIYDEPINRFVADFIGESNITKATMIEDYLVEFAGKQFTCVDMGMNANEPVEVVIRPEDMEITSVEQGMISVTVHTQLFRGVHYEITCLDSEGNEWLVQSTKKAIVGEQIGLRFHPEDIHVMRFNESEADFDRRLDSYSEGETDGE

SEQ ID NO: 65838 - DNA, 1146 bp, Brucella suis 1330
  CDS (1)..(1146): transl_table=11
atggaatcttttggcagctttcgccgcaaattcgcgccgtggaacgacccggcggccaagccttttatttctttcgagaatgtgacgaaaattttcggtgatttcactgccgtcgataatctgtcgctcaatgttttcaatcgggaattctttgcgctgcttggtgcgtcgggttgcggcaagaccacgctgatgcgtatgctggcgggcttcgaggagccgacatcgggccgcattacgctcgatggtcaggatatgcgcggcatcccgccctataagcgccccgtcaacatgatgttccagtcctatgcactgttcccgcatatgacggtggagaagaatatcgccttcggtctcaaacaggatggcatggcgaaatcggagatcgatgcccgtgtcgctgaaatgctcaagctcgtgaagctggagcaatatggcaagcgcaagccacatcagttatccggcggccagcgccagcgcgtggcgctggcccgttccgtcgccaagcgcccgaaggtgttgctgctcgacgagccgcttggtgcgctcgacaagaagctgcgcgaggaaacccagtttgaattgatggatttgcaggtcaagcttggcatgaccttcatggttgtcacccacgatcaggaagaagccatgaccatggccgaccgtatcgcggtcatggacaagggtcgcatcatgcaggtggcaacgcctgccgaagtctatgaagcgccgcgctccaaattcgtggccgatttcatcggcaatgtgaatatcatcgaaggcgaggtggtgaaggcggcaaacggcgaggcggaaatcgccaccgagaaattcggcttccacattcacaccgaaacgcgcgaacagctcaatcccggccagaaggtctggtatgcggtgcgcccggaaaagacccgcatctcgcgcgagaaacccgacgaggccgccgtcaatgcggtggagggcgagctttgggatattgcctatttcggcgacatgacggtctttcacgtgcgtctcgacaatggccgcactgtcaaggcagcgagcctcaatgccgtgcgcaagactgaaaacccgctcacctatgacgagcgcgtctgggtttcattcgatatcgatgccggtctggtgctgacggcctga

SEQ ID NO: 65839 - protein, 381 aa, Brucella suis 1330
MESFGSFRRKFAPWNDPAAKPFISFENVTKIFGDFTAVDNLSLNVFNREFFALLGASGCGKTTLMRMLAGFEEPTSGRITLDGQDMRGIPPYKRPVNMMFQSYALFPHMTVEKNIAFGLKQDGMAKSEIDARVAEMLKLVKLEQYGKRKPHQLSGGQRQRVALARSVAKRPKVLLLDEPLGALDKKLREETQFELMDLQVKLGMTFMVVTHDQEEAMTMADRIAVMDKGRIMQVATPAEVYEAPRSKFVADFIGNVNIIEGEVVKAANGEAEIATEKFGFHIHTETREQLNPGQKVWYAVRPEKTRISREKPDEAAVNAVEGELWDIAYFGDMTVFHVRLDNGRTVKAASLNAVRKTENPLTYDERVWVSFDIDAGLVLTA

SEQ ID NO: 65840 - DNA, 1062 bp, Brucella suis 1330
  CDS (1)..(1062): transl_table=11
atggcttttctgaatatcaaaaacctgaaaaagagcttcggcaccaatacggtcgtccatgatttcaacctcgccgtggaaaagggtgaattcgtctcctttctcggcccatcgggctgcggcaagaccacagttctgcgcatgattgccggctttgaaaccccggacaacggctcgattgaaatcgacggcaaggacgtggtgaacctgaggcccaaccagcgcaatatcggcatggtgtttcaggcttatgcgctctttcccaatatgaccgttgcacagaacgtttcgttcggcctgcgcgtttcgggcaagtcccgctcggaaatcgatgccaccgtgaaggaaatgctgagcctcatccggctcgaccatctggccgaccgctacccctaccagatgtccggtggccagcagcagcgcgtggcgcttgcccgtgcactcgccaccaagccgcaggttctcctgctcgacgagccactttcggcgctcgatgcgaaaatccgcatatccttgcgggaagaaatccgcgccatccagcaaaagctcggcatcaccacggttttcgtcacgcatgaccaggaagaggcgctgtcgatctccgaccgcatcgtggtgatgcatgaaggccgcgccgaccagatcggctcacccttcgatatttataaccgcccggcctcgcgcttcgtcgcatccttcgtcggcacgctcaacatgctggaagcttctgtcagcgaaccggcacagaacagcatcgatctcgacgggcgccagatcaccgtgcaggaaacgctcgctcatcaccccaagggcaagccattgacgctggcgctccgcccggaggcggtgagccttgaagcccgcaagagccacgacacttcgctggaagccactattgatgacgtgcacttcctcggctccgtcatccgtacgcgcgtgatactcggcaagaaccggctgtccttcgacacgtttaacgacccgacccacccgccgccacaacgcggctacaaggtgacagtgcatttcgcctcacacgatcttctcgtgctggcagattag

SEQ ID NO: 65841 - protein, 353 aa, Brucella suis 1330
MAFLNIKNLKKSFGTNTVVHDFNLAVEKGEFVSFLGPSGCGKTTVLRMIAGFETPDNGSIEIDGKDVVNLRPNQRNIGMVFQAYALFPNMTVAQNVSFGLRVSGKSRSEIDATVKEMLSLIRLDHLADRYPYQMSGGQQQRVALARALATKPQVLLLDEPLSALDAKIRISLREEIRAIQQKLGITTVFVTHDQEEALSISDRIVVMHEGRADQIGSPFDIYNRPASRFVASFVGTLNMLEASVSEPAQNSIDLDGRQITVQETLAHHPKGKPLTLALRPEAVSLEARKSHDTSLEATIDDVHFLGSVIRTRVILGKNRLSFDTFNDPTHPPPQRGYKVTVHFASHDLLVLAD

SEQ ID NO: 65842 - DNA, 1068 bp, Brucella suis 1330
  CDS (1)..(1068): transl_table=11
ttgacggactatcgcatccgctttgaaaatatcagtaaatcctatggcgatttcaaagttatagacggcctgaacctcgatatcgaacggggcgaattcgtaagcctgctggggccctcggggtcgggcaagaccacccttttgatgatgctcgccggttttgaaaatccaagtagcggcacgatccatgtggacggaaagtccatcaactccgtcccttcctataagcgcaatatgggcgtcgttttccagaattatgcgctgtttccacatatgacggtggcggaaaacattgcctttcccttgcagatgcggggggtgggcaaggcgcaagcagctgagaaggtcgcgcgcgtgctggatatggtgcagctttcggccatgagcgagcgtaaaccatcgcaactttcgggtggtcagcaacagcgtgtcgctttggcgcgtgcgctggtgttcgagccgcatgtggtgctgatggatgagccgctcggcgcgctcgacaagcagttgcgcgagcagatgcagcttgatatccgcgccctgcacaaccggcttggcctcaccatcgttttcgtcacacatgaccagagcgaggcactcaccatgtcggaccgcatcgcggtcttcaacaagggcaagatcgagcagatcggctcgccacgcgctatttatgacgagccgcagacacgtttcgtcgccgaattcatcggcgagacgaacctggccgaaggcacggtggaaagcgttgaaggttcaagaattcttatccgtttgaaggacggcgccgccattgccgcttcatccgcttccaggcccatcagcggccagaatgtgcttctttccatccgcccggagcgcatcgagcttggagaggcggatggcgcggaaaaccggctggcggcgcgcgtgatggacagtgtttatcagggcgaccatctgcgtatccagcttgaggccaaggcgcataattttgtggttcgccttgatcgcaaggcgcgcgaatggcagccgggtgcggacgtggccgcaagcttcaaggccgccgattgctggaccatcctcgtatga

SEQ ID NO: 65843 - protein, 355 aa, Brucella suis 1330
MTDYRIRFENISKSYGDFKVIDGLNLDIERGEFVSLLGPSGSGKTTLLMMLAGFENPSSGTIHVDGKSINSVPSYKRNMGVVFQNYALFPHMTVAENIAFPLQMRGVGKAQAAEKVARVLDMVQLSAMSERKPSQLSGGQQQRVALARALVFEPHVVLMDEPLGALDKQLREQMQLDIRALHNRLGLTIVFVTHDQSEALTMSDRIAVFNKGKIEQIGSPRAIYDEPQTRFVAEFIGETNLAEGTVESVEGSRILIRLKDGAAIAASSASRPISGQNVLLSIRPERIELGEADGAENRLAARVMDSVYQGDHLRIQLEAKAHNFVVRLDRKAREWQPGADVAASFKAADCWTILV

SEQ ID NO: 65844 - DNA, 1137 bp, Shewanella oneidensis MR-1
  CDS (1)..(1137): transl_table=11
atggcaagcacctcgggcgtcaccaataaacccacaacaaagacgcaagaaaaagtcctgcttaagattgagcgggtgagtaagttatttgacgatgtacgcgcggttgatgacgtatcattgacgatcaataaaggtgagatttttgccttacttgggggctcaggctctggtaagtcgaccttattacgcatgctcgctggatttgaaagaccaacaagtggccggatttatcttgatggcgaagatattaccgatctgccgccttacgagcgccctatcaacatgatgttccaatcctatgcactgtttccccatatgacagtggcacaaaatattgccttcggattaaagcaagataagttgcctaaagctgaaattgagcagcgcgtacaggaaatgctcaagttggtgcatatggagcaatacggaaaacgaaaaccccatcaactttctggcggtcagcgccaacgggtcgccttggcacgctctttggcaaaacgccccaaattattattgctcgacgagccaatgggcgcgctcgataaaaaactgcgtacccagatgcagctagaagtggttgaaatccttgagcgcgttggtgtgacatgtgtgatggtgacccacgatcaagaagaagccatgaccatggcggggcggatttcaattatgagtgatggctggatagcccaaactggctctcctatggatatctacgagagtccaaatagccgcatgattgctgaatttattggctctgtgaacctgtttagtggtgagattgaagtggacgaagtcgaccatctcatcattaagcctaatgatttagcgcgatctttctatgtaggttacggtgtgaccaccagccttgaagataaacgtgtatggctagcagtgcgccctgaaaaaaccattattagtcgtgagcaacctgaaggtgaatacaactgggccaaaggtatagtgcatgatattgcttatttaggcgggatttcggtttactacattcgccttgaaaatgggcagattgtgcagtgcagtatgacaaaccgtgaacgccgcgctgaccatgcaacctgggatgatgaagtgttcatcagttgggaggacaccagtggcgtggtgttaagatcatga

SEQ ID NO: 65845 - protein, 378 aa, Shewanella oneidensis MR-1
MASTSGVTNKPTTKTQEKVLLKIERVSKLFDDVRAVDDVSLTINKGEIFALLGGSGSGKSTLLRMLAGFERPTSGRIYLDGEDITDLPPYERPINMMFQSYALFPHMTVAQNIAFGLKQDKLPKAEIEQRVQEMLKLVHMEQYGKRKPHQLSGGQRQRVALARSLAKRPKLLLLDEPMGALDKKLRTQMQLEVVEILERVGVTCVMVTHDQEEAMTMAGRISIMSDGWIAQTGSPMDIYESPNSRMIAEFIGSVNLFSGEIEVDEVDHLIIKPNDLARSFYVGYGVTTSLEDKRVWLAVRPEKTIISREQPEGEYNWAKGIVHDIAYLGGISVYYIRLENGQIVQCSMTNRERRADHATWDDEVFISWEDTSGVVLRS

SEQ ID NO: 65846 - DNA, 1125 bp, Pseudomonas putida KT2440
  CDS (1)..(1125): transl_table=11
atgagcgaggcgaagtcgaacgctgcaaccggcgaaacgctggtcagcttccgtggtgtgcagaagagctacgacggcgagtcgctgatcgtcaaagacctcaacctggatatccgcaagggcgagtttctcaccctgcttggcccgtccggctcgggcaagactaccagcctgatgatgctggcgggcttcgagacccccaccgccggtgaaatccagcttggcgggcgctcgatcaacaacgtgccgccgcacaaacgtgatatcggcatggtgttccagaactacgcgctctttccgcacatgaccgtggccgagaacctggcctttccgctgaccgtgcgcaacctgagcaagaccgacatcagcgagcgggtcaaacgcgtgctgaacatggtgcagctcgacgctttcgccaaacgctaccccggccagctgtctggcggccagcagcagcgtgtggcgctggcccgggcattggtgttcgagccacaactggtactgatggacgagccacttggcgcgctggacaagcagctgcgcgaacacatgcagatggagatcaagcacattcaccagcgcctgggtgtgaccgtggtgtacgtgacccacgaccagggcgaagcgctgaccatgtccgaccgcgtggcggtgttccaccagggcgaaatccagcagatcgccgacccgcgcacgctgtacgaagagccctgcaacaccttcgtcgccaacttcatcggcgagaacaaccgcatcagcggcaccctgctggccagcgatggcaaacgttgccaggtgcagttgcctcgcggcgagcgggtcgaggcgctggcggtgaatgtcggccaggccggcgagccggtgaccctgtcgatacgcccggagcgcgtgcgcctgaacggccacagtgaaagctgcgtcaaccggttctctggccgggtggccgaattcatttacctgggcgaccacgtgcgggtgcgtctggaggtttgcggcaaaggcgacttcttcgtgaagcagccgattgccgagctcgacccggcgttggccgtgggcgatgtagtaccgctgggctgggaggtggagcacgcccgcgcgctcgatccgattgccgaagcccattga

SEQ ID NO: 65847 - protein, 374 aa, Pseudomonas putida KT2440
MSEAKSNAATGETLVSFRGVQKSYDGESLIVKDLNLDIRKGEFLTLLGPSGSGKTTSLMMLAGFETPTAGEIQLGGRSINNVPPHKRDIGMVFQNYALFPHMTVAENLAFPLTVRNLSKTDISERVKRVLNMVQLDAFAKRYPGQLSGGQQQRVALARALVFEPQLVLMDEPLGALDKQLREHMQMEIKHIHQRLGVTVVYVTHDQGEALTMSDRVAVFHQGEIQQIADPRTLYEEPCNTFVANFIGENNRISGTLLASDGKRCQVQLPRGERVEALAVNVGQAGEPVTLSIRPERVRLNGHSESCVNRFSGRVAEFIYLGDHVRVRLEVCGKGDFFVKQPIAELDPALAVGDVVPLGWEVEHARALDPIAEAH

SEQ ID NO: 65848 - DNA, 1032 bp, Pseudomonas putida KT2440
  CDS (1)..(1032): transl_table=11
atgcccctagccgtccagttcacccaggtttcccgcaccttcggcgaggtcaaggccgtcgaccaggtcagcatcgacatcatcgatggcgagttcttttccatgctcggcccttccggctcgggcaagaccacctgcctgcgcctgatcgcaggcttcgagcaaccctccagcggttcgatccgcatccaaggggtcgaggccgctggcctgccgccctaccaacgtgacgtcaacactgtgttccaggactatgcgctgttcccgcacatgaacgtgctggagaacatcgcctatggcctgaaggtaaaaggcgtgggcaaggccgaacgccacagccgcgccgaagaagccctggccatggtggccctggccggctatggcgcgcgcaagccggcacagctgtctggcggccagcgtcagcgcgtggccctggcccgggcgttggtcaaccggccgcgggtgctgctgctggatgagccactgggcgcgctggacctgaaattgcgcgaacagatgcaaggcgagctgaaaaagctgcaacgccaactgggcatcaccttcatcttcgtcacccacgaccagaccgaggcgctgtcgatgtccgaccgggtcgcggtgttcaaccgcggccgtatcgaacaggtcgacaccccgcgcaacctgtacatgaagcccagcacaaccttcgtcgctgaatttgtcggcacgtccaacgtggtgcggggcgagctggccatgcagatcaacggcagcccggcgcccttttccatccgtcccgagctcattcgcctgggcgacccggtagtgaccagccatgaggtacaggtcagcggcgtgctgcacgatgtccagtaccaaggcagcgccacccgctacgaactgcagctggacaacggtcaactgctggcagtaagccaggccaatgaccgctggcagaagcagatgcaggcctggcagctcgggcaacgcctgcaggcgcactggccccgcgaggccatgacggtgctgcaggaaaccgagggccgctga

SEQ ID NO: 65849 - protein, 343 aa, Pseudomonas putida KT2440
MPLAVQFTQVSRTFGEVKAVDQVSIDIIDGEFFSMLGPSGSGKTTCLRLIAGFEQPSSGSIRIQGVEAAGLPPYQRDVNTVFQDYALFPHMNVLENIAYGLKVKGVGKAERHSRAEEALAMVALAGYGARKPAQLSGGQRQRVALARALVNRPRVLLLDEPLGALDLKLREQMQGELKKLQRQLGITFIFVTHDQTEALSMSDRVAVFNRGRIEQVDTPRNLYMKPSTTFVAEFVGTSNVVRGELAMQINGSPAPFSIRPELIRLGDPVVTSHEVQVSGVLHDVQYQGSATRYELQLDNGQLLAVSQANDRWQKQMQAWQLGQRLQAHWPREAMTVLQETEGR

SEQ ID NO: 65850 - DNA, 990 bp, Pseudomonas putida KT2440
  CDS (1)..(990): transl_table=11
atgagcttcgtcagcgtacagaaactgcagaaaagctacgccggcagcccggtgttcgagcgcatcgactgccacatcgaacgcggcgaattcgtcaccctgctcggcccgtccggctgcggcaagtccaccctgctgcgctgcattgccgggctgacctcggtggacagcgggcagatactgctcgacggccacgacatcgtgccgctaagcccgcaaaagcgtggcatcggcatggtgttccagagctacgcgctgttccctaacatgaccgtggagcagaatgtcgccttcggcctgcgcatgcagaaggtcaaggccgacgaaagccagctgcgggtacgcgaggtactggagctggtggagctgggcaagttcgccgggcgctacccgcaccagctttccggcggccagtgccagcgcgtggccctggcacgctcactggtcacccgcccgcgcctgctgctgctcgacgaaccgttgtcggcgctggatgcgcgtatccgcaagcacctgcgcgagcagattcgtgccatccagcgcgaactggggctgaccaccatcttcgtcactcacgatcaggaggaagcgctgaccatgtccgaccgcatcttcctgatgaaccaggggcgcatcgtccagagcggcgatgccgaaaccctctacaccgcccccgtggacctgtttgccgccggtttcatcggcaactacaacctgctcgacgccgacagcgccagccgcctgctgcagcgcccggtggccagccgcctggcgatccgcccggagtcgatcacccttggcgagcacggcgagctggacgccgaggtgcgcagccacagcctgctgggcaacgtgatccgctaccgggtacgggtacgcgaagtggagctggtggtcgatgtgctcaaccgctcgccggccgacttgcacgcggacggaaaacgggtaagcgtgtcgatcgaccccactgcgctgcgggaagtggcttaa

SEQ ID NO: 65851 - protein, 329 aa, Pseudomonas putida KT2440
MSFVSVQKLQKSYAGSPVFERIDCHIERGEFVTLLGPSGCGKSTLLRCIAGLTSVDSGQILLDGHDIVPLSPQKRGIGMVFQSYALFPNMTVEQNVAFGLRMQKVKADESQLRVREVLELVELGKFAGRYPHQLSGGQCQRVALARSLVTRPRLLLLDEPLSALDARIRKHLREQIRAIQRELGLTTIFVTHDQEEALTMSDRIFLMNQGRIVQSGDAETLYTAPVDLFAAGFIGNYNLLDADSASRLLQRPVASRLAIRPESITLGEHGELDAEVRSHSLLGNVIRYRVRVREVELVVDVLNRSPADLHADGKRVSVSIDPTALREVA

SEQ ID NO: 65852 - DNA, 1149 bp, Pseudomonas putida KT2440
  CDS (1)..(1149): transl_table=11
atgagtgcagtgatcaaagacaacgcgcacggcaaaaccctggtcagcctgcgcggcctgaacaagcactacggcgacttcaccgccgtggacaacctcgacctggagatccaggacggcgagttcctgaccttcctcggttccagcgggtcgggcaagtccaccaccctgtcgatgctggccggcttcgaaacaccgagcagcggcgagatcctggtcgacggccagtcgctggtcaacgtgccgccgcacaagcgtgacatcggcatggtgttccagcggtattcgctgttcccgcacctgaatgtgcgtgacaacatcgccttcccactggccattcgcaaactcggcgctgccgaaaccgccaagcgcgtcgacgccatgctcaagctggtgcaactggaacagttcgcgcaccgcaaaccctcgcaaatgtcgggcggccagcagcagcgcgtggcgatcgcccgggcgctggtgtacgagccgcgtatcctgctgatggacgagccgctcggcgcgctggacaagaagctgcgtgaagacctgcaggacgaactgcgccagttgcaccgccgcctgggcatcaccatcgtctacgtcacccacgaccaggaagaagccatgcgcctgtcccagcgcatcgccattttcagccacggcaagatcgtcggcctgggcaccggttacgacctgtaccagaacccaccgaatgcctttgtcgcatcgttcctgggcaactccaacttcctgcggatcaaggccagcagcaacggcgcgggcagcttcgagggccagccagtggccattcgcttgaccccggggctggccgcctcgcaggatgcactgatcatggtgcgcccggaaaaggccgtggccatgagcgccgaacaggccatgcgtgaaccgctgccggcgggttggaacgaggtcactgccaaggttggcgaagtgctgttcctgggtgaaagccagacctgccatgtggtgactgcagggggtaccgagctgaccgtgaaggcactgtcggcggcgggcatgccgatgcagccgggcgacagcgtgaaggtgcgttgggcagtggcagacgcttgcatttataccgaatgggccgagagcgacctgagcaagtcggccggggcgcattaa

SEQ ID NO: 65853 - protein, 382 aa, Pseudomonas putida KT2440
MSAVIKDNAHGKTLVSLRGLNKHYGDFTAVDNLDLEIQDGEFLTFLGSSGSGKSTTLSMLAGFETPSSGEILVDGQSLVNVPPHKRDIGMVFQRYSLFPHLNVRDNIAFPLAIRKLGAAETAKRVDAMLKLVQLEQFAHRKPSQMSGGQQQRVAIARALVYEPRILLMDEPLGALDKKLREDLQDELRQLHRRLGITIVYVTHDQEEAMRLSQRIAIFSHGKIVGLGTGYDLYQNPPNAFVASFLGNSNFLRIKASSNGAGSFEGQPVAIRLTPGLAASQDALIMVRPEKAVAMSAEQAMREPLPAGWNEVTAKVGEVLFLGESQTCHVVTAGGTELTVKALSAAGMPMQPGDSVKVRWAVADACIYTEWAESDLSKSAGAH

SEQ ID NO: 65854 - DNA, 1143 bp, Pseudomonas putida KT2440
  CDS (1)..(1143): transl_table=11
atggcagttgcctccggtgcctataaaaaagccctcgagggtggccagcaacccaagcaggtgctggtcaagatcgaccgggtcacgaaaaagttcgacgaaacggtagccgtggacgatgtgtccctggaaatccgcaagggtgagatcttcgccctgctgggcggctccggttccggcaagtccaccttgctgcgcatgctggccggcttcgagcgcccgtccgaagggcggatcttcctcgatggcgtcgacatcaccgacatgccgccctacgagcggccaatcaacatgatgttccagtcctacgcactgttcccgcacatgaccgtggcgcagaacatcgccttcggcctgcagcaggacaagatgcccaaggccgagatcgatgcccgcgtggccgagatgctcaagctggtgcacatgacccagtacgccaagcgcaagccgcaccagttgtcgggcggccagcgtcagcgtgtggcgttggcccgctcgctggccaagcgccctaaactgctgctgctcgacgagccaatgggtgcactggacaagaaactgcgttcgcagatgcagctggagctggtcgagatcatcgagcgcgtgggtgtaacctgcgtgatggtgacccacgaccaggaagaggccatgaccatggcccagcgcatcgccatcatgcacctgggctggatcgcccagatcggctcgccagtggacatctacgagacgcctaccagccgcctggtgtgcgagttcatcggtaacgtcaacctgttcgaaggtgacgtggtcgacgacgccgaaggctacgcgatcattgccagcccggagctggagcgcaagatctacgtgggccacggcatcaccacctcggtggaagacaagcacatcacctacgccctgcgcccggaaaagatgctggtcaccacccagcagccaacctgcgagcacaactggtcgcgcggcaagatccacgacatcgcctacctgggcggccactcggtgttctatgtcgagctgccgagcggcaaggtcgtccagtcgttcgttgccaacgccgagcgccaaggtacccgtcctacctggggcgatgaagtgtacgtatggtgggaagacgacagcggcgtggtactgcggtcatga

SEQ ID NO: 65855 - protein, 380 aa, Pseudomonas putida KT2440
MAVASGAYKKALEGGQQPKQVLVKIDRVTKKFDETVAVDDVSLEIRKGEIFALLGGSGSGKSTLLRMLAGFERPSEGRIFLDGVDITDMPPYERPINMMFQSYALFPHMTVAQNIAFGLQQDKMPKAEIDARVAEMLKLVHMTQYAKRKPHQLSGGQRQRVALARSLAKRPKLLLLDEPMGALDKKLRSQMQLELVEIIERVGVTCVMVTHDQEEAMTMAQRIAIMHLGWIAQIGSPVDIYETPTSRLVCEFIGNVNLFEGDVVDDAEGYAIIASPELERKIYVGHGITTSVEDKHITYALRPEKMLVTTQQPTCEHNWSRGKIHDIAYLGGHSVFYVELPSGKVVQSFVANAERQGTRPTWGDEVYVWWEDDSGVVLRS

SEQ ID NO: 65856 - DNA, 1134 bp, Vibrio vulnificus CMCP6
  CDS (1)..(1134): transl_table=11
gtgggagaaatacagacgttgaacgctaaacaaaatgcaggacaaccagtaatccgtttatctggtatcagtaagagtttcgatggtaaggaaatcatcggtaatttaaacctggacgttaatcacggtgaatttttaacgattctaggtccttctggctgtggtaaaacaaccgttttacgcatgatcgcaggttttgaaactgcagataatggccaaattacgatcgacaatcaggatgtcactaacgttcctgcagaacaaaggcatgtcaacacggtattccaaagttacgcattgttcccacatatgactgtgtttgataatgttgcgtttggcttacgcatgcagaaggtccctgctgctgaaatcgaacctcgcgtaatggacgcgcttaaaatggttcgtctagagagcatggctcagcgtaaacctcatcagctttctggtggtcaacagcagcgtattgcaattgcgcgtgctgtggtgaacaaaccaaaagtactattacttgatgaatccctatcagcgcttgattacaaattacgtaagcaaatgcagattgagcttaagcagctacagcgacagcttggcatcacctttattttcgtgacgcacgatcaggaagaagcactatcgatgtcagaccgcattatcgtcatgcgctcaggcgttatcgagcaagatggctctcctcgtgaaatctacgaagatccgaaaaacttatttgttgcgcgctttatcggcgaaatcaacgtgtttgaagcaacggccaaagaacgccttgatgaaaaccgtattcgtgctgagattgaaggcgtcgactcagtggtttacttcgatcaaccggtaacggaaggtcagaaactgcaagtgctacttcgtccagaagacttacgtattgaagagatcaaagaatccgaagagaaaggtattgtcggtcatgttaccgagcgtacttacaaagggatgactcttgattctgttattgaaacggaatctggcatgcgtgtaatggtaagcgagttctttaacgaagatgatcctgatgtggaccactctttaggacaaaaagtcgccattacttgggttgaaagctgggaagtggtgctaagcgatgagcaagaaatttag

SEQ ID NO: 65857 - protein, 377 aa, Vibrio vulnificus CMCP6
MGEIQTLNAKQNAGQPVIRLSGISKSFDGKEIIGNLNLDVNHGEFLTILGPSGCGKTTVLRMIAGFETADNGQITIDNQDVTNVPAEQRHVNTVFQSYALFPHMTVFDNVAFGLRMQKVPAAEIEPRVMDALKMVRLESMAQRKPHQLSGGQQQRIAIARAVVNKPKVLLLDESLSALDYKLRKQMQIELKQLQRQLGITFIFVTHDQEEALSMSDRIIVMRSGVIEQDGSPREIYEDPKNLFVARFIGEINVFEATAKERLDENRIRAEIEGVDSVVYFDQPVTEGQKLQVLLRPEDLRIEEIKESEEKGIVGHVTERTYKGMTLDSVIETESGMRVMVSEFFNEDDPDVDHSLGQKVAITWVESWEVVLSDEQEI

SEQ ID NO: 65858 - DNA, 1140 bp, Bradyrhizobium japonicum USDA 110
  CDS (1)..(1140): transl_table=11
gtggtacaacgagcgcaaggacgagatcgaccagcgcgtcaaccggatcttccgcgcatgagcgcgtcgatcgagatcgccagcgtcagcaaggtctatgaaggcggcgtgcgcgcggtggacgcggtcgcgatggacatcaggcagggcgagttcttctccctgctcggcccgtccggctgcggcaagaccacgacgctgcgcatgatcgccggcttcgaaaccccgagcgcgggcgcgattcgcgtcgacggcgccgacatcacccatgtgcccgcgcacaagcgcgacatgggcatggtgttccagaactacgcgctgttcccgcatcggaccgtcgccgagaacgtcgccttcggcctgcgcatgcgcgggctcgacaaggcgagcatcgcagccaaggtgaaggcggcgctggccatggtcgagctgtccggcctcgaggaccgccgccctgcccagctctccggcggccagcagcagcgcgtggcgcttgcccgcgccatcgtgatcgcgccgcgcgtcctgctctgcgacgagccgctcggcgcgctggacaagaagctgcgtcagcagatgcagttcgagctcaagcagctccagaagaagctcggcctgaccctggtcttcgtcacccacgaccaggaggaggcgctggcgatgtccgaccgcatcgccgtgatgaacagcggccgtgtcgagcaggtcggcaccccgaccgagatctacaaccagccgacgacgcgcttcgtcgccgacttcatcggcgacaccaacatctttcgtggcgagcgcaccacgacgagcgcgggcggcccggcgctcgacgtcggcaagggtctgatcctggcgctgccgtcctccgaggcgcaaggcaccggcgttctctcggtcgctctgcgccccgaaaagattcgcttcatgccgcgcgctgacgccaccgcagccggcagctccgcccatggcatcgtcgagaataccaacttcctcggcggcgcggtgctctaccggatcacgctcgagggcggccatcgtgtcctcgtgcaacagcccaatgcaggcacgagccgcctgttcgtccccggcaacggtgtcacgctcgactggacgccggccgatctcgtcgtcttgaaggactag

SEQ ID NO: 65859 - protein, 379 aa, Bradyrhizobium japonicum USDA 110
MVQRAQGRDRPARQPDLPRMSASIEIASVSKVYEGGVRAVDAVAMDIRQGEFFSLLGPSGCGKTTTLRMIAGFETPSAGAIRVDGADITHVPAHKRDMGMVFQNYALFPHRTVAENVAFGLRMRGLDKASIAAKVKAALAMVELSGLEDRRPAQLSGGQQQRVALARAIVIAPRVLLCDEPLGALDKKLRQQMQFELKQLQKKLGLTLVFVTHDQEEALAMSDRIAVMNSGRVEQVGTPTEIYNQPTTRFVADFIGDTNIFRGERTTTSAGGPALDVGKGLILALPSSEAQGTGVLSVALRPEKIRFMPRADATAAGSSAHGIVENTNFLGGAVLYRITLEGGHRVLVQQPNAGTSRLFVPGNGVTLDWTPADLVVLKD

SEQ ID NO: 65860 - DNA, 1095 bp, Bradyrhizobium japonicum USDA 110
  CDS (1)..(1095): transl_table=11
atgaggtcttccgaagtcaggcttgaccgcctcagcaaggaatacaaccgcaccgtcgcggtcgacgatgtctcgctcacgatcgagccgggccacatggttgcgctgctcggtccgagcggatgcggcaagacgacctgcctgcgcatgatcgcggggctgatccgtccgacatccggcgacgtcttcgtgaacgacaagaagatgacggacgttccggtgcaccgccgcaacgtcgggatgttgttccagaactacgcgctgtttcctcacctgaccgtcgaggagaacatcgcattcggtctcgagatgcgcgggatatccaaggccgctgccgcaaggaaggtgggcgaagccctcaatctggtccagctgtcgagcttcgggaagcgctatccggcgcagctctccggtggtcagcagcagcgcgtcgcactggggcgcgccctggtgatcgagccggcgatgctgctgctggacgagccgctcggggcgctcgacaagggacttcgcgaaagcatgcaggtcgagctgcgggcccttcagcgcaggctcgggttgaccaccatcatggtgacccacgaccaggacgaagccctgacgatggccgacaagatcgtggtgatgcgcgatggcaagctcgagcaggtcggctcggcgaccgaaatctaccagcgtccggcctcgaaattcgtcgcacagttcatcggtgcgtcaaatctgtttgagggtctcatcgagcagcgaaacggaagcggagcggtcattcgtgtctcgcccgaattgagcctccaggtcgaccagattacgcaatcggcaagcgatgtgatggtctcgatcaggcccgaagcgatcttcgtcgagcgcgttggccagagtccgacggcgcaacgcgccaatagcgtgacggcgcgtgtcgaccaggccatttatcgcgggtttgtcagtcactactacctcaagacgccgagcggcggccagatcatcgtgttcgagcagaatcaatcgcagcaagcgggacttcgatacgccgtgggcgaggaggttgtcgcgcgatgggagtccccgagcaatcacgtcattgcccgtcactga

SEQ ID NO: 65861 - protein, 364 aa, Bradyrhizobium japonicum USDA 110
MRSSEVRLDRLSKEYNRTVAVDDVSLTIEPGHMVALLGPSGCGKTTCLRMIAGLIRPTSGDVFVNDKKMTDVPVHRRNVGMLFQNYALFPHLTVEENIAFGLEMRGISKAAAARKVGEALNLVQLSSFGKRYPAQLSGGQQQRVALGRALVIEPAMLLLDEPLGALDKGLRESMQVELRALQRRLGLTTIMVTHDQDEALTMADKIVVMRDGKLEQVGSATEIYQRPASKFVAQFIGASNLFEGLIEQRNGSGAVIRVSPELSLQVDQITQSASDVMVSIRPEAIFVERVGQSPTAQRANSVTARVDQAIYRGFVSHYYLKTPSGGQIIVFEQNQSQQAGLRYAVGEEVVARWESPSNHVIARH

SEQ ID NO: 65862 - DNA, 1110 bp, Bradyrhizobium japonicum USDA 110
  CDS (1)..(1110): transl_table=11
atggaagccggcatggtcacgcttgcgccggcactggtgcgattttccggcatacagaagacctatgatggcgagcacctcgtggtgaagaacctcgacctcgacatcaggaagggcgagttcatcaccctgctcggcccgtcgggctcgggcaagacgaccacgctgatgatgctggctggcttcgaggttccgacccatggcgagatctatctcgcagaccggccgatcaagaacatgccgccgcacaagcgcgacatcggcatggtgttccagaactatgccttgtttccgcacctgacgatcgcggagaatatcgccttcccgctctccgtccgcaaaatcaacaaggcggaagcgcaggagcgcgtcagggcggcgctccgcatgatcaagatggaaaccctggcgcaccggcggcccgggcagctgtccggcggtcagcagcagcgcgtggcgctcgcccgcgcgctggttttcaatccgcaactcgtgttgatggacgagccccttggcgccctcgacaagcgcctgcgggagcagatgcaactcgaaatcaagcaactgcacgagacgatgggcatcaccgtcgtctacgtcacccacgatcagagtgaagcgctcaccatgtcggaccgcattgccgtgttcaacgacggcatcgtgcagcagatcgacaggcccgacgcgctgtatgagcatccggtgaacagcttcgtcgctcacttcatcggcgagaacaatgtgctggccggcaccgtcgagacggtcgacaaggactattgccgcgtcgcgctggcgggcggcggcgccgtcaccgcacgggcggtcaatgtatcaggcgcgggcgcatcgacctccctgtcggtgcggccggagcgcgtcgccattgtcccggacggcacctccagcgaaggaccgaaccggctgccggccagggtgcagaacaccatctatctcggcgaccacgcgctggccgtgctcgatgtcgccggcaacggggagttcatggtcaagcttcagccgggggcgcatcacagtctcattcctggcgaaagcgtgttcatcaccttccggcccgaagattgcctcgccctcgatcctgtttga

SEQ ID NO: 65863 - protein, 369 aa, Bradyrhizobium japonicum USDA 110
MEAGMVTLAPALVRFSGIQKTYDGEHLVVKNLDLDIRKGEFITLLGPSGSGKTTTLMMLAGFEVPTHGEIYLADRPIKNMPPHKRDIGMVFQNYALFPHLTIAENIAFPLSVRKINKAEAQERVRAALRMIKMETLAHRRPGQLSGGQQQRVALARALVFNPQLVLMDEPLGALDKRLREQMQLEIKQLHETMGITVVYVTHDQSEALTMSDRIAVFNDGIVQQIDRPDALYEHPVNSFVAHFIGENNVLAGTVETVDKDYCRVALAGGGAVTARAVNVSGAGASTSLSVRPERVAIVPDGTSSEGPNRLPARVQNTIYLGDHALAVLDVAGNGEFMVKLQPGAHHSLIPGESVFITFRPEDCLALDPV

SEQ ID NO: 65864 - DNA, 1131 bp, Bradyrhizobium japonicum USDA 110
  CDS (1)..(1131): transl_table=11
atggcgcgcagtgaggcacgccggctcaggacatggcgaggtcgatcgttggacaaacgagcggaaagcgtcgagatcaggtccgcaagcaaggcttacggcgcggttcgcgccctcgacgacgtgtccctcaatgtcggcgccggtgagttcgtctccctgctcggcccgtccggttccggcaagaccacgctgctcggcatcctgggcggcttcatcctgccatccagcggcaccatcctgtttggcggccgcgacgtcacttacatgccgccgcacaagcgcgacatcggcgtcgtattccagaactacgcgctgttcccgcatatgagcgtcggcgagaacgtcgccttccccttgcgcgcgcgccacctgccgaaagcgagctggccgaacaaggtgcgcgcggcgctcgcgatggtcggccttgccggctacgaggaacgcggcatcgcgcagctctccggcggccagcgccagcgcgtggcgctggcacgcgccatgatcttcgagccgcgtctgatcctgatggacgagccgctatccgcgctcgacaagcagctgcgcgaatccatgcagatcgagctgcgcgcgctgcaccggcgcatcggcgccaccatcatctacgtcacccatgatcagcgcgaggcgctgaccatgagcgaccgcgtcgccgtgatgaaggacggccggctgatccagatcgacgagccggcacgtctgcacgaccatcccgccgattccttcgtcgcaagcttcatcggcgaggcgacgatgttgcccgtccgccgcgtcgatgcctccagcgtggcgctcggcagcgccctgttgcgcagtgcccgcgccattcccgacggcgacgccctgatgctggccgtgcacagcgagaagctgctgatcgacgacggcgcgcaggatgccgcctgcaaccggctcagcggcaccgtcaccgacatcgtctaccagggcgagagcctgcgcatcttcctggcgctcgaaggcggcgtcgcgctcagcctgcgccagccgagctaccaccaggcctacagccgcatcccgccgctcggcggcagcctcaccgtcaccctccaccccgaggacaccatcgtcgtgcccagggtgggggactga

SEQ ID NO: 65865 - protein, 376 aa, Bradyrhizobium japonicum USDA 110
MARSEARRLRTWRGRSLDKRAESVEIRSASKAYGAVRALDDVSLNVGAGEFVSLLGPSGSGKTTLLGILGGFILPSSGTILFGGRDVTYMPPHKRDIGVVFQNYALFPHMSVGENVAFPLRARHLPKASWPNKVRAALAMVGLAGYEERGIAQLSGGQRQRVALARAMIFEPRLILMDEPLSALDKQLRESMQIELRALHRRIGATIIYVTHDQREALTMSDRVAVMKDGRLIQIDEPARLHDHPADSFVASFIGEATMLPVRRVDASSVALGSALLRSARAIPDGDALMLAVHSEKLLIDDGAQDAACNRLSGTVTDIVYQGESLRIFLALEGGVALSLRQPSYHQAYSRIPPLGGSLTVTLHPEDTIVVPRVGD

SEQ ID NO: 65866 - DNA, 1173 bp, Bradyrhizobium japonicum USDA 110
  CDS (1)..(1173): transl_table=11
atggcggaagagttgcccggaacggacgtcgcggcggatacggccgctggagctgcatttcccgtagcgggtcagccgttgctgcgcatcgagggcgtcaccaagactttcgggacgttccgggccgtggacggtgtctcgctcgacatcaaggccggcgagtttttcgcgctgctcgggcctagcggctgcggcaagaccacgctgttgcgcatgctcgccggcttcgaggcgccggatgaggggcgtatcctgcttggcggcaaggacatcgcgcaggcgctgccgcatgagcgtccgatcaacatgatgttccagaactacgcgttgtttccgcacctctcggtgcgcgacaacatcgccttcggcctgaagcgcgccggcttggcgcgcgccgacatcgccacgcgcgttgcggagatgctcgcattggtgaagctcgagggcctcgagaagcgcaagcccgaccagctctccggcggccagcgccagcgcgtggcgctggcccgcgctttggcacgccggccgcaattgttgctgctcgacgagccgctcgccgcgctggacaagaagctgcgcgagagcacgcaaggcgagttgatggagctccagcgccggctcggcatgaccttcatcatcgtcacccacgatcaggaagaggcgatgacgatggcgagccagatcggggtgatgaaggccggcaagctcgcccaggtcgcgagcccccgcgagctctacgaggcgccgcgttcgcgctggatcgcggagttcgtcggcgacatcaatctgttcgacgccgagtccagattgcgcgacggccatcgtctggtcatcggcacgcgtgatgcggggacgctggtggtggccgagccgcgcgagccggtcggcgcgggaaaattgtcggtcgcgatccgtcccgagaaggtcaagctgtcgcgccgcggcccggtgagcgaggcaggttatgaaacggcgatcaaccggctggacggcgtgatcgccgacatctgctatctcggcggcaccaccacctacaaggtgaagctcgacaccggcgggatggtgcaggcgtccgtcgccaacagcgcgcgcctcgacgtcgacgcctacagcctgaaccagcacgtggtcgcctggttcacgcccgacgactgcgtggtgctgccgtcatga

SEQ ID NO: 65867 - protein, 390 aa, Bradyrhizobium japonicum USDA 110
MAEELPGTDVAADTAAGAAFPVAGQPLLRIEGVTKTFGTFRAVDGVSLDIKAGEFFALLGPSGCGKTTLLRMLAGFEAPDEGRILLGGKDIAQALPHERPINMMFQNYALFPHLSVRDNIAFGLKRAGLARADIATRVAEMLALVKLEGLEKRKPDQLSGGQRQRVALARALARRPQLLLLDEPLAALDKKLRESTQGELMELQRRLGMTFIIVTHDQEEAMTMASQIGVMKAGKLAQVASPRELYEAPRSRWIAEFVGDINLFDAESRLRDGHRLVIGTRDAGTLVVAEPREPVGAGKLSVAIRPEKVKLSRRGPVSEAGYETAINRLDGVIADICYLGGTTTYKVKLDTGGMVQASVANSARLDVDAYSLNQHVVAWFTPDDCVVLPS

SEQ ID NO: 65868 - DNA, 1098 bp, Bradyrhizobium japonicum USDA 110
  CDS (1)..(1098): transl_table=11
gtggaccaagcgctggaatcgcgaagtcgaacgctaatcgttcgcggcggagacagcgtcatggcctatctcgagctcgatcgggtcgccaagcagttcggagcacagactgtggtcgatgacgtcagtctgtcggtggggaagggggagttcatctccttcctcggcccgtccggctgcggcaagaccacgaccctgcagatgatcgcgggcttcctcgatcccacgcgcggcgcgattcgcctcgagggcaaggacctgaccgcgatccatccggccaggcgtggcctcggcatcgtgttccagagctacgcgctgtttccgcacatgaccgcggcggagaacgtcgccttcggcctcgagatgcgcaaggtgccgcgcgccgaaagggccgagcgcgttcgcgccgcgctcgcgatggtcggcctcgccggctacgaggatcgccatccgcgccgcatgtccggcggccagcagcagcgcgtggcgctggcgcgtgcgctggtgatcaagccgagcgtgctgctgctcgacgagccgctgtcgaacctcgatgccaagctgcgcgaggagatgcagatcgagctgcgccagatccagcgcaccatcggcaccaccacgatcctggtcacgcacgaccagaacgaggcgatgtcgctgtccgaccgcatcgtggtgatgagccagggcaagatcgagcagatcggcacgccgcaggagacctatgagaagcccgcctcggccttcgtctcgcagtttctcggcaagactaacgactttgccgcgacgatcgatcgggccacggcgcccgcgaagctggtggcgggctcctggagcgcgccggcaccagttggcctcagcggtcccgtcaccgtcagcattcgccctgaaagaattggttttggcgatacgggcctcagcgcaaagatcgtcacgcgcattttccagggcaatcactggctgttccagtgcgacagcgaatgtggtcctgcgatcgtgatccgccagaatgacggccagtcacagccggccgaaggcgagaccgttcgtcttgcatggcggcctgaggacatgagcgtgcgcggagctgccgcatga

SEQ ID NO: 65869 - protein, 365 aa, Bradyrhizobium japonicum USDA 110
MDQALESRSRTLIVRGGDSVMAYLELDRVAKQFGAQTVVDDVSLSVGKGEFISFLGPSGCGKTTTLQMIAGFLDPTRGAIRLEGKDLTAIHPARRGLGIVFQSYALFPHMTAAENVAFGLEMRKVPRAERAERVRAALAMVGLAGYEDRHPRRMSGGQQQRVALARALVIKPSVLLLDEPLSNLDAKLREEMQIELRQIQRTIGTTTILVTHDQNEAMSLSDRIVVMSQGKIEQIGTPQETYEKPASAFVSQFLGKTNDFAATIDRATAPAKLVAGSWSAPAPVGLSGPVTVSIRPERIGFGDTGLSAKIVTRIFQGNHWLFQCDSECGPAIVIRQNDGQSQPAEGETVRLAWRPEDMSVRGAAA

SEQ ID NO: 65870 - DNA, 1080 bp, Clostridium tetani E88
  CDS (1)..(1080): transl_table=11
atgtcttcaaaatacgtaaaattaaaagatataagtaaaatatataaaagtcctggtgggaagactttcacagcggtggataacgtatccttaaatatagaaccaggggaatttgtaactcttttaggtccttctggatgtggtaaaaccactacattgagaatgatagctggatttgaagtaccaacagaaggaggtattcatataggagaacaaagagtaaacaatcttactccagataaaagagatacagccatggtttttcaaacttatgcacttttcccccatttaaacatatttgaaaatatagcatatggattaaaaataaaaaaattatccaaaagtgaaatagcagataaggtaaaaaacatattagaactagtggggctttcaggtctagaaaatagagcaccaaatcagttatctggaggtcaacagcaaagagttgccttagcaagggcattggttatggaaccatctgttcttttgtttgatgaaccattatctaacttagatgctaagctaagagtttatatgagaacagagataagaagaattcaaaaaaatattggaataactagtgtatatgtaactcatgaccaagcagaagctatgagtatgtcagatagagtaattataatgaataagggaataatagagcaaataggaacacctcaagaaatatataatagtcctgctacagagtttgtagctgattttattggggtagctaatatttttgattcatctgtaaaagatatagaagatgattatgttagtatagaattatttgacaacatatataaggttaaggctaataaggcatttaaaaaaggagaaaaaataaaagcaattataagaccagaagcattatcttttggtgaagaaaatggaataaaagtgttagtggattattctgtatttatgggttcataccaagattataatttaaagtataaggattttgatattaaacttacagattataatccttcaagtaaaaaggtatatagtcaaggtgaatacgctttattgagtattaatgaagatagtatacatataatatctacagaaaaatag

SEQ ID NO: 65871 - protein, 359 aa, Clostridium tetani E88
MSSKYVKLKDISKIYKSPGGKTFTAVDNVSLNIEPGEFVTLLGPSGCGKTTTLRMIAGFEVPTEGGIHIGEQRVNNLTPDKRDTAMVFQTYALFPHLNIFENIAYGLKIKKLSKSEIADKVKNILELVGLSGLENRAPNQLSGGQQQRVALARALVMEPSVLLFDEPLSNLDAKLRVYMRTEIRRIQKNIGITSVYVTHDQAEAMSMSDRVIIMNKGIIEQIGTPQEIYNSPATEFVADFIGVANIFDSSVKDIEDDYVSIELFDNIYKVKANKAFKKGEKIKAIIRPEALSFGEENGIKVLVDYSVFMGSYQDYNLKYKDFDIKLTDYNPSSKKVYSQGEYALLSINEDSIHIISTEK

SEQ ID NO: 65872 - DNA, 1098 bp, Lactobacillus plantarum WCFS1
  CDS (1)..(1098): transl_table=11
ttggcggttaatacacaaccaatcattcgattgacaaatgtcactaaaagttacggggaacatcaagttttaaaaaacatcaacttagatcttgaagcgggcaaattctatacgttactcggtccgtctgggtgtggtaaaacaaccattctgcgtaccattgcggggtttacggatgccacttccggtcaagtttactttgacggtcaggtcatcaacaccctgccggccaatcagcggcaagtcaacacagtctttcaagattacgccctttttccacacatgaatgtcgcggaaaacgtggcatttggcttgaaattacacaaagttcccaaggatgaaatcgagacgcgggtccaaaaagcactcgcaatggtccaactagccgatcttggggaacgtgaaatcagtgagatctctggtggacaacaacaacgagttgccattgcccgggcacttgttatgcagcctaaggtcctcttactcgacgaaccgttatcggctctcgatgccaaactgcgtaaggatatgcaatatgagttgcgggaccttcaacaacgcctgggcatcacttttctctttgtcacccacgatcaggaagaagccttggccatgagtgatgaaatctttgtcatgaacgctggcgagattttacaaggtgggtccccagttgatatttacgatgaaccgatcaaccatttcgtggcgaacttcatcggtgaaagtaacattattccgggtaaaatgctcaaagattttgaagtagaatttgtcggcaaacaattcgaatgcgccgatgcgggaatgcagcctaatgaagctgtcgaagtcgttcttcggcctgaagatctcgacattgtggccgcgaatcaaggcaaattagtcgtcactgtcgactcccaactatttcgaggcaattatttcgaaatcgtcgcttacgataccgatcataacgaatggctcgttcattcaactaaccctgccgcagaaggcgaaccgatcggcctgacctttgacccacaagacattcacgtcatgcggttaaacgagagcgaagctgcttttgatgctcgtcttgaacaatacgaagatgattag

SEQ ID NO: 65873 - protein, 365 aa, Lactobacillus plantarum WCFS1
MAVNTQPIIRLTNVTKSYGEHQVLKNINLDLEAGKFYTLLGPSGCGKTTILRTIAGFTDATSGQVYFDGQVINTLPANQRQVNTVFQDYALFPHMNVAENVAFGLKLHKVPKDEIETRVQKALAMVQLADLGEREISEISGGQQQRVAIARALVMQPKVLLLDEPLSALDAKLRKDMQYELRDLQQRLGITFLFVTHDQEEALAMSDEIFVMNAGEILQGGSPVDIYDEPINHFVANFIGESNIIPGKMLKDFEVEFVGKQFECADAGMQPNEAVEVVLRPEDLDIVAANQGKLVVTVDSQLFRGNYFEIVAYDTDHNEWLVHSTNPAAEGEPIGLTFDPQDIHVMRLNESEAAFDARLEQYEDD

SEQ ID NO: 65874 - DNA, 1095 bp, Ruegeria sp. PR1b
  CDS (1)..(1095): transl_table=11
atgatcgacatttccgatgtcacccgaattttcgcaggcaccgtgcttgcgcttgactccgtctcgctgagcatcgaagcgggcgagttcgtcaccctgctcgggccgtccggctgtggcaagacgactttgctgcgcttgctggccgggttcgacacacccacaaaaggcaagatcctgctgaacgatgctgatgtaaccgacgtgccgccgtacgatcgcgatgtgaacatggtgtttcaggattatgccttgttcccccatctcagcgttggccgcaacgtcgcctttggactggaacggctgaaatggcccaaggccaaggtagccaccgctgtgcgcgacgcgctggatatggtcgaactcgcggacaagatcgaccgcatgccgcatgagctttccggagggcagcgtcagcgtgtagcactagcccgggcactggcgcgtggcccgaaggtgttactgttggatgaaccgctttcggcgctggacgccggtctgcgcgaggcgatgcaggtcgaactcaagcggctgcacaacaagctgggtatcaccttcgtcatggtcacccacgaccagaccgaagcactggccatgagcgaccgtattgtccttatgctggacgggcgagtggcacaggtcggcacgccggacgagttgtacaacgcccccgcctcgccctacgtggcgtccttcatcggcacgacgaacctgtttgatggccaagtaatcgactcttctgccgccgaattgctggtcgaaaccggggccggcagattgcactgcgcgccccgcaccgacattgcgcgcggcgcatcggtccgggtcggcatgcgccccgagcatctgcgccttgccgcagactccgaagcgagcgccgtcaacaccctgccctgccgaatcgaggacgccctgtttcacggcagtctcacccggttccgctgtgccactggcaccacgaccgaacagatctattgggactggcagaaatcggcccatcccgacgactccattcgcccgaccgaaggcagcaccgtgcatctttacgcgcctccggcggatatgtttgtctttccgcaggagggggcgcgatga

SEQ ID NO: 65875 - protein, 364 aa, Ruegeria sp. PR1b
MIDISDVTRIFAGTVLALDSVSLSIEAGEFVTLLGPSGCGKTTLLRLLAGFDTPTKGKILLNDADVTDVPPYDRDVNMVFQDYALFPHLSVGRNVAFGLERLKWPKAKVATAVRDALDMVELADKIDRMPHELSGGQRQRVALARALARGPKVLLLDEPLSALDAGLREAMQVELKRLHNKLGITFVMVTHDQTEALAMSDRIVLMLDGRVAQVGTPDELYNAPASPYVASFIGTTNLFDGQVIDSSAAELLVETGAGRLHCAPRTDIARGASVRVGMRPEHLRLAADSEASAVNTLPCRIEDALFHGSLTRFRCATGTTTEQIYWDWQKSAHPDDSIRPTEGSTVHLYAPPADMFVFPQEGAR

SEQ ID NO: 65876 - DNA, 1179 bp, Ruegeria sp. PR1b
  CDS (1)..(1179): transl_table=11
gtgctgcctcgttttcggaccctcagacggagtctctcgatgacacaggccgatacaccggcgcatacagagccctggaccgacgcaaacgcagcgccctttcttaaaatccagaacgtgaccaagaagttcggcgatttcgtcgcggtggaaaacgtctcgctcgacatttatcgcggcgagctgttctgcctgctgggcggatcaggctgtggcaaatccacactgctgcggatgatgtccggctttgaaaccacgaccagcggcaagatcatcatcgacggtcaggatcagaccggcgtgccgccgcacaagcgccagaccaacatgatgtttcagtcctacgcgctgtttccgcacatgagcgtggaaaagaacatcgcctacgggctgaagcgggacggcatcgcgcgggacgaggtgcacgcgcgggtcgcggacatgctgaaaatggtgcagatgtcgaaattcgcggcgcgcaagccgcaccagctttcgggtggacagcggcagcgcgtcgccctcgcccgcgcgctggtgaaaaagcccaagctgctgctgctggacgaaccgctgggcgcgctggacaagaagctgcgcgaggaaacccagttcgaactgatcaagatccaggaaagccttggcatcaccttcgtggtggtgacccacgatcaggaagaagcgatgaccctgtcgagccgcatcggcgtcatgacagacggcgagatcgtgcaggtcggcaccccgcgcgagatttacgaatacccgcagaaccgcttcgtcgcggacttcatcgggtcggtcaacaccttcgaaggccggatcgtcgaggacgaggtggatcacgtggtgattgcctcgccggacaccggaacaaatatcacggtcgatcacggggtcagctgtacgcttggtcagaaggtcgcgatcgcattgcgcccggaaaagatccagatgcgtcggcaaccgcttggggatctgcgcaacctgaccaccgggacggtgcgggaaatcggctatcttggcagccagtccatctatcatgtcgaattggacagcggaaagatcgtgcgcgtctctcggtccaacctgacgcgcagcgcagaggattccccgacatggggtgacaaggttttccttgggtggggcggcgcgtcgggcgttgtgatcacgtcatga

SEQ ID NO: 65877 - protein, 392 aa, Ruegeria sp. PR1b
MLPRFRTLRRSLSMTQADTPAHTEPWTDANAAPFLKIQNVTKKFGDFVAVENVSLDIYRGELFCLLGGSGCGKSTLLRMMSGFETTTSGKIIIDGQDQTGVPPHKRQTNMMFQSYALFPHMSVEKNIAYGLKRDGIARDEVHARVADMLKMVQMSKFAARKPHQLSGGQRQRVALARALVKKPKLLLLDEPLGALDKKLREETQFELIKIQESLGITFVVVTHDQEEAMTLSSRIGVMTDGEIVQVGTPREIYEYPQNRFVADFIGSVNTFEGRIVEDEVDHVVIASPDTGTNITVDHGVSCTLGQKVAIALRPEKIQMRRQPLGDLRNLTTGTVREIGYLGSQSIYHVELDSGKIVRVSRSNLTRSAEDSPTWGDKVFLGWGGASGVVITS

SEQ ID NO: 65878 - DNA, 1125 bp, Pseudomonas syringae pv. tomato str. DC3000
  CDS (1)..(1125): transl_table=11
atgagcgacgtcgatacaagcgctggagcgagtgatgttctggtcagctttcgtggtgtgcagaagagctacgacggcgaagcactgatcgtcaaagacctcaatctggacattcgcaaaggcgaattcctcaccctgctcgggccttccggctccggcaagaccaccagcctgatgatgctggccggcttcgaaacaccgaccgctggcgaaattctgctcggtggccgcgccatcaacaacgtgccgccgcacaagcgtgacatcggcatggtgttccagaactacgctttgtttccgcacatgacggttgccgagaacctcgcgttcccgctgtcggtgcgtggcatgagcaagaccgacgtcggcgaaaaagtcaaaaaggctctgggcatggtccagctcgacacgtttgcgcatcgctacccggcgcagctgtccggtggccagcagcaacgtgtagctctggcgcgcgcgttggtgttcgagccacaactggtgctgatggatgagccgctcggcgcgctcgacaaacaactgcgcgaacacatgcagatggagatcaagcatctgcaccagcgcctcggtgtgacagtggtctacgtgacccacgaccagggtgaagcactgaccatgtccgaccgggttgcggtcttccatcaaggtgagatccagcagatcgcgccgccacgcagcctgtacgaagagccgaaaaacaccttcgtagccaatttcatcggcgagaacaatcgactcaacgggcgtctggtcagccaggacggcgaccgctgcgtggtcgagctggagcgcggcgagaaagtgcacgcactggcgatcaacgtcggtcggccgggtggcccggtgacgctgtccattcgccccgaacgcatcaacctcaatggccgcagcgaaagctgtgtgaaccgtttctctggtcgagtggccgagtttatctacctcggcgaccacgtccgtgtgcgtctggaagttgccggcaagactgacttcttcgtcaagcagccgattgccgagctggacccgacgctgagtgtgggtgacgttgtgccgatcggttggcaagtcgagcacgtgcgtgcgctcgatcccctgcagcaagagcattga

SEQ ID NO: 65879 - protein, 374 aa, Pseudomonas syringae pv. tomato str. DC3000
MSDVDTSAGASDVLVSFRGVQKSYDGEALIVKDLNLDIRKGEFLTLLGPSGSGKTTSLMMLAGFETPTAGEILLGGRAINNVPPHKRDIGMVFQNYALFPHMTVAENLAFPLSVRGMSKTDVGEKVKKALGMVQLDTFAHRYPAQLSGGQQQRVALARALVFEPQLVLMDEPLGALDKQLREHMQMEIKHLHQRLGVTVVYVTHDQGEALTMSDRVAVFHQGEIQQIAPPRSLYEEPKNTFVANFIGENNRLNGRLVSQDGDRCVVELERGEKVHALAINVGRPGGPVTLSIRPERINLNGRSESCVNRFSGRVAEFIYLGDHVRVRLEVAGKTDFFVKQPIAELDPTLSVGDVVPIGWQVEHVRALDPLQQEH

SEQ ID NO: 65880 - DNA, 1029 bp, Pseudomonas syringae pv. tomato str. DC3000
  CDS (1)..(1029): transl_table=11
atggcatttctgcagctcgaaggtctctccaaacgctatggctctatagacgctgtggttgccacccacctgagtgtggacaagggcgaattcgtttcactgctcggcccttccggctgtggcaaaaccaccacgttgcaaatgatcgcaggcttcgttgaggtcagtgacgggcgcatcgtgctcgacggccgtgacatcactcatgccaaaccgagcagccgagggcttggcgtggtgtttcagagttatgcgctgttcccgcacatgaccgtggccgacaacgtggcgttcggcctgcgtatgcgcaaggtcgccaaagcagaattgcaacaacgggtcagcaaggtactcgcgctggtgcgtcttgatcagcacgccgagcgctacccccgcgagctgtcaggcggacaacggcagcgggtcgcgctggcccgggcgttggtgatcgagccgccggtgttgctgctggatgagccactgtcgaacctggatgccaacctgcgcgaagaaatgcagttcgagattcgccgtattcagaacgaagtgggcattaccacgctgatggtcacccacgatcaggccgaagccctgtcgatcagcgaccgggtggtagtcatgcaggccgggcgcatcactcagatcgacgcgccttacacgctttacgagcacccgcgcacgcgctttatctcgggctttgtcggcaaggccaacatggtgcaaggcgatctggacagcagcggcaccccgcagattcgccagttgcccggtgacggcgcgctgaccctgagcctgcgcccggagaaaatcgacctggtcgcacccggttgcgggcgtctgtcaggccgtatcaccacgcgctacttcctcggcagccaatggctgtatcgcattcagaccggcatcggtgaactgaccgtggtgcgtcgcaacgacgggcaagccccgctggagcaaggcgcagcagtcggcatggactggccggccgagttgctgcgtgtactggatgccgacgaggtgcgtgcatga

SEQ ID NO: 65881 - protein, 342 aa, Pseudomonas syringae pv. tomato str. DC3000
MAFLQLEGLSKRYGSIDAVVATHLSVDKGEFVSLLGPSGCGKTTTLQMIAGFVEVSDGRIVLDGRDITHAKPSSRGLGVVFQSYALFPHMTVADNVAFGLRMRKVAKAELQQRVSKVLALVRLDQHAERYPRELSGGQRQRVALARALVIEPPVLLLDEPLSNLDANLREEMQFEIRRIQNEVGITTLMVTHDQAEALSISDRVVVMQAGRITQIDAPYTLYEHPRTRFISGFVGKANMVQGDLDSSGTPQIRQLPGDGALTLSLRPEKIDLVAPGCGRLSGRITTRYFLGSQWLYRIQTGIGELTVVRRNDGQAPLEQGAAVGMDWPAELLRVLDADEVRA

SEQ ID NO: 65882 - DNA, 1155 bp, Pseudomonas syringae pv. tomato str. DC3000
  CDS (1)..(1155): transl_table=11
atgagtgccgtgatcaaagaccccgccccagcgcatcagaaaccgctggttgcgctgtgcaacctgaacaagcattacggtgacttcgcagccgtcgatgatatttctctggagattcaggacggtgaattcctgacgtttctgggctccagtggctcgggtaaaagcaccacgttgtcgatgctcgccggtttcgagacgcccagttcaggtgaaatcctggtcagcggcaaatcgctggtcaatgtgccgccgcacaagcgcgacatcggcatggtgttccagcgctactcgctgttcccgcacctgtcggttcgcgacaacattgccttcccgctggcgatccgcaagctgccagcagccgagcgcgaaaagaaggtcgatgccatgctcaagctggttcaactggaagccttcgctcatcgtcgcccttcgcaattgtccggtggccagcagcaacgggtcgccattgcccgggcgctggtttacgagccacgcatcctgctgatggacgaacccctcggtgcgctggacaagaagctgcgcgaagacctgcaggacgaattgcgccagttgcaccgcaggctaggcatcaccattgtctacgtgacccacgatcaggaagaagccatgcgcctgtcccagcgcatcgcgattttcagccacggcaagatcgtcggtctgggcaccggttacgacctgtatcagaacccgccgaatgcctttgtcgcctcgtttctgggcaactcgaacttccttaagctcaaggcacagggcaacgccgttgcgacgtttgaaggcagttcgctggcgattcggctgacctccaacctcaaaaccgatcaggacgtgctgctgatggtgcgcccggaaaaagcccaggcactgagtgtggcccaggccgccgccacgccgctggaagccggctggaacgaggtcagcgccactgtcaccgaggtgctgtttctcggcgaaagccagacgtgctcggtggtgaccactggcggcacagcgatgaccgtcaaagcgctgtccgccaccggcatgcccttaaaagccgcagatccggtgcgcgtgcgctgggccgccgccgatgcgtgtatctacaccgaatggaccgacagcgacctgaacaaggcggctggcgcgcactga

SEQ ID NO: 65883 - protein, 384 aa, Pseudomonas syringae pv. tomato str. DC3000
MSAVIKDPAPAHQKPLVALCNLNKHYGDFAAVDDISLEIQDGEFLTFLGSSGSGKSTTLSMLAGFETPSSGEILVSGKSLVNVPPHKRDIGMVFQRYSLFPHLSVRDNIAFPLAIRKLPAAEREKKVDAMLKLVQLEAFAHRRPSQLSGGQQQRVAIARALVYEPRILLMDEPLGALDKKLREDLQDELRQLHRRLGITIVYVTHDQEEAMRLSQRIAIFSHGKIVGLGTGYDLYQNPPNAFVASFLGNSNFLKLKAQGNAVATFEGSSLAIRLTSNLKTDQDVLLMVRPEKAQALSVAQAAATPLEAGWNEVSATVTEVLFLGESQTCSVVTTGGTAMTVKALSATGMPLKAADPVRVRWAAADACIYTEWTDSDLNKAAGAH

SEQ ID NO: 65884 - DNA, 990 bp, Pseudomonas syringae pv. tomato str. DC3000
  CDS (1)..(990): transl_table=11
atgagttttgtcagcattgaaaacctgcagaaaagctacgccagcacgtcagtgttcagcgacatcaactgccgcatcgctaaaggcgaatttgtcaccctgcttggcccgtcgggctgtggtaaatccaccttgctacgctgcattgccgggctgacgccggtcaatagcgggcgcattctgctcgatggcaatgacctggtgccgctcacgccgcaaaaacgcaatatcggcatggtgttccagagttacgcgctgttccccaacatgaccgtggagcagaacgtcgcgttcggcctgcgcatgcagaaagtcagcgcagacgacagtgaacggcgcgtcgccgagatcttgcggatggtcgagctgcatgatttcgccaagcgctacccgcatcaactgtccggcgggcaatgccaacgcgtggccctggcccgctcactggttacccgcccgcgcctgctgctgctcgatgaaccgctgtcggcgctggacgcgcggatccgcaagctgctgcgcgaacagatacgtgccattcagcgcgaattaggcctgacgaccattttcgtgacccacgatcaggaggaagcgctgaccatgtctgaccgcatctttctgatgaaccagggccggatcgtacagagcggcgatgcagaaaccctctacaccgcgccggtcgacgtgtttgccgccggtttcatcggcaactacaacctgctggaagccgaagacgccacgcgcctgatgcagcgcccgattgccagccgcatcgcgatccgccctgaatcgatccaattgagcctgaccggcgaactggaaggccaggttcgcagtcacagtctgctcggcaacgtcatccgctaccggatacaggcgcgtggcgtggacctggtggtcgacgtactcaaccgcagcgccgaagacctgcacccggacggccgacgcgttacgctgaacatcgagccctcggcgctgtgcgttctgaactga

SEQ ID NO: 65885 - protein, 329 aa, Pseudomonas syringae pv. tomato str. DC3000
MSFVSIENLQKSYASTSVFSDINCRIAKGEFVTLLGPSGCGKSTLLRCIAGLTPVNSGRILLDGNDLVPLTPQKRNIGMVFQSYALFPNMTVEQNVAFGLRMQKVSADDSERRVAEILRMVELHDFAKRYPHQLSGGQCQRVALARSLVTRPRLLLLDEPLSALDARIRKLLREQIRAIQRELGLTTIFVTHDQEEALTMSDRIFLMNQGRIVQSGDAETLYTAPVDVFAAGFIGNYNLLEAEDATRLMQRPIASRIAIRPESIQLSLTGELEGQVRSHSLLGNVIRYRIQARGVDLVVDVLNRSAEDLHPDGRRVTLNIEPSALCVLN

SEQ ID NO: 65886 - DNA, 1143 bp, Pseudomonas syringae pv. tomato str. DC3000
  CDS (1)..(1143): transl_table=11
atggcagttgcctccggcgcctacaagaaagccctcgaaggcggtcagcaacccaaagaggtgctggtcaggatcgatagggtcaccaagaagttcgacgagacgattgcggtggacgatgtgtccctgcagatcaacaagggcgaaatcttcgccctgcttggcggctctggctccggcaagtccacgctgctgcgcatgctggccggtttcgagcgcccgaccgaggggcgtatctacctcgacggcgtcgacatcaccgacatgccgccgtacgaacgtccgatcaacatgatgtttcagtcctatgcgctgttcccgcacatgaccgtggccgacaacatcgccttcggcctcaagcaggacaagctcgccaagtcggaaatcgaagcccgtgtggccgaaatgctcaagctggtgcagatgacccagtacgccaagcgcaagccgcatcagctttccggcggccagcgtcagcgtgttgcgctggcccgttcgctggccaaaaagcccaagctgctgctgctcgatgaaccgatgggcgcgctggacaagaaactgcgctcgcagatgcaactggagctggtggagatcatcgagcgcgttggcgtgacctgcgtgatggtgactcacgatcaggaagaggccatgaccatggccgagcgcatcgccatcatgcatctgggctggatcgcgcagatcggcagccctatcgacatctacgaaacccctaccagccgtctggtctgcgagttcatcggcagcgtcaacctgttcgagggtgaagtgatcgaggacatggaaggccatgcgctgatccgcagcccggagctggaacgcaacatttatgtcggccacggcgtcagtacgtcggtggaagacaagcacatcacctacgcattgcgcccggaaaaactgctgatcaccgctgaacaacccggtttcgaatacaactggtcgcgcggcaaggtccacgacattgcctacctgggcggccattcggtgttctacgtcgaactgccgggcggcaagctggtgcagtcgtttgtcgccaatgccgagcgtcagggcgcgcgacctacctggggcgatgaagtctacgtctggtgggaagacgacagcggcgtggtactgcgctcatga

SEQ ID NO: 65887 - protein, 380 aa, Pseudomonas syringae pv. tomato str. DC3000
MAVASGAYKKALEGGQQPKEVLVRIDRVTKKFDETIAVDDVSLQINKGEIFALLGGSGSGKSTLLRMLAGFERPTEGRIYLDGVDITDMPPYERPINMMFQSYALFPHMTVADNIAFGLKQDKLAKSEIEARVAEMLKLVQMTQYAKRKPHQLSGGQRQRVALARSLAKKPKLLLLDEPMGALDKKLRSQMQLELVEIIERVGVTCVMVTHDQEEAMTMAERIAIMHLGWIAQIGSPIDIYETPTSRLVCEFIGSVNLFEGEVIEDMEGHALIRSPELERNIYVGHGVSTSVEDKHITYALRPEKLLITAEQPGFEYNWSRGKVHDIAYLGGHSVFYVELPGGKLVQSFVANAERQGARPTWGDEVYVWWEDDSGVVLRS

SEQ ID NO: 65888 - DNA, 1122 bp, Vibrio parahaemolyticus RIMD 2210633
  CDS (1)..(1122): transl_table=11
atgagcacagcaaacaaggattatgtgagctttcaacatgttaagaaaacctacgacggtgcaaacttggtggttaaagacttcaacttagacatcgcacccggagagtttgtcaccatgttggggccttctggatcaggcaaaacaacgtgtctgatgatgctggcgggttttgaaacggcaacaggcggagggatttacattgatggcgttccggtaaacaatcttgcgccacataaacgcgacatcggaatggtatttcaaaactacgcgctgtttcctcacatgacgattgcggagaatctcgcttttcctctaaaagtgcgcaagctcgataatcaaaccattcaaaataaagtacagagcgcactggacatggtcgagttggggcacgttgccagccgttatccaaagcagttatctggcgggcagcaacaacgtgtcgcgttggcgagagcgcttgtgtttgaaccgaaactcgtcctgatggatgagcctttgggcgcgttggacaagcaacttcgtgagcaaatgcagatggagattaaacacctgcacgaaaagctcggtattacgattttatatgtcacgcatgaccaagatgaagcgctcactatgtctgaccgaatcgcagtttttaatcaaggcgaagtgcagcaacttgccccgccaacggaactgtatgaatctccgagtaacgcgttcgtcgctcagtttattggtgaaaataatcagctttctggtgtggtaaaagggtggcaatcagagcgatgccaagtccaggtcggccccgctcacttcgttgccaaaccggttcgagtgacccaaaacggcgagcgcaccaccttgtctattcgaccagagaaaatttccatccagcctgatgacgaatcgtgtgataaccaaattgaaggcgtactgcgtgagctaatttatcacggtgatcattatcggttagtggtcgacgttgaattggttggtcagtttgtcgtgaaagtgccgaacgacaaccgaacgcatctgaaccttattccgggaacggtttgtcgaattgggtggaaaagtacagattgccatgcgctagatgcgattcaaccagaaaccgaagaggtggcggcatga

SEQ ID NO: 65889 - protein, 373 aa, Vibrio parahaemolyticus RIMD 2210633
MSTANKDYVSFQHVKKTYDGANLVVKDFNLDIAPGEFVTMLGPSGSGKTTCLMMLAGFETATGGGIYIDGVPVNNLAPHKRDIGMVFQNYALFPHMTIAENLAFPLKVRKLDNQTIQNKVQSALDMVELGHVASRYPKQLSGGQQQRVALARALVFEPKLVLMDEPLGALDKQLREQMQMEIKHLHEKLGITILYVTHDQDEALTMSDRIAVFNQGEVQQLAPPTELYESPSNAFVAQFIGENNQLSGVVKGWQSERCQVQVGPAHFVAKPVRVTQNGERTTLSIRPEKISIQPDDESCDNQIEGVLRELIYHGDHYRLVVDVELVGQFVVKVPNDNRTHLNLIPGTVCRIGWKSTDCHALDAIQPETEEVAA

SEQ ID NO: 65890 - DNA, 1134 bp, Vibrio parahaemolyticus RIMD 2210633
  CDS (1)..(1134): transl_table=11
gtgggagaaatacagacgttgaacgctaaacagcaagcaggaaagccagttattcgtttatctggtatcagcaaaagtttcgatggaaaggaaatcatcggtaatttaaatcttgatgttaatcatggtgagtttctgacgattcttggtccatctggttgtggtaaaacgacggttttacgcatgatcgctggttttgaaacggcagataacggtcaaatcgtattagatgaccaagatgtaacgcaagttcctgcagagcataggcacgtcaacacggtatttcagagttacgcattattccctcacatgaccgtattcgataatgtggcatttggcctacgcatgcaaaaaacgcctgcggcagaaatcgaaccacgtgtaatggaagcgctacgtatggttcgcctagaaaaaatggcgcagcgtaagccgcaccaactttctggtggtcagcaacaacgtatcgcgatcgcgcgtgcggttgtaaataagccaaaagtactgctacttgatgaatcgctttctgctcttgattacaaacttcgtaaacaaatgcagattgagttgaaacaacttcagcgtcaacttggtattacctttatctttgttactcacgatcaggaagaagctctatcgatgtctgaccgcattatcgttatgcgcgatggtgttatcgaacaagatggctcaccacgtgaaatttacgaagaacctaaaaacttgtttgttgctcgctttatcggcgagattaatgtcttcaacgcaacaatgcttgaacgcattgatgaaaaacgcatccgtgcggaaatcgaaggtgttgagtctgtcgtttactacgacaaagaagcacaagcaggtgacaaactacaagtgctgcttcgccctgaagacttacgtatcgaagagatcaaagagtctgaagaaaaaggcattgttggtcacgtcactgaacgtacctataaaggtatgacgctagactctgttgtccaactggactcaggcatgcgcgtgatggttagcgagttctttaacgaagatgatccagatgtggaccactctctcggccaaaaagtcgctatcacttgggttgagagctgggaggtagtactcaatgataagcaagaagattaa

SEQ ID NO: 65891 - protein, 377 aa, Vibrio parahaemolyticus RIMD 2210633
MGEIQTLNAKQQAGKPVIRLSGISKSFDGKEIIGNLNLDVNHGEFLTILGPSGCGKTTVLRMIAGFETADNGQIVLDDQDVTQVPAEHRHVNTVFQSYALFPHMTVFDNVAFGLRMQKTPAAEIEPRVMEALRMVRLEKMAQRKPHQLSGGQQQRIAIARAVVNKPKVLLLDESLSALDYKLRKQMQIELKQLQRQLGITFIFVTHDQEEALSMSDRIIVMRDGVIEQDGSPREIYEEPKNLFVARFIGEINVFNATMLERIDEKRIRAEIEGVESVVYYDKEAQAGDKLQVLLRPEDLRIEEIKESEEKGIVGHVTERTYKGMTLDSVVQLDSGMRVMVSEFFNEDDPDVDHSLGQKVAITWVESWEVVLNDKQED

SEQ ID NO: 65892 - DNA, 1137 bp, Salmonella enterica subsp. enterica serovar Typhi Ty2
  CDS (1)..(1137): transl_table=11
atgggacagagtaagaaattgaataaacaaccgcgttcgctttcaccgctggtgcttttgtcgggaattagcaaaagtttcgatggcaaagaggtcatttcacagctggatttgaccattaacaatggcgaattcctcacgctgcttggcccttccggctgcggtaaaacaaccgttcttcgcctgattgccggcctggaaaccgttgatgccgggcatatcatgttggataaccaggatatcacccacgttcccgccgaaaatcgttatgtaaataccgtatttcaaagctacgctttatttccgcatatgacggtgtttgaaaatgtcgcgtttggcttacgaatgcaaaaaacaccagccgccgagatagcgcctcgcgtgaccgatgcgctgcgtatggtgcagcttgaagagtttgcacaacgtaaaccgcaccagctttccggcggacagcagcagcgtgtggctatcgctcgcgcggtggtgaataaacctcgcctgttattactggacgaatcgctctccgcgctggactataaattgcgcaaacaaatgcagaacgagcttaaagcattacagcgtaaactcggtatcacgtttgtttttgtcactcacgatcaggaagaagcgctcaccatgtccgatcgtatcgtggtaatgcgtaatggcgtgattgagcaagacggcacgccgcgtgaaatctatgaagagccaaaaaacctgtttgtcgccggttttatcggcgaaattaaccgctttgacgcaaccgtcattgaacggcttgatgaacagcgcgtccgcgccagcgtagaaggtcgggagtgcaatatatacgtcaatttcgctgtcgaactgggccaaaaactgaacgtcctgctgcgaccggaagatctacgcgtcgaagagatcaacgatgataaccacatcgaagggcttatcggctacgtgcgcgagcgcaattacaaaggtatgacgctggagtcggtggttgaactggaaaatggcaaaatggtgatggtcagcgaattcttcaacgaagacgatcctgacttcgaccattcacttgaccaaaaaatggccattagttgggtagaaagctgggaggtcgtactggctgatgaagaacacaagtaa

SEQ ID NO: 65893 - protein, 378 aa, Salmonella enterica subsp. enterica serovar Typhi Ty2
MGQSKKLNKQPRSLSPLVLLSGISKSFDGKEVISQLDLTINNGEFLTLLGPSGCGKTTVLRLIAGLETVDAGHIMLDNQDITHVPAENRYVNTVFQSYALFPHMTVFENVAFGLRMQKTPAAEIAPRVTDALRMVQLEEFAQRKPHQLSGGQQQRVAIARAVVNKPRLLLLDESLSALDYKLRKQMQNELKALQRKLGITFVFVTHDQEEALTMSDRIVVMRNGVIEQDGTPREIYEEPKNLFVAGFIGEINRFDATVIERLDEQRVRASVEGRECNIYVNFAVELGQKLNVLLRPEDLRVEEINDDNHIEGLIGYVRERNYKGMTLESVVELENGKMVMVSEFFNEDDPDFDHSLDQKMAISWVESWEVVLADEEHK

SEQ ID NO: 65894 - DNA, 1134 bp, Salmonella enterica subsp. enterica serovar Typhi Ty2
  CDS (1)..(1134): transl_table=11
gtgaatgatgccccccaccgcccgcaggtgaaaacccgtaaagcgctgacgccgcttctggaaattcgcaacctgacgaagtcattcgacgggcaacatgctgtcgatgatgtcagtctgactatctataaaggtgagatttttgccctgctgggcgcgtcaggttgtggaaaatcgactctgttacggatgctggcgggttttgaaccgccgagcagcgggcaaattatgctcgacggcgtcgatctggcgcatgttccgccgtatcagcgtccgattaatatgatgtttcagtcctatgcgttgtttccgcatatgacggtagagcagaacatcgcttttggtctgaagcaggacaaactgccgaaggcggagattaccagccgcgtcaatgagatgctgggtctggtgcacatgcaggagtttgcaaaacgtaagccgcatcagctttccggcggtcagcgtcagcgcgtggccctggcgcgcagcctggcgaaacgtcttaagctgctcttgttggatgaaccgatgggcgcgctggataaaaaattacgcgaccggatgcagctggaagtggtggatatccttgagcgcgtcggcgtgacttgcgtcatggtgacgcacgatcaggaagaagccatgacgatggcggggcgcattgccatcatgaaccgtggaaaatttgtgcaaattggcgaaccggaggagatttacgagcatccgacaacccgctatagcgccgaatttatcggatcggtaaatgtttttgagggcttactgaaagcgcgtgaagaggacggtctggtcattgacgcgcccggtttggttcatccgttaaaagtcgatgcagatgcctctgtcgttgataatgtgccggtatatgtggcgctacgtccggaaaaaatcatgctgtgtgagtcgccgcctgccgatggctataatttcgccgtcggcgaagtggcgcatattgcgtatctcggcgatctgtctatttatcatgtgcggctaaaaagcgggcagatgatcagcgctcaactgcagaatgcgcaccgttaccggaaagggttaccgacctggggcgatgaagtgcgtttgtgctgggaagcggatagctgcgtggtcctgacggtataa

SEQ ID NO: 65895 - protein, 377 aa, Salmonella enterica subsp. enterica serovar Typhi Ty2
MNDAPHRPQVKTRKALTPLLEIRNLTKSFDGQHAVDDVSLTIYKGEIFALLGASGCGKSTLLRMLAGFEPPSSGQIMLDGVDLAHVPPYQRPINMMFQSYALFPHMTVEQNIAFGLKQDKLPKAEITSRVNEMLGLVHMQEFAKRKPHQLSGGQRQRVALARSLAKRLKLLLLDEPMGALDKKLRDRMQLEVVDILERVGVTCVMVTHDQEEAMTMAGRIAIMNRGKFVQIGEPEEIYEHPTTRYSAEFIGSVNVFEGLLKAREEDGLVIDAPGLVHPLKVDADASVVDNVPVYVALRPEKIMLCESPPADGYNFAVGEVAHIAYLGDLSIYHVRLKSGQMISAQLQNAHRYRKGLPTWGDEVRLCWEADSCVVLTV

SEQ ID NO: 65896 - DNA, 1392 bp, Bacteroides thetaiotaomicron VPI-5482
  CDS (1)..(1392): transl_table=11
atgaatatgcaagaagacaaatccatcattgaggttagccatgtatcgaagttttttggcgacaaaacagctttggatgatgtaactctgaacgtgaaaaagggcgagtttgttacgattctcggaccttccggctgcggaaaaacgacattgttgcgtctcattgccggttttcagacagcttcggaaggcgaaatccgaatatcgggtaaggaaatcacacagactccaccccataaacgtccggtgaacacggtatttcagaaatatgccctgttcccgcatttgaatgtatacgacaatattgctttcggcctgaagctgaaaaagacgccgaaacagacaatcggcaagaaggtgaaagccgcattgaagatggttggtatgacggattacgagtatcgggatgtagattctctttccggtggccagcaacagcgtgtagctattgcccgtgccattgtcaatgagccggaagttttgctgctcgacgaaccgttggctgcgctcgacctcaaaatgcgcaaggatatgcagatggaactgaaagaaatgcataaatctctgggcattacatttgtatacgtaactcatgatcaggaagaagccttgacattgagtgatacgattgtcgtgatgagcgaaggaaaaatccagcagatcggtacgccgattgatatctataatgagccgatcaattcatttgttgcggattttatcggagaaagtaatattctcaacggaacgatgattcatgataaactggtacgcttttgtggtacggagtttgaatgcgtggacgaaggtttcggtgaaaatactccggtggacgtagtcattcgtccggaagacctttatattttcccggtttcggagatggcgcaactgaccggtgtggtacagacttcgatcttcaaaggggtacactatgaaatgactgtgctttgtggcggatatgagttccttgttcaggattatcatcattttgaagtcggtgcggaagtggggctgctggtgaagccgtttgatattcatattatgaagaaagaacgtgtatgcaatacatttgaaggaaagttgcaggatgctactcatgtagagttcctgggctgtacgttcgaatgtgcttctgtggaagggctggaatccggtacggatgtcaaggtcgaagtagactttgataaagtgatcttgcaggataacgaagaagacggtacgctgacgggagaagtgaagttcatcctttataaaggtgatcattaccatctgactgtatggtctgactgggacgagaatgtgtttgtggatacgaacgatgtctgggatgacggagaccgtgtgggtattactatccctccggatgcgattcgtgtaattaaaataaccgattaa

SEQ ID NO: 65897 - protein, 463 aa, Bacteroides thetaiotaomicron VPI-5482
MNMQEDKSIIEVSHVSKFFGDKTALDDVTLNVKKGEFVTILGPSGCGKTTLLRLIAGFQTASEGEIRISGKEITQTPPHKRPVNTVFQKYALFPHLNVYDNIAFGLKLKKTPKQTIGKKVKAALKMVGMTDYEYRDVDSLSGGQQQRVAIARAIVNEPEVLLLDEPLAALDLKMRKDMQMELKEMHKSLGITFVYVTHDQEEALTLSDTIVVMSEGKIQQIGTPIDIYNEPINSFVADFIGESNILNGTMIHDKLVRFCGTEFECVDEGFGENTPVDVVIRPEDLYIFPVSEMAQLTGVVQTSIFKGVHYEMTVLCGGYEFLVQDYHHFEVGAEVGLLVKPFDIHIMKKERVCNTFEGKLQDATHVEFLGCTFECASVEGLESGTDVKVEVDFDKVILQDNEEDGTLTGEVKFILYKGDHYHLTVWSDWDENVFVDTNDVWDDGDRVGITIPPDAIRVIKITD

SEQ ID NO: 65898 - DNA, 1086 bp, Enterococcus faecalis V583
  CDS (1)..(1086): transl_table=11
gtgagaaaccatgtgatttcatttgaaaatgttgtcaaacaatttgacgatgaaccagtattaaaaaatgtcagctttgaaattgaagaaggaaaattttatacgttattaggaccttcaggatgtggcaaaacaacgattttgcgtattattgcgggattcaatgacgtgacttctggcgatgtttattttgatggtaaaagaataaatgatgtacctgccaataaacgccaagtcaataccgtgtttcaggattatgctttgtttcctcacatgaatgtttttgataatgttgcgtttggtttaaaaatcaaaaaactatccaaagcagaaattgaaaaaaaagtgaaagaggcattacgtttggttcaattaccgggctacgaaacacgtgaaattagtgaaatgtctgggggccaacgtcagcgggtcgcaattgcacgagcgattgtcaatgagccaaaagtattgcttttagatgagccgttatccgctttagatttgaaattacgcacagcgatgcaatatgaactacgtgatttacaacaacgtttaggaattacttttatttttgtgacccatgatcaagaagaagcattagcgatgagtgatgaaatttttgtcatgaataaaggtcatatcgtgcaaagtggcacaccagtcgatatttatgatgaaccgattaatcactttgttgctgactttgtgggggaaagtaatattgtggatggcgtgatgctggaagataatttagtttcatttgtgggcaaaaagtttgaatgtgtcgatggcggcatgcggaaaaatgaacctgtagaagtcgttttacgtccagaagacttaacgattaccacgcttgaaaaaggcaagctaaccgtaacggtggacacgcagttattccgcggcgttcattatgaaattatttgttttgatgaacaaggaaacgaatggatggtgcattccactcgaaaagccaaagaaggcgctcaagtagggctctcttttgagccagaagatattcacgtgatgcgcttcaatgaatcagaagaagactttgatgcccgtttagaaagttacgacgagtaa

SEQ ID NO: 65899 - protein, 361 aa, Enterococcus faecalis V583
MRNHVISFENVVKQFDDEPVLKNVSFEIEEGKFYTLLGPSGCGKTTILRIIAGFNDVTSGDVYFDGKRINDVPANKRQVNTVFQDYALFPHMNVFDNVAFGLKIKKLSKAEIEKKVKEALRLVQLPGYETREISEMSGGQRQRVAIARAIVNEPKVLLLDEPLSALDLKLRTAMQYELRDLQQRLGITFIFVTHDQEEALAMSDEIFVMNKGHIVQSGTPVDIYDEPINHFVADFVGESNIVDGVMLEDNLVSFVGKKFECVDGGMRKNEPVEVVLRPEDLTITTLEKGKLTVTVDTQLFRGVHYEIICFDEQGNEWMVHSTRKAKEGAQVGLSFEPEDIHVMRFNESEEDFDARLESYDE

SEQ ID NO: 65900 - DNA, 1038 bp, Streptomyces avermitilis MA-4680
  CDS (1)..(1038): transl_table=11
atggaggcacgcgcgatccggctgcagggactgcggaaggtgttcggtgataccgccgccgtgaccggcgtcgacctggagatagccgacggagagttcttctcgatgctcggcccgtccggctccggcaagacgaccgtcctgcgtatgatcgcgggcttcgagagccccaccgccggccggatagagctggcgggccaggaggtcaccgggctcgcccccttcgaacgggacgtgcacaccgtcttccaggactacgccctgttcccgcacatgaccgtggaacagaacgtcgcctacggcctcaaggtccgcaaggtgcccagggtcgagcggctcgcccgggcccgcaaggcactcgccgacgtacgcctcgaagcgttcggcacccggcgcccatcccagctctccggcggtcagcgccagcgggtcgcgctcgcccgcgccctggtcggccgcccccgtgtgctgctgctcgacgaaccgctcggcgccctcgacctcaaactgcgcgagcagatgcaggtcgaactcaaggcgatccagcgcgaggtcggcatcaccttcgtgttcgtcacccacgaccaggaggaggccctgacgatgagcgaccgcatcgccgtcttcaaccggggccgcatcgaacaggtcggcaccccggccgagatctacgagcgcccctcgaccccgttcgtggcctcgttcgtcggcacctcgaacctcctgtcgggcgagtcggcacagcggatcgtcggcgcccccggcacgtacagcatcaggcccgagaagatccgggtccttggggagtccgcccacgcgggcgacccgcagtactccaccgccactggcaccgtcgtcgaggtggtctatctcggagacgtcacccgtttcctggtggacctggacgcgggcggccggctcaccgccctccagcagaacctggagacctcctccgcggacgtcgccgcgtatcgcggcacccgggtcaccctccagtggcaccgcggccacaccttcagggtccccgaagccggttga

SEQ ID NO: 65901 - protein, 345 aa, Streptomyces avermitilis MA-4680
MEARAIRLQGLRKVFGDTAAVTGVDLEIADGEFFSMLGPSGSGKTTVLRMIAGFESPTAGRIELAGQEVTGLAPFERDVHTVFQDYALFPHMTVEQNVAYGLKVRKVPRVERLARARKALADVRLEAFGTRRPSQLSGGQRQRVALARALVGRPRVLLLDEPLGALDLKLREQMQVELKAIQREVGITFVFVTHDQEEALTMSDRIAVFNRGRIEQVGTPAEIYERPSTPFVASFVGTSNLLSGESAQRIVGAPGTYSIRPEKIRVLGESAHAGDPQYSTATGTVVEVVYLGDVTRFLVDLDAGGRLTALQQNLETSSADVAAYRGTRVTLQWHRGHTFRVPEAG

SEQ ID NO: 65902 - DNA, 1164 bp, Streptomyces avermitilis MA-4680
  CDS (1)..(1164): transl_table=11
gtgacgacgatgaacaacacggacaacagcggcgacgtccgcctctccggaatcagcaagacctacggctccttcaccgccgtgcaaccgctcgacctgaccgtgccgcagggctcgttcttcgccctgctcggcgcttccggctgcggcaagaccaccacgctgcgcatgatcgcgggactggaggaaccttcctccggcaccgtgttcctcggcgaccaggaggtcacccacctgccgccctacaagcgaccggtgaacacggtcttccagtcgtacgccctcttcccgcacctcgacatcttcgagaacgtggccttcggcctgcgccggcgcggcatcaagtcggtgaagaagcaggtcgaggacatgctggacctcgtccagctcggcgagcaggcgcgcaagaaaccgcaccagctctccggcggccagcagcagcgcgtcgccgtcgcccgcgcgctgatcaaccaccccaaggtgctgctcctcgacgagcccctcggcgccctcgacctcaaactgcgccgtcagatgcagctggagctcaagcgcatccagaccgaggtcggcatcaccttcgtgcacgtcacccacgaccaggaggaggccatgaccatggccgacacggtcgccgtgatgaacgcgggccgcgtcgaacagctcggctcgcccgccgacctctacgagaacccgaacaccacgttcgtcgccaacttcctcggcacctccaacctcatcgaggcggaggtcgactccaagggcggcgacgagatcgtcctcagggcgggcggtggcaagctcacgctgcccacggcgcgatgttcggcggccacgacgaccggcggcaaggtccttgtgggcgtccgccccgagaagatctccctcacgcacgccgacgacgcgggcgagatcccggcgggccgcaaccggatcaccgggaagatcgccgactccagcttcatcggagtctccacccagtacgtcatcgacagcgcggtctgccccgagttcgaggtctacgcccagaacatcgaccgcgactcccggctcacccccggcgccgacgtcgtcctgcactggaacccggctcacaccttcggtctggacgccgcgcaggacatcgacgcgggcgtggagacggtcgaggaagaggccgcgtga

SEQ ID NO: 65903 - protein, 387 aa, Streptomyces avermitilis MA-4680
MTTMNNTDNSGDVRLSGISKTYGSFTAVQPLDLTVPQGSFFALLGASGCGKTTTLRMIAGLEEPSSGTVFLGDQEVTHLPPYKRPVNTVFQSYALFPHLDIFENVAFGLRRRGIKSVKKQVEDMLDLVQLGEQARKKPHQLSGGQQQRVAVARALINHPKVLLLDEPLGALDLKLRRQMQLELKRIQTEVGITFVHVTHDQEEAMTMADTVAVMNAGRVEQLGSPADLYENPNTTFVANFLGTSNLIEAEVDSKGGDEIVLRAGGGKLTLPTARCSAATTTGGKVLVGVRPEKISLTHADDAGEIPAGRNRITGKIADSSFIGVSTQYVIDSAVCPEFEVYAQNIDRDSRLTPGADVVLHWNPAHTFGLDAAQDIDAGVETVEEEAA

SEQ ID NO: 65904 - DNA, 984 bp, Bacillus cereus ATCC 14579
  CDS (1)..(984): transl_table=11
atgaaaaagattattaaagttgaagcagttgaaaaacattttggaaatcaagtgattatcccacctctttctttagatattaaagagggagagtttttaacaattttagggccgagtggctgcgggaaaacgactttacttcgtatgatcgcaggatttgaaactccaactaaagggaatcttttattagatgatgaaagaattaacgatttgccgccatataagcgtcatatgaacctagtgttccaacattacgcactattcccacatatgacagtagagaagaatatttgttttggtatgaaaatgcagaaagtatcagcagcagagcagaaagagcgtgctgaagaggcaatgcgtttaacgcagttacttgagttccgtaatcgtaaacctgcgaagctttctggtggacaacagcagcgtgttgcaattgcaagagcgattgtaaataatccgcgtgtattactattagatgagccacttggagcgcttgactttaagttacgaaaagacttgcaacgtgaattgaaaaacttacaacgtaatttaggaattacgttcatatacgtaacgcacgatcaagaagaagcaatgagcatgagcgatcgtattgtcgttatgaataaaggacatatcgaacaaatcggaacgccgaaagaaatttataataagccgaaaacattgttcgttgcgacattcatcggtgaaaataatattgtgaagaacggggaaggctatgtagcaattcgccctgaaaatgtaaaagtacgttcggttgaagaaccaattttaaaagaataccatcttggacatattgaagatattgagtttgtcggaaatatggagaagctttatgtacgtgatgagaaaacatcagaattactaatggcatatcaaactgctgaagaggcagcgcagtggagcattggagataatgtatatgtaggctgggagcaagaggacgaggtgaccttaaattga

SEQ ID NO: 65905 - protein, 327 aa, Bacillus cereus ATCC 14579
MKKIIKVEAVEKHFGNQVIIPPLSLDIKEGEFLTILGPSGCGKTTLLRMIAGFETPTKGNLLLDDERINDLPPYKRHMNLVFQHYALFPHMTVEKNICFGMKMQKVSAAEQKERAEEAMRLTQLLEFRNRKPAKLSGGQQQRVAIARAIVNNPRVLLLDEPLGALDFKLRKDLQRELKNLQRNLGITFIYVTHDQEEAMSMSDRIVVMNKGHIEQIGTPKEIYNKPKTLFVATFIGENNIVKNGEGYVAIRPENVKVRSVEEPILKEYHLGHIEDIEFVGNMEKLYVRDEKTSELLMAYQTAEEAAQWSIGDNVYVGWEQEDEVTLN

SEQ ID NO: 65906 - DNA, 1002 bp, Bacillus cereus ATCC 14579
  CDS (1)..(1002): transl_table=11
atgagcgaatatttatcaattcaacacattcaaaaacagtttgatgcatttacagcgttaaaagatatttcttttactgtgaaaaaaaatgagtttgtttgtttattaggcccaagtggctgtgggaaaacgacgttgcttcgcattttagcgggactagaggaaccaacgactggcagtatagctgtgaatggaaaagatattacagcattgcctcctggaaagagaaacttcggaatggttttccaatcgtatgctttatttccgaatttaacagcacttgaaaatattgaatacggcttaaagacaaaaaaatatgggaaagcagaagtgaaagagaaagcgctagatgcgttaaaacttgtagatttgctgaatgtaaaagataaatatcctgctcaaatgtctggtggacaacagcagcgagtagcacttgcacgtgcgctcgctctgtctccagatattttgttactcgatgagccgttatcagctttagatgcaaaagtgcgtgaaaaattacgtagggaaatgcgtgatttgcaagagaaaataggagtaacgacgattatggtaacgcatgatcaagaagaggcattaacgatggctgataaaattgttgtaatgaatcatgcggaaattatgcagattggaacaccagaggagatttatcaaagaccagccaatccgtttgtggcagattttattggttctattaatttcttttcgaaaaataacgaagaacatgcaattcgtcctgaacatgtaacaattgtacaaaaggacggtattaaatcagttgtggaaagtatggaatttcgcggatctgtatatcggacggaagtgcgagtcttagaagaaaacacacacctttataatgagaaaattgtagtggatatattagcatcagaagtagaagcaacggctattagaaaaggaaagccgattcaaatctctttctcagaaaatcatatgttgtcatatggaaagaaggtcattgtatag

SEQ ID NO: 65907 - protein, 333 aa, Bacillus cereus ATCC 14579
MSEYLSIQHIQKQFDAFTALKDISFTVKKNEFVCLLGPSGCGKTTLLRILAGLEEPTTGSIAVNGKDITALPPGKRNFGMVFQSYALFPNLTALENIEYGLKTKKYGKAEVKEKALDALKLVDLLNVKDKYPAQMSGGQQQRVALARALALSPDILLLDEPLSALDAKVREKLRREMRDLQEKIGVTTIMVTHDQEEALTMADKIVVMNHAEIMQIGTPEEIYQRPANPFVADFIGSINFFSKNNEEHAIRPEHVTIVQKDGIKSVVESMEFRGSVYRTEVRVLEENTHLYNEKIVVDILASEVEATAIRKGKPIQISFSENHMLSYGKKVIV

SEQ ID NO: 65908 - DNA, 1086 bp, Nitrosomonas europaea ATCC 19718
  CDS (1)..(1086): transl_table=11
atggcgttactcgagttgcgcgacgttacccggcgttttggcgacttcaccgcagtagactgcgtcaatctgtcgatcgaggcaggcgagctcttcaccttactgggtccgtccggctgcggaaaaacgacactcctgcgcatgattgccgggttcgatgtacctgattccggccaaatattgctggatggacaggatatcgccaacactccgcccgagaaacgtcctattcatacggtctttcagagctacgccctgtttccgcacatgacagtagcggacaatgttgctttcccattgaagatgtcgggaaagacacctgccgaaatcaaaaaacgagtagaaaaagcactggaagaagtacaactgtccagattcacacaccgttttccgcatgaactgtccggcggacaaaagcagcgggtggcatttgcccgcgggttgatcaaccggccacgcctgctgctgatggatgagccgctcggcgccttggacgcaaagctgcgggaagatatgcaacgggagctgatcagcctgcaaaaagaggtcggcatcactttcgtttttgtcactcactcgcaggatgaagcgctggcgctatcgcagcgaattgctgtcatgaatcaggggcaagtcgagcagatcggtgagccttccgtaatttacagccacccggccaatcgcttcattgccgacttcatcggtaagatcaatctgatggcagcacgggtaacacaggtttccgacaacgacatgacgctggaaatcgaccagctcggcaccaccacactcccactcaaacaaggtatcaaaaccggagatcagggcgtgatggcaatccgcccggaacaagtgagcgtacatgcactggccaggcatgcggaactgccccatgcccataccggcaaagtgctcgattttctctatgttggcgatgtcaccacctatatcgtcgaactggattgcggtatccgcgtggaagccctgctggcgaactcctcacccggacgcgcgcgtttctttgaagtgggtgatccggtcatcgtcagctggacacgggaagccgcccaatttctgatgaactga

SEQ ID NO: 65909 - protein, 361 aa, Nitrosomonas europaea ATCC 19718
MALLELRDVTRRFGDFTAVDCVNLSIEAGELFTLLGPSGCGKTTLLRMIAGFDVPDSGQILLDGQDIANTPPEKRPIHTVFQSYALFPHMTVADNVAFPLKMSGKTPAEIKKRVEKALEEVQLSRFTHRFPHELSGGQKQRVAFARGLINRPRLLLMDEPLGALDAKLREDMQRELISLQKEVGITFVFVTHSQDEALALSQRIAVMNQGQVEQIGEPSVIYSHPANRFIADFIGKINLMAARVTQVSDNDMTLEIDQLGTTTLPLKQGIKTGDQGVMAIRPEQVSVHALARHAELPHAHTGKVLDFLYVGDVTTYIVELDCGIRVEALLANSSPGRARFFEVGDPVIVSWTREAAQFLMN

SEQ ID NO: 65910 - DNA, 1131 bp, Bacillus anthracis str. Ames
  CDS (1)..(1131): transl_table=11
atggatacaagaagaaaaaaggagtgcaatcttgtgattgaattgaaaaatgtttcaaaggtatatcaaaatgcagaggagacagcggttaaaggtgtatcggttcatattaagaagggagaattttttgttttagttggcccttcaggatgtggaaaaagtacattattaagaatgattgctggtttagaagaaatttcttcgggggatttaattattaatgaacgtgttgcaaatgatttagagccgaaagatcgtaatctatcaatggtatttcaaaattatgcactatatccacacttatctgtagaagaaaatattttattcggacttaaggtaaggaaagtacaaaaagaagagcgacaaaagagattaatggaagctgtggaaatggtaggactgaaagagtatgtgaaaatgaaaccaggccaattatcaggtggacaaagacagcgtgttgcgcttgctagggcgattgtgagtcaagcgccgatttgtttaatggatgaaccactttcgaatttagatgcgaaattacgtgcgcaaatgaggattgaaattagagaaattcagcagcgtttaggaattacaatgatttacgttactcacgatcaaatagaagcgatgactatgggagatcgtattatggtcttaaataaaggaagcgtacagcaagttggaacaccgcttgatatatataacaaaccagcgaatgaatttgttgcaagttttatagggtctccttcgatgaatatgaatgatggagaagtagacgaagaaaaaggtgtattacatatagggcaattgcaaatcccattatctattggacaattaaagcaattaccagcaggaactgttcgagtaggcatgcgtccagaacatattgcattgtccgaggaaggacaagaagttacattgcaatctgtagaagtgttagggaatgaatctatattaaacttcgtgataaacggaacaacttggagtgcgaaagtcatcggacagttactcctgaataaaggtgacaaagtaaaattattattctcggaagaaaagttatgcttctttcatcaaaacacgaatgaacgcttaaaagtggtagctgaagaagagttgaaagtggtggcgaaataa

SEQ ID NO: 65911 - protein, 376 aa, Bacillus anthracis str. Ames
MDTRRKKECNLVIELKNVSKVYQNAEETAVKGVSVHIKKGEFFVLVGPSGCGKSTLLRMIAGLEEISSGDLIINERVANDLEPKDRNLSMVFQNYALYPHLSVEENILFGLKVRKVQKEERQKRLMEAVEMVGLKEYVKMKPGQLSGGQRQRVALARAIVSQAPICLMDEPLSNLDAKLRAQMRIEIREIQQRLGITMIYVTHDQIEAMTMGDRIMVLNKGSVQQVGTPLDIYNKPANEFVASFIGSPSMNMNDGEVDEEKGVLHIGQLQIPLSIGQLKQLPAGTVRVGMRPEHIALSEEGQEVTLQSVEVLGNESILNFVINGTTWSAKVIGQLLLNKGDKVKLLFSEEKLCFFHQNTNERLKVVAEEELKVVAK

SEQ ID NO: 65912 - DNA, 996 bp, Bacillus anthracis str. Ames
  CDS (1)..(996): transl_table=11
ttggacgggaaaatgaaaaagattattaaagttgaagcagtagaaaaacattttggaaatcaagtgattatcccaccgctttctttagatattaaagaaggggaatttttaacgattttagggccgagtggttgcgggaaaacgacgttacttcgtatgatcgcaggatttgaaacgccaactaaagggaatcttttattagatgatgaaaagattaacgatttgccaccatataagcgtcatatgaacctagtgttccaacattatgcgctattcccacacatgaatgtggagaaaaatatttgtttcggtatgaaaatgcagaaagtaccggtagcagagcagaaagagcgtgctgaagaggcaatgcgtttaacgcagttacttgagttccgtaatcgtaaacctgcgaagctttctggtggacagcagcagcgtgtagcaattgcgagagcaattgtaaataacccgcgtgtattattactagatgagccacttggggcgttagactttaagttaagaaaagacttgcaacgtgaattgaaaaacttacaacgtaatttaggaattacgttcatatacgtaacgcacgatcaagaagaagcgatgagcatgagtgatcgtatcgttgttatgaataaaggccatattgaacaaatcggaacaccgaaagaaatttataataagccgaaaacgttattcgttgcgacatttatcggtgaaaataatattgtgaaaaacggggaaggctatgtagcaattcgccctgaaaatgtaaaagtgcgttcggttgaagagccgattttaaaagaatatcaccttggacatattgaagacattgagtttgttggaaatatggaaaagctttatgtacgtgatgagaaaacatcagaattactaatggcatatcaaactgctgaagaagcagcgcagtggagcattggagataatgtatacgtaggctgggagcaagaggacgaggtgaccttaaattga

SEQ ID NO: 65913 - protein, 331 aa, Bacillus anthracis str. Ames
MDGKMKKIIKVEAVEKHFGNQVIIPPLSLDIKEGEFLTILGPSGCGKTTLLRMIAGFETPTKGNLLLDDEKINDLPPYKRHMNLVFQHYALFPHMNVEKNICFGMKMQKVPVAEQKERAEEAMRLTQLLEFRNRKPAKLSGGQQQRVAIARAIVNNPRVLLLDEPLGALDFKLRKDLQRELKNLQRNLGITFIYVTHDQEEAMSMSDRIVVMNKGHIEQIGTPKEIYNKPKTLFVATFIGENNIVKNGEGYVAIRPENVKVRSVEEPILKEYHLGHIEDIEFVGNMEKLYVRDEKTSELLMAYQTAEEAAQWSIGDNVYVGWEQEDEVTLN

SEQ ID NO: 65914 - DNA, 1116 bp, Haemophilus ducreyi 35000HP
  CDS (1)..(1116): transl_table=11
atggaaaagttagaacaaaaaacaatcgtcgaacttcgcaatgtgaccaagagttatggtgacaaaacgattcttaaagatttaaatttaactattaatgatggtgaatttttaactattttaggtccttcaggttgtggtaaaactacagcgttgcgtttaattgcaggttttgaagatttaaccgaaggttcaatcattcttgacggtcaagatgtttctaatgtgtctgctgaaaaacgtccagttaatactgttttccagagctatgcactttttcctcatatgaccatttttgaaaatgtggcgtttggattacgcatgcaaaaagtacctaatgagcaaattactccgcgggtaatggaagcattgcgaatggtccgtttggaagatcgagcagaacagaagccggctcaactttcaggtggtcaacaacaacgtattgcgattgcacgtgcggtagtaaacaaaccgaaagtgttattacttgatgaatcattgtcagcacttgattataaattgcgcaaagaaatgcagaatgaattaaaagcattacagcgtcaattaggtattacttttattttcgtgactcatgatcaggaagaagcgttgacgatgtcagatcgtattatcgtgatgaatgcgggcaaagtagctcaagatggtacgccacgtgaaatttatgaagaacccaaaaacctatttgtagcacgttttatcggtgaaattaatgtatttgatgcgactgttattgaacgtattgatgcgcgtaatgtaaaagcgaatgtggaagggcgcatttgtcacattaaagtggaagatatgcaagtcgtgccgaatcagaaactgaaagtattattacgtccggaagatattgtgattgaagagcttgatgaagaccaaagttctaaagcaattattggccacattattgatcgtaactataaaggaatgactttggaatcaagcgtaaaacttgatcataatggtatgaatgtattagttagcgaattttttaatgaagatgatccacatattgatcattccgttgggcagaaagtggcattgacgtggcatgaaggttgggaggttgtactcaacgatgaagattgctaa

SEQ ID NO: 65915 - protein, 371 aa, Haemophilus ducreyi 35000HP
MEKLEQKTIVELRNVTKSYGDKTILKDLNLTINDGEFLTILGPSGCGKTTALRLIAGFEDLTEGSIILDGQDVSNVSAEKRPVNTVFQSYALFPHMTIFENVAFGLRMQKVPNEQITPRVMEALRMVRLEDRAEQKPAQLSGGQQQRIAIARAVVNKPKVLLLDESLSALDYKLRKEMQNELKALQRQLGITFIFVTHDQEEALTMSDRIIVMNAGKVAQDGTPREIYEEPKNLFVARFIGEINVFDATVIERIDARNVKANVEGRICHIKVEDMQVVPNQKLKVLLRPEDIVIEELDEDQSSKAIIGHIIDRNYKGMTLESSVKLDHNGMNVLVSEFFNEDDPHIDHSVGQKVALTWHEGWEVVLNDEDC

SEQ ID NO: 65916 - DNA, 1077 bp, Bordetella pertussis Tohama I
  CDS (1)..(1077): transl_table=11
atgtcccggggcagcgacgcattcctgtcgatacgcaatctggtcaagcactatggcgcccatcgggcgctggccgacgtgtcgctggacatcggggcgggcgagctggtgtgcctgctcggcccctcgggctgcggcaagaccaccctgctgcgcgccatcgccggcctggagcgccaggacggcggcgccatcgtgctgggcggccgcgatatctcgaacgagccgccgcaggcgcgcgactacggcatcctgttccagtcgtatgcgctgtttcccaacctgacggtggcgcagaacgtggcctacgggctgagcggccggcgcggcgaccgcgagcgcgtggccgcccgcgtcgatgaaatgctggccctggtcgggctgagcggcgcggcccgcaagtatccggggcagatttccggcggccagcagcagcgcgtggcgctggcgcgcgccctggcgccggcgccgtcgctgctgctgctcgacgagcccatgtcggcgctggatgcgcgcgtgcgcgaccgcctgcgcggcgaactgcgcgccttgcagcggcgcctttccatcaccacgctgatggtgacccacgaccaggaagaggccatggtcatggccgaccggatcgcggtgatgaacggcggcgtcatcgagcagtacggcacgccgcgcgaactctatcgcgatccccgttcggcattcatcgccgacttcgtgggcgaggccaactggctgcggtaccagcgcatcgacgcccaccgcgcgcgcgtcggccagctcgaactggacgtcgagcagccgctggaggccgacagcggccgcctgttcgtgcggccggaggcggtgcggctgagcgcatcgggtacgccggcctcggccaacaccgtgctggccgatgtgctcgatggcgttttcctggggcgcggctatcgcatctcgctgcggctggaaggaataccgggcgccaccgtgcagtccgtggtttccgctgaaaccggtgacgccctgctgggcgcccatgctgccggccgttgctgggtggagctgccgcgccatgcgctaagtgcctacgcttga

SEQ ID NO: 65917 - protein, 358 aa, Bordetella pertussis Tohama I
MSRGSDAFLSIRNLVKHYGAHRALADVSLDIGAGELVCLLGPSGCGKTTLLRAIAGLERQDGGAIVLGGRDISNEPPQARDYGILFQSYALFPNLTVAQNVAYGLSGRRGDRERVAARVDEMLALVGLSGAARKYPGQISGGQQQRVALARALAPAPSLLLLDEPMSALDARVRDRLRGELRALQRRLSITTLMVTHDQEEAMVMADRIAVMNGGVIEQYGTPRELYRDPRSAFIADFVGEANWLRYQRIDAHRARVGQLELDVEQPLEADSGRLFVRPEAVRLSASGTPASANTVLADVLDGVFLGRGYRISLRLEGIPGATVQSVVSAETGDALLGAHAAGRCWVELPRHALSAYA

SEQ ID NO: 65918 - DNA, 1128 bp, Bordetella parapertussis 12822
  CDS (1)..(1128): transl_table=11
atgagcgacatccgctattcggcgcagcattccgccgatccggacgaattcgtcaaggtctccgacgtcgtcaagattttcggcgacgtggtggccgtgcagtcggtcaacctgtccgtacggcgcaacgagatcttcgcgctgctgggcagctctggcagcggcaagtcgacgctgctgcgcatgctggccggcttcgaggacgccacctcggggcagatcctgctcgacggcgaggacatcaccaatgtgccgccgtaccgccggccggtgaacatgatgttccagtcgtacgcgctgtttccgcacatgacggtcgaggccaacgtggccttcggcctgaagcaggaaggggtggaccgcgccgagatccatgaccgcgtgttcgaggcgctggacctggtccagatggccggctacgcgcgccgcaagccgcaccagctgtccggcgggcagcagcagcgcgtggcgctggcgcgcagcctggtcaagcggcccaagctgctgttgctcgacgagccgatgtcggcgctggacaagcagatccgccagaaaacgcagatcgagctggtcaagatcctgcagcaggtcggcgtgacctgcatcatggtgacgcacgaccagcaagaggccatgaccatggcgcaccgcctggccgtcatgaccgaaggccagatcgtgcagtgcggcaccccgcaggacgtctacgagtttccgaattcgcgtttcgtggcgggcttcatcggctcgaccaacctgttctcgggcaccatcgtggtcgacgagcccgaccatgtcgccatcgagtcgggcgagctgacccggccgctgtacgtcagccacggcgtaagcgagccgctgggcatggaagtgcacgtatcgatccggcccgagcggctggtggtcctgcgcgagcagcccgaggccgagcacaactgggcgcatggcatggtcacccacatggcctggatgggcagctacggcctctaccagatccgcctggactcgggcaagatcgtcgaggccagcgtccccagcctgcaactggcgcgccaggacgcgcccggcatcgacgaggaggtcttcgtcagctgggacgccgatagcgcgacggtgttctcgtcatga

SEQ ID NO: 65919 - protein, 375 aa, Bordetella parapertussis 12822
MSDIRYSAQHSADPDEFVKVSDVVKIFGDVVAVQSVNLSVRRNEIFALLGSSGSGKSTLLRMLAGFEDATSGQILLDGEDITNVPPYRRPVNMMFQSYALFPHMTVEANVAFGLKQEGVDRAEIHDRVFEALDLVQMAGYARRKPHQLSGGQQQRVALARSLVKRPKLLLLDEPMSALDKQIRQKTQIELVKILQQVGVTCIMVTHDQQEAMTMAHRLAVMTEGQIVQCGTPQDVYEFPNSRFVAGFIGSTNLFSGTIVVDEPDHVAIESGELTRPLYVSHGVSEPLGMEVHVSIRPERLVVLREQPEAEHNWAHGMVTHMAWMGSYGLYQIRLDSGKIVEASVPSLQLARQDAPGIDEEVFVSWDADSATVFSS

SEQ ID NO: 65920 - DNA, 1086 bp, Bordetella bronchiseptica RB50
  CDS (1)..(1086): transl_table=11
atgaagaaagtcagcgtcgaatgccgcaacatccggctttcctatggcaggaacgaagtcctcaaggacatcagcatccatatcgagcccggcgaattcttcgccctgctcggcccgtcgggatcgggcaaatccaccctgctgcgcctgatcgccggcttcaaccggcaaagccatgggcagctgctggtcgacggccgcgacatcggcgccacgccgccctgggaccgcaatatcggcatggtgttccagaactatgcgctgtggccgcacatgacggtgtgggacaacgttgccttcggcctggtcgagcggcgcctgccgcgcgccgagatccgcgacaaggtcgccgccgcgctcgaactcgtgggcctggccgacttcgggcggcgccgtcccaaccaactgtccggcggccagcagcagcgcgtggcgctggcgcgcaccattgtcatcgagccgcaggtgctgctgctggacgaacccctgtccaacctggacaagaagctgcgggtgcagatgcgccaggacctgctgtcgctgcagcggcggctgggcatcaccaccatcttcgtcacccacgaccaggaagaggccatgaccacggccgaccgcatggcggtgctggaccatggcgtggtgcagcagatcggcgcgcccagcacgctgttcgactatccggtcaaccgcttcgtggccaacttcgtcggcaccatgaacgtgctggaaggcgaggtgcgcgagcgctcgcgcggcggcgtggtgctggccgtcgacggcgtgggcgagctgcacctgccggtcaatggcgacgcgccgcaggccgggcgcctcgcggccagtttccggccccacactgtgctgatcgaaatggccgacggcacgggcgacgcgcgctatgtgtggctgcccggcgtggtcgaaagcagcgagttcctgggcgagttcacccgctaccaggtgcaggtcggcgaacagcggctgacggcggaccagcaccatctggccggcctgtcgccgtttcccgtcggcgcgcccgtggccgtgggcctggagcccacccagatcaggctgctggcggcatga

SEQ ID NO: 65921 - protein, 361 aa, Bordetella bronchiseptica RB50
MKKVSVECRNIRLSYGRNEVLKDISIHIEPGEFFALLGPSGSGKSTLLRLIAGFNRQSHGQLLVDGRDIGATPPWDRNIGMVFQNYALWPHMTVWDNVAFGLVERRLPRAEIRDKVAAALELVGLADFGRRRPNQLSGGQQQRVALARTIVIEPQVLLLDEPLSNLDKKLRVQMRQDLLSLQRRLGITTIFVTHDQEEAMTTADRMAVLDHGVVQQIGAPSTLFDYPVNRFVANFVGTMNVLEGEVRERSRGGVVLAVDGVGELHLPVNGDAPQAGRLAASFRPHTVLIEMADGTGDARYVWLPGVVESSEFLGEFTRYQVQVGEQRLTADQHHLAGLSPFPVGAPVAVGLEPTQIRLLAA

SEQ ID NO: 65922 - DNA, 1077 bp, Bordetella bronchiseptica RB50
  CDS (1)..(1077): transl_table=11
atgtcccggggcagcgacgcattcctgtcgatacgcaatctggtcaagcactatggcgtccatcgggcgctggccgacgtgtcgctggacatcggtgcgggcgagctggtgtgtctgctcggcccctcgggctgcggcaagaccaccctgctgcgcgccatcgccggcctggagcgccaggatggcggcgccatcgtgctgggcggccgcgatatctcgaacgagccgccgcaggcgcgcgactacggcatcctgttccagtcgtatgcgctgtttcccaacctgacggtggcgcagaacgtggcctatgggctgagcggccggcgcggcgaccgcgagcgcgtggccgcccgcgtcgatgaaatgctggccctggtcgggctgagcggcgcggcccgcaagtatccggggcagatttccggcggccagcagcagcgcgtggcgctggcgcgcgccctggcgccggcgccgtcgctgctgctgctcgacgagcccatgtcggcgctggatgcgcgcgtgcgcgaccgcctgcgcggcgaactgcgcgccttgcagcggcgcctttccatcaccacgctgatggtgacccacgaccaggaagaggccatggtcatggccgaccggatcgcggtgatgaacggcggcgtcatcgagcagtacggcacgccacgcgaactctatcgcgatccccgttcggcattcatcgccgacttcgtgggcgaggccaactggctgcagtaccagcgcatcgacgcccaccgcgcgcgcgtcggccagctcgaactggacgtcgagcagccgctgcaggccgacagcggccgcctgttcgtgcggccggaggcggtgcggctgagcgcatcgggtacgccggcctcggccaacaccgtgctggccgatgtgctcgatggcgttttcctggggcgcggctatcgtatctcgctgcggctggaaggaataccgggcgccaccgtgcagtccgtggtttccgctgaaaccggtgatgccctgctgggcgcccatgctgccggccgttgctgggtggagctgccgcgtcatgcgctacgtgcctacgcttga

SEQ ID NO: 65923 - protein, 358 aa, Bordetella bronchiseptica RB50
MSRGSDAFLSIRNLVKHYGVHRALADVSLDIGAGELVCLLGPSGCGKTTLLRAIAGLERQDGGAIVLGGRDISNEPPQARDYGILFQSYALFPNLTVAQNVAYGLSGRRGDRERVAARVDEMLALVGLSGAARKYPGQISGGQQQRVALARALAPAPSLLLLDEPMSALDARVRDRLRGELRALQRRLSITTLMVTHDQEEAMVMADRIAVMNGGVIEQYGTPRELYRDPRSAFIADFVGEANWLQYQRIDAHRARVGQLELDVEQPLQADSGRLFVRPEAVRLSASGTPASANTVLADVLDGVFLGRGYRISLRLEGIPGATVQSVVSAETGDALLGAHAAGRCWVELPRHALRAYA

SEQ ID NO: 65924 - DNA, 1089 bp, Bordetella bronchiseptica RB50
  CDS (1)..(1089): transl_table=11
atggaaggtcactccccgcagcgcggctcccgaatcctcgagatatccggcgtcaccaaaacgttcggtccgaccacggccctggccggcatagacctggacgtgcgcgaaggcgaattcctcaccttgctgggccccagcggctgcggcaagaccacgctgatccgcatcatcgccggcttcgagacgcccaccgccggcgacgtgcgcatcgacggccgctccatcgtcgccgcgccgccctaccgccgcccgctgggcatggtgttccagagcctggcgctgtttccccatctcaacgtggccgagaacatcggctatggcctgaagatccgccgcgtgccgccggcccggcgccaggccaaggtggcgcaggcgctggagatggtgggcctggccggctacggcgagcgctacatcggccagatatccggcggccagaagcagcgcgtggcgctggcccgcgccatcgtgaccgagccgcgcgtgctgctgctcgacgagccgctgggcgcgctggacatgaagatccggcgccagatgcagaccgaactcaagcagatccaggagtcgctgggcacgaccttcatcttcgtcacgcacgaccaggaggaagccctgaccatgtccgaccgcatcgcggtgttccgcaacggcgcgatcgagcaggtcgacacgccggccgccgtctacgaacgtccggctacccgcttcgtggccgagttcgtcggcgacaccaattttctcgaaggcaccgtcgaccgccaggccggcggcgcgccgcgcgtgcggctggccgactgggattgcagcctgcagccgcccgccgcgcagtgggccgagggcgcgcgggtcggcgtctcgctgcgcccgcaacacttgcgcatcgccgcgctcgagcaaggccgcctgcgcgccaccgtgctgcgccgcgtctatgccgggcagaacacacgcctgtggctggccgtgggccagcgcaagctgctggccgactggcacggcgccgaggacggcgcgccgcccgagccgggcgccaccgtcggcctgacctgggacgaccggcgcgtctgtgtcgtttccctttga

SEQ ID NO: 65925 - protein, 362 aa, Bordetella bronchiseptica RB50
MEGHSPQRGSRILEISGVTKTFGPTTALAGIDLDVREGEFLTLLGPSGCGKTTLIRIIAGFETPTAGDVRIDGRSIVAAPPYRRPLGMVFQSLALFPHLNVAENIGYGLKIRRVPPARRQAKVAQALEMVGLAGYGERYIGQISGGQKQRVALARAIVTEPRVLLLDEPLGALDMKIRRQMQTELKQIQESLGTTFIFVTHDQEEALTMSDRIAVFRNGAIEQVDTPAAVYERPATRFVAEFVGDTNFLEGTVDRQAGGAPRVRLADWDCSLQPPAAQWAEGARVGVSLRPQHLRIAALEQGRLRATVLRRVYAGQNTRLWLAVGQRKLLADWHGAEDGAPPEPGATVGLTWDDRRVCVVSL

SEQ ID NO: 65926 - DNA, 1128 bp, Bordetella bronchiseptica RB50
  CDS (1)..(1128): transl_table=11
atgagcgacatccgctattcggcgcagcattccgccgatccggacgaattcgtcaaggtctccgacgtcgtcaagattttcggcgacgtggtggccgtgcagtcggtcaacctgtccgtacggcgcaacgagatcttcgcgctgctgggcagctctggcagcggcaagtcgacgctgctgcgcatgctggccggcttcgaggacgccacctcggggcagatcctgctcgacggcgaggacatcaccaatgtgccgccgtaccgccggccggtgaacatgatgttccagtcgtacgcgctgtttccgcacatgacggtcgaggccaacgtggccttcggcctgaagcaggaaggggtggaccgcgccgagatccatgaccgcgtgttcgaggcgctggacctggtccagatggccggctacgcgcgccgcaagccgcaccagctgtccggcgggcagcagcagcgcgtggcgctggcgcgcagcctggtcaagcggcccaagctgctgttgctcgacgagccgatgtcggcgctggacaagcagatccgccagaaaacgcagatcgagctggtcaagatcctgcagcaggtcggcgtgacctgcatcatggtgacgcacgaccaggaagaggccatgaccatggcgcaccgcctggccgtcatgaccgaaggccagatcgtgcagtgcggcactccgcaggacgtctacgagtttccgaattcgcgtttcgtggcgggcttcatcggctcgaccaacctgttctcgggcaccatcgtggtcgacgagcccgaccatgtcgccatcgagtcgggcgagctgacccggccgctgtacgtcagccacggcgtaagcgagccgctgggcatggaagtgcacgtatcgatccggcccgagcggctggtggtcctgcgcgagcagcccgaggccgagcacaactgggcgcatggcatggtcacccacatggcctggatgggcagctacggcctctaccagatccgcctggactcgggcaagatcgtcgaggccagcgtccccagcctgcaactggcgcgccaggacgcgcccggcatcgacgaggaggtcttcgtcagctgggacgccgatagcgcgacggtgttctcgtcatga

SEQ ID NO: 65927 - protein, 375 aa, Bordetella bronchiseptica RB50
MSDIRYSAQHSADPDEFVKVSDVVKIFGDVVAVQSVNLSVRRNEIFALLGSSGSGKSTLLRMLAGFEDATSGQILLDGEDITNVPPYRRPVNMMFQSYALFPHMTVEANVAFGLKQEGVDRAEIHDRVFEALDLVQMAGYARRKPHQLSGGQQQRVALARSLVKRPKLLLLDEPMSALDKQIRQKTQIELVKILQQVGVTCIMVTHDQEEAMTMAHRLAVMTEGQIVQCGTPQDVYEFPNSRFVAGFIGSTNLFSGTIVVDEPDHVAIESGELTRPLYVSHGVSEPLGMEVHVSIRPERLVVLREQPEAEHNWAHGMVTHMAWMGSYGLYQIRLDSGKIVEASVPSLQLARQDAPGIDEEVFVSWDADSATVFSS

SEQ ID NO: 65928 - DNA, 1176 bp, Chromobacterium violaceum ATCC 12472
  CDS (1)..(1176): transl_table=11
atgtcggaagccatcgcggccagcaagcaagcagccagccccatcgccagcgccgccccggcgcatgccgtcgccgggaacgaaccgccgtatctgcggatcagcggcgtggtgaagaagttcggcgaccacctggcggtggatcatatcgacctcgacatccgccgcaacgagatcttcgccttgctgggcagctccggctgcggcaagtccacgctgctgcgcatgctggcgggcatggagacgcccaccgccgggcgcatcatcctggacgggcaggacatgcagggactgcggccgtacgagcggccggtcaacatgatgttccagaattacgcgctgttcccgcacatgacggtggagcagaacgtcgccttcggcctgaagcaggacggcgcgccgcgcgacgagatcgccgagcgggtggcgaaaatgctggacctggtgcagatgcgcaaatacgccggccgcaagccgcaccagctgtccggcggccagcagcagcgggtggcgctggcgcgcagcctggtgaagcggcccaagctgctgctgctggacgagccgctgggcgcgctggacaagaagctcaggcagcagacccagctggagctggtcaacaccatcgaggcggtgggcgtcacctgcatcatggtcacccacgaccaggaagaggcgatgaccatgtccagccgcatcggcatcatgagcgaaggcaaactgctgcaggtgggcacgccgaccgagatctacgaatacccaagctgccgcttcaccgccgaattcatcggcgagaccaatatgttcgaaggcgcggtggtggtggacgagccggaccgggtggagatcaattcccgggagctgggcggcgtcatccacatcgaccacggcatcaccggccccaagggcatgcacgtgtgggccagcgtgcggccggaggacgtgcggctggacaagcagccgctgccgccgggcgccaaccgcgccgccggcacggtgcgcgacatcgcctatctggggagctactccgtctatcacgtgcaactggcgggcggcaagatcgtcaaagccgtggtgccatcgtcgcgctggtgcgacgccaacgagaccgcccccacctgggacgagacggtctacctcagctggcgcgccgattcgccggtggtgctgacccagtga

SEQ ID NO: 65929 - protein, 391 aa, Chromobacterium violaceum ATCC 12472
MSEAIAASKQAASPIASAAPAHAVAGNEPPYLRISGVVKKFGDHLAVDHIDLDIRRNEIFALLGSSGCGKSTLLRMLAGMETPTAGRIILDGQDMQGLRPYERPVNMMFQNYALFPHMTVEQNVAFGLKQDGAPRDEIAERVAKMLDLVQMRKYAGRKPHQLSGGQQQRVALARSLVKRPKLLLLDEPLGALDKKLRQQTQLELVNTIEAVGVTCIMVTHDQEEAMTMSSRIGIMSEGKLLQVGTPTEIYEYPSCRFTAEFIGETNMFEGAVVVDEPDRVEINSRELGGVIHIDHGITGPKGMHVWASVRPEDVRLDKQPLPPGANRAAGTVRDIAYLGSYSVYHVQLAGGKIVKAVVPSSRWCDANETAPTWDETVYLSWRADSPVVLTQ

SEQ ID NO: 65930 - DNA, 1008 bp, Chromobacterium violaceum ATCC 12472
  CDS (1)..(1008): transl_table=11
atggcatttctgcaaatcgaccatctgaacaaacgcttcggccagcaggccgtggtccacgatttcaacatgcaggtggaggccggcgagttcgtcaccttcctcggcccgtccggctgcggcaagaccacggtgctgcgcatgatcgccggcttcgagacgcccagcggcggcagcatccgcctggccggcgacgacatcacccgccagtcgccgcaaaaacgcggcatcggcatggtgttccagagctacgcgctgtttcccaacatgaacgtggccgacaacatcgccttcggcctgaagatgcagaagcgctccgccgacgagatccgccgcaaggtgggcgaggtgatcgcgctggtggagttgaacggccgcgagaagcacttcccgcaccagctgtccggcggccagcgccagcgcgtggccctggcccgggcgctggtggtggagccgcgcgtgctgctcttggacgagccgctgtctgcgctggatgcccgcatccgcaagaacctgcgcgagcagatccgcgacatccagcgccgcctgggcctgaccaccgtcttcgtcacccacgatcaggaagaggcgctgaccatgtcggaccgcatcttcgtgatgaaccagggcaaggtggagcaggaaggcgcggccgagaccatctacacccagccggccaccgagttcgtcgcccgcttcatgggcaactacaacctgctgtcggccgagcagagccatgcgctgctggggctggaagttcgcggccacctggcggtgcggccggaatcgatagaactgctcggcaacgatgacgccgacgacaaccaggcgctgccggcggtgatccgccagcaccagctcctgggcaacatcatccgctaccaggtggacgccggcggcgcgacgctgcaagtggaccggctcaaccgccacgcgggcgacctgctgccggccggcgcgccggtgcggctgcgcttcgaccgcgacaatctgcgcgaggtgcgctga

SEQ ID NO: 65931 - protein, 335 aa, Chromobacterium violaceum ATCC 12472
MAFLQIDHLNKRFGQQAVVHDFNMQVEAGEFVTFLGPSGCGKTTVLRMIAGFETPSGGSIRLAGDDITRQSPQKRGIGMVFQSYALFPNMNVADNIAFGLKMQKRSADEIRRKVGEVIALVELNGREKHFPHQLSGGQRQRVALARALVVEPRVLLLDEPLSALDARIRKNLREQIRDIQRRLGLTTVFVTHDQEEALTMSDRIFVMNQGKVEQEGAAETIYTQPATEFVARFMGNYNLLSAEQSHALLGLEVRGHLAVRPESIELLGNDDADDNQALPAVIRQHQLLGNIIRYQVDAGGATLQVDRLNRHAGDLLPAGAPVRLRFDRDNLREVR

SEQ ID NO: 65932 - DNA, 1086 bp, Chromobacterium violaceum ATCC 12472
  CDS (1)..(1086): transl_table=11
atggctctcctggaaatcaaaaatgtggtcaaacgcttcggcgactacacggctgtcaacgacgtcagcctgtcggtcgaggcgggcgagttcttcaccctgccgggaccctccggctgcggcaagaccaccttgctgcgcatgctggccggtttcgaacaaccggacgccggccagattctgctggacggccaggacatgtcgcaggtggcgccggagaagcgtccggtgcataccgtgttccagagctacgcgctgttcccgcacatgacggtgcgcgagaacatcgccttcccgctgaagatggccaagtgggacaagcgcaagatcgccgcccaggtggatgaattgctggaagacgtgcgtctcacccagttcggcgaccgctatccgcacgagatgtcgggcggccagcgccagcgcgtggccatcgcccgcgcgctggtggaccgtccgcgcttgttgctgctggacgagccgctgtccgccctcgacgccaagctgcgcgaggaaatgcagatcgagctgatcaatctgcagaaggaagtgggcatcaccttcgtctacgtcacccacgaccaaggcgaggcgttggcgctgtcgcaccgcatcgcggtgatgagccacggcaaggtggagcagctagacgcgccggagaagctgtacagctatccgaagaaccgcttcgtcgccgacttcctcggccagtgcaacgtgctggaaggcacggtcaaggcgctgcacggcgacgccatgaccgtggcgctgaagggctgcggcgacgtcaagtgccaggcggtggcgggcgtcaaggaaggccagcagggctggctggcgctgcggccggagaaggtgaagctggacaaggagttgccggaactgccggacgaggcctattttaagggccgcgtccatgattgcctgtacctgggcgacgtcaccctctacgtggtggaggtggccgacggcgtgctggtggaggcgatgcagcccaacaacattcccggcgtggccaagttcttcgacgacggcgacgtggtcgagatcgcctggcgcttcgacgccggcagcttcctgacggagtaa

SEQ ID NO: 65933 - protein, 361 aa, Chromobacterium violaceum ATCC 12472
MALLEIKNVVKRFGDYTAVNDVSLSVEAGEFFTLPGPSGCGKTTLLRMLAGFEQPDAGQILLDGQDMSQVAPEKRPVHTVFQSYALFPHMTVRENIAFPLKMAKWDKRKIAAQVDELLEDVRLTQFGDRYPHEMSGGQRQRVAIARALVDRPRLLLLDEPLSALDAKLREEMQIELINLQKEVGITFVYVTHDQGEALALSHRIAVMSHGKVEQLDAPEKLYSYPKNRFVADFLGQCNVLEGTVKALHGDAMTVALKGCGDVKCQAVAGVKEGQQGWLALRPEKVKLDKELPELPDEAYFKGRVHDCLYLGDVTLYVVEVADGVLVEAMQPNNIPGVAKFFDDGDVVEIAWRFDAGSFLTE

SEQ ID NO: 65934 - DNA, 1119 bp, Gloeobacter violaceus PCC 7421
  CDS (1)..(1119): transl_table=11
ttgctgccgccgttgaacgtcgtcgagttggaccaggtcgtcaagtgcttcagtgagcccggcggcaagccactgcgcgccgtggacgcggtgagtctcgcggtgcgggcgggcgaatttttttcgctgttgggcgaaagcggctgcggcaaaaccacggtactcaggctcatcggcggcttcgagcaaccggatggcggcacgatcgcgattgccggtcagccgatggcgggggtaccgccctaccgtcggccggtcaacacggtctttcaaagttacgcgcttttcccgcacctgaacgtgtaccggaacgtcgccttcggcctggagatggagcggttggggcgcggcgaggtgcgtttgcgcgtcgaggagatgctcgccctggtgcgcctggagaagctggccgctcgcaaaccccagcaactttccggcggccagaagcagcgggtggccctggcccgggcgcttgccaaacgcccggcggtgctgctgctcgatgaacctttaagtgcactggatttgcagttgcgccggcagttgcggttggaattgaaggcattgcagcggcagacgggaattacgtttatctttgtcacccacgaccaggaggaggctttgagcctgtctgatcgggtgggggtgatgcgcgcgggaaggcttttgcaggtagggaccgctgcggaaatttacgagcggccgaccagccgcttcgtggccgagttcgtgggcgagaccaactggcttaccgggagcgtcgaatcggtcgaggcgggcgtggtgtcggtgttcgtaccggggatcgatcaggtggtgcggggaatggcgaccgcagccgtggtatcgggggagcgcgtatcggttgcgattcggcccgagaagctggtgctgttgggcgcggacgctgtggcgtgtgccggggtgaaccggttcgccgcgacgttgggagctacccgctacgaaggtgccctgacccgtcaggaggtgctcctggctgggggggagcgcttctggctgttgctgaccaatcgcaatggccgggaagtattggcggagggagcggcgtgtgttttgagcgctgattgtcatgacacgatcgtgcttgcggaggggaattga

SEQ ID NO: 65935 - protein, 372 aa, Gloeobacter violaceus PCC 7421
MLPPLNVVELDQVVKCFSEPGGKPLRAVDAVSLAVRAGEFFSLLGESGCGKTTVLRLIGGFEQPDGGTIAIAGQPMAGVPPYRRPVNTVFQSYALFPHLNVYRNVAFGLEMERLGRGEVRLRVEEMLALVRLEKLAARKPQQLSGGQKQRVALARALAKRPAVLLLDEPLSALDLQLRRQLRLELKALQRQTGITFIFVTHDQEEALSLSDRVGVMRAGRLLQVGTAAEIYERPTSRFVAEFVGETNWLTGSVESVEAGVVSVFVPGIDQVVRGMATAAVVSGERVSVAIRPEKLVLLGADAVACAGVNRFAATLGATRYEGALTRQEVLLAGGERFWLLLTNRNGREVLAEGAACVLSADCHDTIVLAEGN

SEQ ID NO: 65936 - DNA, 1143 bp, Vibrio vulnificus YJ016
  CDS (1)..(1143): transl_table=11
ttggccaatgtgggagaaatacagacgttgaacgctaaacaaaatgcaggacaaccagtaatccgtttatctggtatcagtaagagtttcgatggtaaggaaatcatcggtaatttaaacctggacgttaatcacggtgaatttttaacgattctaggtccttctggctgtggtaaaacaaccgttttacgcatgatcgcaggttttgaaactgcagataatggccaaattacgatcgacaatcaggatgtcactaacgttcctgcagaacaaaggcatgtcaacacggtattccaaagttacgcattgttcccacatatgactgtgtttgataatgttgcgtttggcttacgtatgcagaaggtccctgctgctgaaatcgaacctcgcgtaatggacgcgcttaaaatggttcgtctagagagcatggctcagcgtaaacctcatcagctttctggtggtcaacagcagcgtattgcaattgcgcgtgctgtggtgaacaagccaaaagtactattacttgatgaatccctatcagcgcttgattacaaattacgtaagcaaatgcagattgagcttaagcagctacagcgacagcttggcatcacctttattttcgtgacgcacgatcaggaagaagcactatcgatgtcagaccgcattatcgtcatgcgctcaggcgttatcgagcaagatggctctcctcgtgaaatctacgaagatccgaaaaacttatttgttgcgcgctttatcggcgaaatcaacgtgtttgaagcaacggccaaagaacgccttgatgaaaaccgtattcgtgctgagattgaaggcgtcgactcagtggtttacttcgatcaaccggtaacggaaggtcagaaactgcaagtgctacttcgtccagaagacttacgtattgaagagatcaaagaatccgaagagaaaggtattgtcggtcatgttaccgagcgtacttacaaagggatgactcttgattctgttattgaaacggaatctggcatgcgtgtaatggtaagcgagttctttaacgaagatgatcctgatgtggaccactctttgggacaaaaagtcgccattacttgggttgaaagctgggaagtggtgctaagcgatgagcaagaaatttag

SEQ ID NO: 65937 - protein, 380 aa, Vibrio vulnificus YJ016
MANVGEIQTLNAKQNAGQPVIRLSGISKSFDGKEIIGNLNLDVNHGEFLTILGPSGCGKTTVLRMIAGFETADNGQITIDNQDVTNVPAEQRHVNTVFQSYALFPHMTVFDNVAFGLRMQKVPAAEIEPRVMDALKMVRLESMAQRKPHQLSGGQQQRIAIARAVVNKPKVLLLDESLSALDYKLRKQMQIELKQLQRQLGITFIFVTHDQEEALSMSDRIIVMRSGVIEQDGSPREIYEDPKNLFVARFIGEINVFEATAKERLDENRIRAEIEGVDSVVYFDQPVTEGQKLQVLLRPEDLRIEEIKESEEKGIVGHVTERTYKGMTLDSVIETESGMRVMVSEFFNEDDPDVDHSLGQKVAITWVESWEVVLSDEQEI

SEQ ID NO: 65938 - DNA, 1143 bp, Rhodopseudomonas palustris CGA009
  CDS (1)..(1143): transl_table=11
atgacggagcacgctgatcccgcgccggccgaggttgccggtgaaccgctgttacgtatcgaagccgtggagaaacggttcggcgggttcgtcgccgtcgaccggctgtcgctggacatcaaggccggcgagttcttcgcgctgctgggtcccagcggttgcggcaagacgacgctgttgcggatgctagcgggattcgagacgccggatgccgggcgcatcctgctgaacggcgtggatatcgccgcggtgctgccgcacgagcgcccggtcaacatgatgttccagaactacgcgctgtttccgcacctcacggtcgcggccaacatcgcgttcggcctgaagcgggcccggctgccgcgcaaggagatcaaggcgcgggtcgccgaaatgctggcgctggtgaggctcgaaggactgggcaagcgcaagccggatcagctctccggcggtcagcagcagcgcgtcgcgctggcgcgggcgctggcgctgcggccgaagttgctgctgctcgacgagccgatggcggcgctggacaagaagctgcgcgaaagcactcaactcgaactgatggcgctgcagaagcggctcggaatgaccttcgtgatcgtcacccacgatcagcaggaggcgatgacgatggcggaccgtatcggcgtgatgcgcgccggcaagctcgaccaggtcgcagtgccgcggcagctctacgaagcgccggcgtcgcgctgggtcgccgagttcgtcggtgacgtcaacatgctggaaggcagcgtcgccggccgcgacaacggacgcatcaccgttgcgaccggcggggccggcgaggtcgtggtggccgaaccgcgcgaggcgctgcagaccgaagcgatctcggtcgcgatccggccggagaagatcaagctgtcgctgcgcggcccggccgccgatgccggccacgccgatgcgatcaaccggctcgacggcaccatcaccgacatcggctatgccggcggcatgaccagctacaaggttcggctcgatcacggcgccaccttgctggccgcgatggccaatacgacgcggctcgacgtcgatgcgtatcacgccggccagcacgtggtggcgtggttctcgcccgacgactgcgtggtgctgacccgatga

SEQ ID NO: 65939 - protein, 380 aa, Rhodopseudomonas palustris CGA009
MTEHADPAPAEVAGEPLLRIEAVEKRFGGFVAVDRLSLDIKAGEFFALLGPSGCGKTTLLRMLAGFETPDAGRILLNGVDIAAVLPHERPVNMMFQNYALFPHLTVAANIAFGLKRARLPRKEIKARVAEMLALVRLEGLGKRKPDQLSGGQQQRVALARALALRPKLLLLDEPMAALDKKLRESTQLELMALQKRLGMTFVIVTHDQQEAMTMADRIGVMRAGKLDQVAVPRQLYEAPASRWVAEFVGDVNMLEGSVAGRDNGRITVATGGAGEVVVAEPREALQTEAISVAIRPEKIKLSLRGPAADAGHADAINRLDGTITDIGYAGGMTSYKVRLDHGATLLAAMANTTRLDVDAYHAGQHVVAWFSPDDCVVLTR

SEQ ID NO: 65940 - DNA, 1146 bp, Rhodopseudomonas palustris CGA009
  CDS (1)..(1146): transl_table=11
atggccgagccagtggctctgcgcgcaggaggtttcggcgcgcgaggagcaggatcgcaggccgcacaagagcggcaggtcatcggctccagcatcgcggtacgcgaagcagaaaagcgctacggtcagtttcacgcggtcgaccggatcaatctcgacatcgagcccggcgaattcatcacgctgctcggcccgtcgggcagcggcaagacgacgctgctcaatctgctcgccggcttccagaccctcgatggcggcgaaatcctggtcgacggcaagccggtgcacaacgtgccgacgcacaagcgcggcttcggcatggtgtttcaaagctacgcgctgtttcccaacatgacggtgacgcagaacgtcgcgttcccgctgcgcatggcgggcgtcgaccgcgccaccacggcgcgccgcgtcgccgagacgctggagatcatgcggctgtcggcccatgccaacaaatcgccgtcggaaatgtcgggcggtcagcagcagcgcgtcgccatcgcacgcgcgatcgtgatgcggccgaaggtcgtgctgatggatgagccgctcagcgcgctcgaccgccgcctgcgcgagtcgatccagatcgaaattcgcgaccttcaccagaccatcggcagcaccatcctgttcgtcacccatgaccagggcgaagcgctgaccatgagcgatcgcattgctgtgctggatgccggcaagatcgtgcagatcggccgtccgctcgacatctaccgtcaccccgccaatcgcttcgtggcctcgttcgtcggtgagagcaatctgatcgaagcggagatcatgcagaagcgcggcaccacggtgacgctcaagaaccggtccggctacgtgttcgacgccgagagccgcgacgccatcgacgtcggccgcgtcaccgtgctggtacggcccgagcggatcgcgattgcggacgagccgaccgcgaactcgaccccggtgaccgtgacctcggcgatcttcctcggtgagacactgcgtatcgaagcgcagatggaaagcggcgagacgctgcttgtgcgctgccccgacagcgccaagcggccgttgccgaatgtcggcgaccgactgcatgtcggctggggtccggaagactgctgggtgctggcatga

SEQ ID NO: 65941 - protein, 381 aa, Rhodopseudomonas palustris CGA009
MAEPVALRAGGFGARGAGSQAAQERQVIGSSIAVREAEKRYGQFHAVDRINLDIEPGEFITLLGPSGSGKTTLLNLLAGFQTLDGGEILVDGKPVHNVPTHKRGFGMVFQSYALFPNMTVTQNVAFPLRMAGVDRATTARRVAETLEIMRLSAHANKSPSEMSGGQQQRVAIARAIVMRPKVVLMDEPLSALDRRLRESIQIEIRDLHQTIGSTILFVTHDQGEALTMSDRIAVLDAGKIVQIGRPLDIYRHPANRFVASFVGESNLIEAEIMQKRGTTVTLKNRSGYVFDAESRDAIDVGRVTVLVRPERIAIADEPTANSTPVTVTSAIFLGETLRIEAQMESGETLLVRCPDSAKRPLPNVGDRLHVGWGPEDCWVLA

SEQ ID NO: 65942 - DNA, 879 bp, Bdellovibrio bacteriovorus HD100
  CDS (1)..(879): transl_table=11
atgttggaacttctgaatatcggcaagagtttttccagtcaaacggccctgaagggaatcaacctttccattggggaaggggagttcttttccctgttgggtcccagcggctgtggaaaaacaacacttcttcgcatcattgccggtcttgaaagtgccacttccggtcaaattctgctggatggtcagcgcgtggatcatcttcctgctcaaaaacgtccctttaacatggtctttcagcgctatgctctttttccgcacatgacggtgggggaaaatatcgcctatggtctgcgcctgaaggggttggggaaagaccagatcgaggccaaggtggcagaagtcctggccttggtggatatgggcgagttccgggaccgcaagcctgaaactttgtccggcggtcagtcgcagcgtgtggctgtggcccgcgccttggtgaatgaaccccgtgtgcttttgctggatgagcctttgtcggcgctggattaccgcatgcgtgagcacatgcaaaaagagctgcgcgctttgcaacaaaagctgggtctgacatttatctgtgtgactcacgatcaggaagaagctctggcgctgtcagatcgtatcggtatcatgagtcgcggggttttggaacaggtcagctctccgcgtgagatttatgagaatccggaaacgatcttcgcctctcagtttgtagaatccaccagtctgctgcgtggtgagttggtggaggtcagtcaggatctggccaccatccgtctgggagatggcagccttatcaaaggtaaaatcaatgtcccaccggatcagatccgcctggggatgagcattgaagcctacgtccgtcgcgccatggtctttggcgagcgtgaaaagtga

SEQ ID NO: 65943 - protein, 292 aa, Bdellovibrio bacteriovorus HD100
MLELLNIGKSFSSQTALKGINLSIGEGEFFSLLGPSGCGKTTLLRIIAGLESATSGQILLDGQRVDHLPAQKRPFNMVFQRYALFPHMTVGENIAYGLRLKGLGKDQIEAKVAEVLALVDMGEFRDRKPETLSGGQSQRVAVARALVNEPRVLLLDEPLSALDYRMREHMQKELRALQQKLGLTFICVTHDQEEALALSDRIGIMSRGVLEQVSSPREIYENPETIFASQFVESTSLLRGELVEVSQDLATIRLGDGSLIKGKINVPPDQIRLGMSIEAYVRRAMVFGEREK

SEQ ID NO: 65944 - DNA, 984 bp, Bacillus cereus ATCC 10987
  CDS (1)..(984): transl_table=11
atgaaaaagattattaaagttgaagcagtagaaaaacattttggaaatcaagtgattatcccaccgctttctttagatattaaagaaggggaatttttaactattttagggccgagtggttgcgggaaaacgacgttacttcgtatgatcgcaggatttgaaacgccaactaaagggaatcttttattagatgatgaaaagattaacgatttgccaccatataagcgtcatatgaacctagtgttccaacattatgcgctattcccacatatgaatgtggagaaaaatatttgtttcggtatgaaaatgcagaaagtaccggcagcagagcagaaagagcgtgctgaagaggcaatgcgtttaacgcagttacttgagttccgtaatcgtaaacctgcaaagctttctggtggacagcagcagcgtgtagcaattgcgagagcgattgtaaataacccgcgtgtattattactagacgagccacttggggcgttagactttaagttaagaaaagacttgcaacgtgaattaaaaaacttacaacgtaatttaggaattacgttcatatacgtaacgcacgatcaagaagaagcgatgagcatgagtgatcgtatcgttgttatgaataaaggccatattgaacaaatcggaacgccgaaagaaatttataataagccgaaaacgttgttcgttgcgacatttatcggtgaaaataatattgtgaaaaacggggaaggctatgtagcaattcgccctgaaaatgtaaaagtgcgttcggttgaagagccaattttaaaagaataccaccttggccatattgaagacattgagtttgttggaaatatggaaaagctttatgtacgtgatgagaaaacatcagaattactaatggcatatcaaactgctgaagaagcagcacagtggagcattggagataatgtatacgtaggctgggagcaagaggacgaggtgaccttaaattga

SEQ ID NO: 65945 - protein, 327 aa, Bacillus cereus ATCC 10987
MKKIIKVEAVEKHFGNQVIIPPLSLDIKEGEFLTILGPSGCGKTTLLRMIAGFETPTKGNLLLDDEKINDLPPYKRHMNLVFQHYALFPHMNVEKNICFGMKMQKVPAAEQKERAEEAMRLTQLLEFRNRKPAKLSGGQQQRVAIARAIVNNPRVLLLDEPLGALDFKLRKDLQRELKNLQRNLGITFIYVTHDQEEAMSMSDRIVVMNKGHIEQIGTPKEIYNKPKTLFVATFIGENNIVKNGEGYVAIRPENVKVRSVEEPILKEYHLGHIEDIEFVGNMEKLYVRDEKTSELLMAYQTAEEAAQWSIGDNVYVGWEQEDEVTLN

SEQ ID NO: 65946 - DNA, 1002 bp, Bacillus cereus ATCC 10987
  CDS (1)..(1002): transl_table=11
atgagcgaatatttatcaattcaacacattcaaaaacagtttgatgcatttacagcgttaaaagatatttcttttactgtgaaaaaaaatgagtttgtatgtttattaggcccaagtggttgtgggaaaacaacattgcttcgaattttagcagggctagaagaggcgacaacaggtagtatagctgtgaatggaaaagatattacagcattacctcctggaaagaggaatttcggaatggtgtttcaatcctatgcgttatttccgaatttaacagcacttgaaaacattgaatacggcttaaagacaaaaaagtatggaaaagcagaagtaaaagagaaggcgctatcggcgttagaactagttgatttactgaatgtaaaagataaatatcctgctcaaatgtctggtggacaacagcagcgagtagcacttgcacgtgcactcgctctgtctccggatattttgttactcgatgagccgttatctgctttagatgcaaaagtacgtgaaaagttacgtagagaaatgcgtgatttgcaagaaaaagtaggagtgacaactattatggtcacgcatgatcaagaagaggcattaacgatggctgataaaattgttgtaatgaatcatgcggaaattatgcagattggcacaccagaggagatttaccaaaggccagccaatccatttgtggcagattttattggttctattaatttcttttcgaaaaataacgaagaacatgcaattcgtccggaacatgtaacagtcgtacaaaataatggtatgaaaacaattgtagaaagcatggagtttcgcggatctgtataccggacagaagtgcgcgttatagatgaggaaacgcatctatataatgagaaaatcgttgtagatatattggcatcagaagtagaaaaaacagctattaggaaaggaaagccgattcaaatctctttctcagaaaatcatatgttgtcatatggaaagaaggttgttgtatag

SEQ ID NO: 65947 - protein, 333 aa, Bacillus cereus ATCC 10987
MSEYLSIQHIQKQFDAFTALKDISFTVKKNEFVCLLGPSGCGKTTLLRILAGLEEATTGSIAVNGKDITALPPGKRNFGMVFQSYALFPNLTALENIEYGLKTKKYGKAEVKEKALSALELVDLLNVKDKYPAQMSGGQQQRVALARALALSPDILLLDEPLSALDAKVREKLRREMRDLQEKVGVTTIMVTHDQEEALTMADKIVVMNHAEIMQIGTPEEIYQRPANPFVADFIGSINFFSKNNEEHAIRPEHVTVVQNNGMKTIVESMEFRGSVYRTEVRVIDEETHLYNEKIVVDILASEVEKTAIRKGKPIQISFSENHMLSYGKKVVV

SEQ ID NO: 65948 - DNA, 1095 bp, Yersinia pestis biovar Medievalis str. 91001
  CDS (1)..(1095): transl_table=11
gtgtgcgcaatgagaacctatgtcagcttcaaaaatatcaagaagagctacgatggcgacaagttggtcgttaaaaacctgaatctggacattcatgagggggattttttaaccctgctcggtccttctggttcaggtaaaaccaccagcctaatgatgctagccgggtttgaaacccccactcaaggcgagattacgctgcgtgataaacccctgcataacctgccccctcaccaacgggggatcggtatggttttccaaaattatgccctcttcccacatatgaccgtaactgaaaatctggcctttccactcacgatccgccgattgaataaggctgatatcaaagagaaaattgaccgtatattggatatggtgaagttgaagaatttggctgaccgctatcccgcgcagatgtctggtgggcagcagcaacgggttgcattggcacgtgccttggtatttgagcccaaactggtgctgatggatgaaccactcggggcgctggataagcagttacgtgagcatatgcaattggaaatcaaacagttacataaaatgcttgaattgaccattgtctacgtcacccatgaccaaagcgaagcaatgactctgtcaaatcgggtggtggtatttaacgatggtattattcagcaaatggatagcccaagcgtgatttatgaacagccaagcaatacttttgtggcgcaatttattggtgaaaacaactgcttactggccgttaatcagggcagtgacggggaatattaccgtgccatgttggacgatggcacccgcctgcaagcattaaaagtgtgccccagctcaccgggtaaaaaaattatgttatgtattcggccggagcgcgtcagtgtgaatcatcctgcggcgggcagccagcagatcaaggcccgcattcagcaatttatttatctgggggatcatgtgcggatgatgacggaagttgcaggccaagggaatttcatggtgaaactctctgccgcgcatatcgaaccacactggcagccgggaagtgaggtgttgctgtcgtggatgcctgcgcatttaagggcactggagggggtgacacactga

SEQ ID NO: 65949 - protein, 364 aa, Yersinia pestis biovar Medievalis str. 91001
MCAMRTYVSFKNIKKSYDGDKLVVKNLNLDIHEGDFLTLLGPSGSGKTTSLMMLAGFETPTQGEITLRDKPLHNLPPHQRGIGMVFQNYALFPHMTVTENLAFPLTIRRLNKADIKEKIDRILDMVKLKNLADRYPAQMSGGQQQRVALARALVFEPKLVLMDEPLGALDKQLREHMQLEIKQLHKMLELTIVYVTHDQSEAMTLSNRVVVFNDGIIQQMDSPSVIYEQPSNTFVAQFIGENNCLLAVNQGSDGEYYRAMLDDGTRLQALKVCPSSPGKKIMLCIRPERVSVNHPAAGSQQIKARIQQFIYLGDHVRMMTEVAGQGNFMVKLSAAHIEPHWQPGSEVLLSWMPAHLRALEGVTH

SEQ ID NO: 65950 - DNA, 1104 bp, Thermus thermophilus HB27
  CDS (1)..(1104): transl_table=11
ttgccccccggggcggcgcgccctaaactgggcgtcgtggccgaggtgctggtgcgtctccagggggtgcggaagcgctacggaaccaccgtggccctggacggggtggacctcgaggtccataggggcgagttcttcagcctcctcgggccctcgggctgcggcaagaccacccttttgcggctcctcgccgggtttgagaccccggacgcgggccggatagagatcggcggccgggacatggcccgggttcccccctacgagcgcccggtgaacaccgtctttcagaactacgccctcttcccccacatgaccgtggaggcgaacatcgccttcggcctcaggatgaaaggccttcccccggaggccatccgggagaaggtggcctgggcgttggagctcgtggacctcctgggcctggagaagcgctaccccagggagctttccggggggcagaagcagcgggtggccctggcccgggccctggtcttggagccccaggtcctcctcctggacgagcccctctccgccctggacgcaaggctccgccaggacctcagggtggagctcatgcagctccagaggcggcttggcaccaccttcatcttcgtcacccacgaccaggaggaggccctggtcatgtccgaccgcatcgccgtgatgcgctcgggccgcattgagcaggtggggcttcccgacgaggtctacgagcgccccaagacccgcttcgtggcggcctttctcggccgctccaacttcctccccgcaaggccccaccccttgggggccgaaacccctttggggcctctgcgccttaaggcccctttggcgcgggaggcccttttggccatccgcccggagaagatccggctctacccggcccaggggggggttcccgcccgggagaacctggtgcgggcggtggtggaggagatcgtctacacgggggcggagaaccagtactacctgagggcgggggaggtgaggcttctggcctataccctgaaccaggacctgcaggagcccggggccgaggagttcgggtacggggaagaggtcctctgctacctccccccggagaacctggtggtggtccatgaatga

SEQ ID NO: 65951 - protein, 367 aa, Thermus thermophilus HB27
MPPGAARPKLGVVAEVLVRLQGVRKRYGTTVALDGVDLEVHRGEFFSLLGPSGCGKTTLLRLLAGFETPDAGRIEIGGRDMARVPPYERPVNTVFQNYALFPHMTVEANIAFGLRMKGLPPEAIREKVAWALELVDLLGLEKRYPRELSGGQKQRVALARALVLEPQVLLLDEPLSALDARLRQDLRVELMQLQRRLGTTFIFVTHDQEEALVMSDRIAVMRSGRIEQVGLPDEVYERPKTRFVAAFLGRSNFLPARPHPLGAETPLGPLRLKAPLAREALLAIRPEKIRLYPAQGGVPARENLVRAVVEEIVYTGAENQYYLRAGEVRLLAYTLNQDLQEPGAEEFGYGEEVLCYLPPENLVVVHE

SEQ ID NO: 65952 - DNA, 1122 bp, Parachlamydia sp. UWE25
  CDS (1)..(1122): transl_table=11
atggtagaaggcatcgtttttgaacatgtttcaaaaaaatttgcagatagtatagccctgaatgatgtgtcatttgctattaataaaggagagtttttttctcttctaggccctagtggatgtggaaaaacaacactattaaggattttggcaggatttgaaaaacctgatcaaggaaggattttacttgacgggcaagacatcactaaactccctgcgaataaacgacctatcaacaccgtttttcaaaactatgctttatttcctcatttaacgatttgggaaaatatcgcttttggccttcgcatcgctcagcgttctgaaacagaaatcaaacgagaagtcgagcagatgctgggtttaattcagatgaaagaacacggacataaaaagcctgatcaaattagcggggggcaaaagcaacgtgtagctattgcaagagctttagtcaaccatcctcgcattttattactagatgaacccttagcggcattggatttaaaattacgccaaaaaatgctcttagatttagatcgtattcatgatgaagtgggaatcacatttatttttgttactcatgatcaaagcgaggctatggctgttagtgatcgcattgctgttttacataaagggagtttagagcaaattggaaatcctatagaaatttatgaaatgcccaaaagtagttttgtggcagattttattggtgacaccaatttttttgatggttgggtaaaagagacggctcaaaaggaatacagtcttgttgatgtagaaggatttcctcaaatttattgttttaatgataaacaactatcgaaaggagatgctgttcatcttagtgtaaggccagaaaaaattcatatctctcgcgaacaaattcaggcccatcctctccaaaatgtttttcaggggattgtcgatgatgtcatttacaaaggggatcatactcattttggtattcaagtcggagatcgaaaaatttctgtcaatcaacaacacagtcgtttccttctcgatgaagcccccattaaatggaaagatgtagtgtggatttggtggcattcagatgatggatttatcttggagcgatgccaaaagctcgagaataacaatgaatag

SEQ ID NO: 65953 - protein, 373 aa, Parachlamydia sp. UWE25
MVEGIVFEHVSKKFADSIALNDVSFAINKGEFFSLLGPSGCGKTTLLRILAGFEKPDQGRILLDGQDITKLPANKRPINTVFQNYALFPHLTIWENIAFGLRIAQRSETEIKREVEQMLGLIQMKEHGHKKPDQISGGQKQRVAIARALVNHPRILLLDEPLAALDLKLRQKMLLDLDRIHDEVGITFIFVTHDQSEAMAVSDRIAVLHKGSLEQIGNPIEIYEMPKSSFVADFIGDTNFFDGWVKETAQKEYSLVDVEGFPQIYCFNDKQLSKGDAVHLSVRPEKIHISREQIQAHPLQNVFQGIVDDVIYKGDHTHFGIQVGDRKISVNQQHSRFLLDEAPIKWKDVVWIWWHSDDGFILERCQKLENNNE

SEQ ID NO: 65954 - DNA, 1107 bp, Desulfovibrio vulgaris subsp. vulgaris str. Hildenborough
  CDS (1)..(1107): transl_table=11
atggcggaaaaggacaacatcattgaattgcgcggcgtcacgaagaacttcgaagacacctgcgcactcgacaatatcgacctcgaaatccgtaacggcgaattcctgacgctgctcggcccttcgggctgcggcaagaccaccatcctgcggctcatctccggcttcgagaagcccgatgcgggtgtcatcaccctcaagggacagcgcatggatgacgccccgcccgaggcgcggcaggtcaacacggtgttccagaactacgcgctcttcccgcacatgtcggtgcgcgagaacgtggggttcggcctgcggatgcagcgtcgccccaaggacgagatcgcccggcgcgtgcacgacgccctgcgcatggtgcatctcgaagcccacgccgaccgccgcccccgccagctttcgggcgggcagcagcagcgcgtggccatcgcccgcgccgtggtcaacaacccgctggtgctgctgctcgacgaaccgttcagcgcactcgactacaagctgcgcaagcagatgcagctcgagatcaagcacctgcaacggcagctcggcatcaccttcgtcttcgtcacccacgatcaggaagaggcatttgccatgtccgaccgtgtggtggtcatgaacgacggcaagatcgaacagataggctcgccgcaggaaatctacgaagaacccgccaacctgtacgtggcgcgcttcgtgggtgagatcaacatcctgaacgcggtcatcgccgcgaaccacggcgacgggctgtacgatgccgtcatcgagggagtgaccttcccgatacgcagccagcgcaccttcgcccccggcgacaaggtgaacgtgctgctgcgccccgaagacctgcgcgtgtacaccctcaccgaagaccgccccgcggggccgcatctcaccggacgcatcgaggagtcggtgtacaagggtgccacggtggacctcatcgtcaccctctccgatggtcgcaggctcatggctgccgagttcttcaacgaggacgacgtcgacatcaactacaatcccggcgagaccgtcacggtgagctgggtcgacggctgggaggtcgtgctgcccgatggcgaagcgtaa

SEQ ID NO: 65955 - protein, 368 aa, Desulfovibrio vulgaris subsp. vulgaris str. Hildenborough
MAEKDNIIELRGVTKNFEDTCALDNIDLEIRNGEFLTLLGPSGCGKTTILRLISGFEKPDAGVITLKGQRMDDAPPEARQVNTVFQNYALFPHMSVRENVGFGLRMQRRPKDEIARRVHDALRMVHLEAHADRRPRQLSGGQQQRVAIARAVVNNPLVLLLDEPFSALDYKLRKQMQLEIKHLQRQLGITFVFVTHDQEEAFAMSDRVVVMNDGKIEQIGSPQEIYEEPANLYVARFVGEINILNAVIAANHGDGLYDAVIEGVTFPIRSQRTFAPGDKVNVLLRPEDLRVYTLTEDRPAGPHLTGRIEESVYKGATVDLIVTLSDGRRLMAAEFFNEDDVDINYNPGETVTVSWVDGWEVVLPDGEA

SEQ ID NO: 65956 - DNA, 996 bp, Bacillus thuringiensis serovar konkukian str. 97-27
  CDS (1)..(996): transl_table=11
ttggacgggaaaatgaaaaagattattaaagttgaagcagtagaaaaacattttggaaatcaagtgattatcccaccgctttctttagatattaaagaaggggaatttttaacgattttagggccgagtggttgcgggaaaacgacgttacttcgtatgatcgcaggatttgaaacgccaactaaagggaatcttttattagatgatgaaaagattaacgatttgccaccatataagcgtcatatgaacctagtgttccagcattatgcgctattcccacatatgaatgtggagaaaaatatttgtttcggtatgaaaatgcagaaagtaccggcagcagagcagaaagagcgtgctgaagaggcaatgcgtttaacgcagttacttgagttccgtaatcgtaaacctgcgaagctttctggtggacagcagcagcgtgtagcaattgcgagagcgattgtaaataacccgcgtgtattattactagatgagccacttggggcgttagactttaagttaagaaaagacttgcaacgtgaattgaaaaacttacaacgtaatttaggaattacgttcatatacgtaacgcacgatcaagaagaagcgatgagcatgagtgatcgtatcgttgttatgaataaaggccacattgaacaaatcggaacaccgaaagaaatttataataagccgaaaacgttattcgttgcgacatttatcggtgaaaataatattgtgaaaaacggggaaggctatgtagcaattcgccctgaaaatgtaaaagtgcgttcggttgaagagcggattttaaaagaatatcaccttggacatattgaagacattgagtttgttggaaatatggaaaagctttatgtacgtgatgagaaaacatcagaattactaatggcatatcaaactgctgaagaagcagcgcagtggagcattggagataatgtatacgtaggctgggagcaagaggacgaggtgaccttaaattga

SEQ ID NO: 65957 - protein, 331 aa, Bacillus thuringiensis serovar konkukian str. 97-27
MDGKMKKIIKVEAVEKHFGNQVIIPPLSLDIKEGEFLTILGPSGCGKTTLLRMIAGFETPTKGNLLLDDEKINDLPPYKRHMNLVFQHYALFPHMNVEKNICFGMKMQKVPAAEQKERAEEAMRLTQLLEFRNRKPAKLSGGQQQRVAIARAIVNNPRVLLLDEPLGALDFKLRKDLQRELKNLQRNLGITFIYVTHDQEEAMSMSDRIVVMNKGHIEQIGTPKEIYNKPKTLFVATFIGENNIVKNGEGYVAIRPENVKVRSVEERILKEYHLGHIEDIEFVGNMEKLYVRDEKTSELLMAYQTAEEAAQWSIGDNVYVGWEQEDEVTLN

SEQ ID NO: 65958 - DNA, 1101 bp, Bacillus thuringiensis serovar konkukian str. 97-27
  CDS (1)..(1101): transl_table=11
gtgggcagcagaaaatcgcgacaaaattttagaaaaatgggaaaaagagtttggtcaaaaagcagaaccgaaaaagtaagtgagtgggagagagaaaaaatgagcgaatatttatcaattcaacacattcaaaaacagtttgatgcatttacagcgttaaaggatatttcttttactgtgaaaaaaaatgagtttgtatgtttattaggtccaagtggctgtgggaaaacaacattgcttcgaattttagcagggctagaagaggcgacaacaggtagtatagctgtgaatggaaaagatattacagcattacctcctggaaagaggaatttcggaatggtatttcaatcatatgcattatttccgaatttaacagcacttgaaaacattgaatacggcttaaaggcaaaaaagtatggaaaagcagaagtaaaagagaaggcgctatcggcgctagaactagttgatttactgaatgtaaaagataaatatcctgctcaaatgtctggtggacaacagcagcgagtagcacttgcacgtgcactcgctctgtctccggatattttgttactagatgagccgttatctgctttagatgcaaaagtacgtgaaaagttacgtagagaaatgcgtgatttgcaagaaaaagtaggagtaacaactattatggtcacgcatgatcaagaagaggcattaacgatggctgataaaattgttgtaatgaatcatgcggaaattatgcagattggcacaccagaggagatttaccaaagaccagcaaatccgtttgtggcagattttattggttctattaatttcttttcgaaaaataacgaagaacatgcaattcgtccggagcatgtaacagtcgtacaaaataatggtatgaaaacaattgtagagagcatggagtttcgtgggtctgtataccggacagaagtgcgagttatagatgagaaaacacacctatataatgagaaaatcgttgtagatatattggcatcagaagtagaaaaaacagccattaggaaaggacagccaattcaaatctctttctcagaaaatcatatgttgtcatatggaaagaaggttgttgtatag

SEQ ID NO: 65959 - protein, 366 aa, Bacillus thuringiensis serovar konkukian str. 97-27
MGSRKSRQNFRKMGKRVWSKSRTEKVSEWEREKMSEYLSIQHIQKQFDAFTALKDISFTVKKNEFVCLLGPSGCGKTTLLRILAGLEEATTGSIAVNGKDITALPPGKRNFGMVFQSYALFPNLTALENIEYGLKAKKYGKAEVKEKALSALELVDLLNVKDKYPAQMSGGQQQRVALARALALSPDILLLDEPLSALDAKVREKLRREMRDLQEKVGVTTIMVTHDQEEALTMADKIVVMNHAEIMQIGTPEEIYQRPANPFVADFIGSINFFSKNNEEHAIRPEHVTVVQNNGMKTIVESMEFRGSVYRTEVRVIDEKTHLYNEKIVVDILASEVEKTAIRKGQPIQISFSENHMLSYGKKVVV

SEQ ID NO: 65960 - DNA, 1152 bp, Erwinia carotovora subsp. atroseptica SCRI1043
  CDS (1)..(1152): transl_table=11
ttgatctgccaaatcaggaaacagagctataccttaatgaaagaaaactccctgactgtgccggtcgttgaattgctcaacgtccataaaggctttgatggcaaagacatcatttcgcattttaatctcaccattaataacggtgaattcctgacgatcctcgggccatccggctgcggaaaaaccaccgtactgcgtctgattgccggtctggaaacagtcgatagcggcaatatcatgctggaaaagcaggatattacccaccagcccgccgagcagcggcacgttaataccgtattccaaagttacgcattgttccctcatctcagcgtgtttgaaaacgtagcatttggcctgcgtatgcagaaaacacccgccgtagaaatgactccgcgcgtgattgaagcgctaaaaatggtgcagttggacgagctggcgcagcgtcgcccgcaccaattatccggcggccagcaacaacgcgtcgctatcgcccgcgccgtcgtcaaccagccaaaggttctgctgctggatgaatctttgtccgcactcgattataagctgcgtaaacagatgcagaacgagttgaaagcgctgcaacgtaagctgggtattacctttattttcgtcacgcacgatcaggaagaagccctgaccatgtccgaccgcatcgtggtgatgcgtgatggccgcatcgagcaagacggcacgccgcgtgaaatctacgaagaaccaaaaaatctatttgtcgccagttttatcggtgaaatcaatatttttgatgccatcgtactagatctgttggatgaacagcgagtgcgcgctctggtcgaaggccacgaatgtgttatcaccgtcagctttttggtcaacatcggccaacacctcaacgtgctgctgcggccggaagatttacgcgttgaagagctgggcgacggcatgcaggcggaagggatggttggctacgtgcgcgagcgcaactataaaggcatgacgctggaatccaacatcgagttggaaaacggcaaaatggtcatggtcagcgagttctttaacgaagacgatcccgacttcgatcactcactcgaccagaaggtggacgttacctgggtggaaagttgggaggtagtcctgcacgatgaagacgtcgcgtaa

SEQ ID NO: 65961 - protein, 383 aa, Erwinia carotovora subsp. atroseptica SCRI1043
MICQIRKQSYTLMKENSLTVPVVELLNVHKGFDGKDIISHFNLTINNGEFLTILGPSGCGKTTVLRLIAGLETVDSGNIMLEKQDITHQPAEQRHVNTVFQSYALFPHLSVFENVAFGLRMQKTPAVEMTPRVIEALKMVQLDELAQRRPHQLSGGQQQRVAIARAVVNQPKVLLLDESLSALDYKLRKQMQNELKALQRKLGITFIFVTHDQEEALTMSDRIVVMRDGRIEQDGTPREIYEEPKNLFVASFIGEINIFDAIVLDLLDEQRVRALVEGHECVITVSFLVNIGQHLNVLLRPEDLRVEELGDGMQAEGMVGYVRERNYKGMTLESNIELENGKMVMVSEFFNEDDPDFDHSLDQKVDVTWVESWEVVLHDEDVA

SEQ ID NO: 65962 - DNA, 1134 bp, Erwinia carotovora subsp. atroseptica SCRI1043
  CDS (1)..(1134): transl_table=11
gtgaatgacgcgatcccccgccctcaatcaaaacctcaaaaagcggccacgccgctgctggaagtgcgcaacctgacgaagtcgttcgatggtcaggccgccgttgatgatgtcagcctgacgatttataaaggcgaaatttttgctctgctgggtgcatccggctgtgggaaatccacgctgctgcgcatgctggcaggttttgagctccccacgcaggggcagattgttctggatggtcaggatttgtcattggtgccgccttaccagcgtcccatcaatatgatgtttcagtcttatgcgctgttcccacacatgacggtggagaagaatatcgcgtttggtttgaaacaggacaagttaccgcgtgcagaaatcaaagatcgcgtggaagagatgctgtcgctggtgcatatgcaggagttcgctaatcgtaagccgcatcagctttccggcggtcagcgtcagcgtgttgcgctggcacgtagtctggcgaagcgtccaaaactgttgttgctagacgagccgatgggagcgctggacaagaaattgcgtgaccgcatgcagcttgaagtggtcgatattctggaacgcgtaggggcgacctgcgtgatggtgacgcacgatcaggaagaagccatgactatggctggtcgtattgccatcatgaatcgcggcaagttcgtacagattggcgagccagaagagatctatgagcacccgaatacgcgtttcagcgcggaatttatcggctcggttaatatgtttgaagggatattgcaggaacgtcaggacgatgctctgatcatcaaaagtcccgggctggtgcattcgctgaaagtagattcggatgtctcggtggtggatggcgttccggtttacatcgcgttgcgtcctgaaaaaatcatgctgtgcgaagaggtgccagctgacggctgtaatttcgcggtgggggaagtggtgcacatcgcttatctgggcgatttgtcgatttaccacgtcaggctcaacagcgggcaaactatcagcgcacagttacaaaacgcctaccgctatcgcaaaggcacaccgacctggggagatgaggttcggttgtgttgggatgcggatagctgtgtcgttctgacggtgtaa

SEQ ID NO: 65963 - protein, 377 aa, Erwinia carotovora subsp. atroseptica SCRI1043
MNDAIPRPQSKPQKAATPLLEVRNLTKSFDGQAAVDDVSLTIYKGEIFALLGASGCGKSTLLRMLAGFELPTQGQIVLDGQDLSLVPPYQRPINMMFQSYALFPHMTVEKNIAFGLKQDKLPRAEIKDRVEEMLSLVHMQEFANRKPHQLSGGQRQRVALARSLAKRPKLLLLDEPMGALDKKLRDRMQLEVVDILERVGATCVMVTHDQEEAMTMAGRIAIMNRGKFVQIGEPEEIYEHPNTRFSAEFIGSVNMFEGILQERQDDALIIKSPGLVHSLKVDSDVSVVDGVPVYIALRPEKIMLCEEVPADGCNFAVGEVVHIAYLGDLSIYHVRLNSGQTISAQLQNAYRYRKGTPTWGDEVRLCWDADSCVVLTV

SEQ ID NO: 65964 - DNA, 1167 bp, Erwinia carotovora subsp. atroseptica SCRI1043
  CDS (1)..(1167): transl_table=11
gtgcaaaaaacaacgtcctctgcggtagccccgcacattgtcattgaccatctacatgttggatacggcacgacagacgtattgaacgatatccatctggagattgcgcagggcgaattcgttgcgttactcggttcatcgggatgcggcaaaacgacgctattacgcacggtcgctgggttctcttcaccgcgttcgggagcgattcgcgttaacgggcaggatatgacacaagcgccgccagagaaacgcggaatggcgctggtgtttcagagttatgcgctgtggccgcatatgacggtagcgcagcatattgcgtacgggctgcgcttgcgccgtgtaccgcgtgcggaaatagccagtcgcgtagcggaactggaaacgatgctgggtttgacgggattgagcgcccgtaagcctgcggaactgtccggtgggcagcgccagcgcgtcgccctgggtcgcgcactggcggtacggcccgatattctgctgctggacgaaccactctccaatctggatacccgtattcgtctacaactgcgagatgaaatccgtgcgctgcaacagcggctggggttgaccgcgatccacgttacgcacgatcgggaagaagcgatggtgatggcggatcgcatcgtgattttgaatcagggtcgcatcatgcaggcgggtagcccacaagaggtgtatcaccatccagccagctcgtttgtcgcggcgtttatgggcgcggaaaatcggcttgtgctggacgctcgctatgacggcgatacgctgatgattcctggggatgcagaaagccactcactggtgcctgcgaacacgtcgctacagcccggcccgatagaggcgcgcttccgtgcggaggctgctcagctttacgatccggcagacgttcctctcatccagcccggcatgttgatgcgctacggcacggtgctgtcacaaagttatcccggtggatactggctgcatacgattgccagtggatcgtggcggatacaagttcatgccactcatccttatgccattggacagcgggttgccgtgcagatccccgccgaggcactgtttcttttcccgctggcagaagagcccacgtcgctgacggcggaacccaatacgacttcactttattccccgcttcctggcctgacggcctga

SEQ ID NO: 65965 - protein, 388 aa, Erwinia carotovora subsp. atroseptica SCRI1043
MQKTTSSAVAPHIVIDHLHVGYGTTDVLNDIHLEIAQGEFVALLGSSGCGKTTLLRTVAGFSSPRSGAIRVNGQDMTQAPPEKRGMALVFQSYALWPHMTVAQHIAYGLRLRRVPRAEIASRVAELETMLGLTGLSARKPAELSGGQRQRVALGRALAVRPDILLLDEPLSNLDTRIRLQLRDEIRALQQRLGLTAIHVTHDREEAMVMADRIVILNQGRIMQAGSPQEVYHHPASSFVAAFMGAENRLVLDARYDGDTLMIPGDAESHSLVPANTSLQPGPIEARFRAEAAQLYDPADVPLIQPGMLMRYGTVLSQSYPGGYWLHTIASGSWRIQVHATHPYAIGQRVAVQIPAEALFLFPLAEEPTSLTAEPNTTSLYSPLPGLTA

SEQ ID NO: 65966 - DNA, 1134 bp, Yersinia pseudotuberculosis IP 32953
  CDS (1)..(1134): transl_table=11
gtgaatgatgttattccccgcccacagccaaaatcccagaaggtgtttacccctttactggaaatccgtaacttaaccaagtcattcgacggtcaggcggctgtggatgatgtcaatctgaccatttataaaggtgagatttttgcgctattgggggcatcaggttgtggtaaatctaccctgttacggatgctggccggttttgaacagccaacgcaaggccagatcgtccttgatgggcaggatttatcccatgttccaccgtatcgacgccctatcaatatgatgttccagtcttacgcgctattcccgcacatgaccgtggagcaaaacatcgcattcggcttgaagcaggataagctgccgtctaatgaaattaaaagccgggtcgccgagatgctgacactggtccatatgcaagagtttgctaaacgtaaaccgcatcaattatccggtggtcagcgccagcgtgtggcattggcacgtagcttggctaaacggccaaaactgctgcttttggatgagccaatgggggcgctggataaaaaactacgcgaccgtatgcaactggaagtgttggatattttggagcgggtgggcgcaacctgtgtgatggtcacccatgaccaagaagaagcgatgaccatggccgggcgcattgccattatgaaccggggcaagtttgtgcagattggtgagccagaagagatttatgagcatccgaacagcagattcagcgctgagtttatcggctcagtgaatgtgttcgaaggcgtgctaaaagagcgtttagatgacgcgttggtgattgatagccctggcctgcgccatccgctaaaagtggattccgatgcctcggtcgttgacggagtgcctgtgctggtcgccctacgcccggaaaaagtgatgttatgtgatcaggtccccaaagatggctgcaattttgctgtaggcgaagtggtacacattgcctatctgggcgatttatccatttatcacgtgaaattacacagtggtcagatgctaagtgcgcagttacagaatggtcatcgctaccgtaaaggcatgccaacgtggggtgatgaagtgcaactctgttgggatgctgacagttgcgtggttttagggagctaa

SEQ ID NO: 65967 - protein, 377 aa, Yersinia pseudotuberculosis IP 32953
MNDVIPRPQPKSQKVFTPLLEIRNLTKSFDGQAAVDDVNLTIYKGEIFALLGASGCGKSTLLRMLAGFEQPTQGQIVLDGQDLSHVPPYRRPINMMFQSYALFPHMTVEQNIAFGLKQDKLPSNEIKSRVAEMLTLVHMQEFAKRKPHQLSGGQRQRVALARSLAKRPKLLLLDEPMGALDKKLRDRMQLEVLDILERVGATCVMVTHDQEEAMTMAGRIAIMNRGKFVQIGEPEEIYEHPNSRFSAEFIGSVNVFEGVLKERLDDALVIDSPGLRHPLKVDSDASVVDGVPVLVALRPEKVMLCDQVPKDGCNFAVGEVVHIAYLGDLSIYHVKLHSGQMLSAQLQNGHRYRKGMPTWGDEVQLCWDADSCVVLGS

SEQ ID NO: 65968 - DNA, 1047 bp, Symbiobacterium thermophilum IAM 14863
  CDS (1)..(1047): transl_table=11
atggtcgagtttcggggcgtgtcgaagcggttcgattcgaccgaagccctaaacgatcttaccctcgaaattcgtccgggcgagttcctgacgcttctcgggcccagcggctgcggcaagaccacgaccctcaggctgctggccgggttcgaggaacccacctccggagagatctggctggcgggcagaccggttcagggactcccagcgtacaagcgacccgtcaatacggtcttccagcactacgcgctgttcccgcacatgaccgtattcgacaacgtcgcgttcggcctgcgcatgaagaaggtagccccggcagagatccggcggcgggtcgcggaggccctggagttggttcggctgggcgacatggggagccgacgtccccatgagctctccggaggccagcagcagcgggtcgccctggcgcgcgccctggtcatggagccgaaggtgctgctgctggacgagccgctgggggcgctggacctccagctgcggcgtgcgatgcaggtggaactcaggcagctccagcgcaagctgggagcgaccttcctatatgtgacacacgaccaggaggaagcgctcgcgatgtccgaccgcatcgcggtgatgcgcaacggccgggtggagcaggtcggcactcccgaggaggtctacctgcgcccggccacccgcttcgttgcgcagttcctgggcgaggccaacctgctggagggcgagggtgcggccaacggccggctgcggtggggcgactaccacctgcaggtgagccgccacctgtcgcccggcaagacgacggtggcgctgcgccccgagcaggtgcaggtccggtggcccgggtcgacggagccggcgcggccggcggagaaccgggtccacggcatcgtggccgagcggctcttcgtcggcaccggcacccggctgatggtggaggtggccggccgacggctggccgctctgctgcccgcaggcccgggaccggatatcggcgaccaggtcgagctccgcttcgccgcggagcactgcgtggtggtggcgccatga

SEQ ID NO: 65969 - protein, 348 aa, Symbiobacterium thermophilum IAM 14863
MVEFRGVSKRFDSTEALNDLTLEIRPGEFLTLLGPSGCGKTTTLRLLAGFEEPTSGEIWLAGRPVQGLPAYKRPVNTVFQHYALFPHMTVFDNVAFGLRMKKVAPAEIRRRVAEALELVRLGDMGSRRPHELSGGQQQRVALARALVMEPKVLLLDEPLGALDLQLRRAMQVELRQLQRKLGATFLYVTHDQEEALAMSDRIAVMRNGRVEQVGTPEEVYLRPATRFVAQFLGEANLLEGEGAANGRLRWGDYHLQVSRHLSPGKTTVALRPEQVQVRWPGSTEPARPAENRVHGIVAERLFVGTGTRLMVEVAGRRLAALLPAGPGPDIGDQVELRFAAEHCVVVAP

SEQ ID NO: 65970 - DNA, 1113 bp, Symbiobacterium thermophilum IAM 14863
  CDS (1)..(1113): transl_table=11
gtgaacagggaaggggagtctggcatgggcgaggcgcagtccgtcaccctggagcgcgtgtcgaagagcttcaacggcaccgtgctcacggtgaaaaatgtcgacctgcatatcgccggaggcgagttcttcacgctgctcggaccctcgggctgtggcaagaccacaaccctccgcatgatcgccggtttctactaccccacgtcgggccgcatcctcttcggcgaccgcgacgtgacctacatgccgcccaacgaccggaacatcggcatggtcttccagaactacgcgctgttcccgcacatgtccgtgtttgagaacgtggccttcggcctccgggtgcgcaaggtgccccgcgaggagatgaagcgccgggtgagcgaggcgctggcgctggtgcggctggagggcatggagcagcggcgcatcgaccagctctccggtggtcagcaacagcgggtcgccctggcccgcgccctggtcatccggccggccttgctcctgctggacgagccgctctccaacctcgacgcgaagctccgggacgagacccggaccgagatccgccgcatccagacggaatccaacatcacggccgtctacgtgacccacgaccaggccgaggcgatggccatctccgaccgcatcgccgtcatggaaggcggcgtggttcaccaggtgggcacgccgcaggagatctaccaccggccggccacccggttcgtggcgaccttcatcggcaagtccaacctgctggaggggacgctgaccgaggtggatggcaccgccggcgtggtggagctgcccggcaccggccgcatccgggtggacctggagcggcggaacccgcaggtccccacggcggtcggcagccgcgtggtcatgacggtgcggcccgagggcatccaggtggtggcacagcccgaaggccccaacgtcctgaccgggcgggtcgtggcggccgagttcaccggcgcctacaccgagtacctggtcaaggcgggcgagagcacgctggtcgcctcgtcggccgaccggtacggcgaggtgcggcggcccggggatcccatccacctgtacatcccgcctgagcgagtctatctggtggagtga

SEQ ID NO: 65971 - protein, 370 aa, Symbiobacterium thermophilum IAM 14863
MNREGESGMGEAQSVTLERVSKSFNGTVLTVKNVDLHIAGGEFFTLLGPSGCGKTTTLRMIAGFYYPTSGRILFGDRDVTYMPPNDRNIGMVFQNYALFPHMSVFENVAFGLRVRKVPREEMKRRVSEALALVRLEGMEQRRIDQLSGGQQQRVALARALVIRPALLLLDEPLSNLDAKLRDETRTEIRRIQTESNITAVYVTHDQAEAMAISDRIAVMEGGVVHQVGTPQEIYHRPATRFVATFIGKSNLLEGTLTEVDGTAGVVELPGTGRIRVDLERRNPQVPTAVGSRVVMTVRPEGIQVVAQPEGPNVLTGRVVAAEFTGAYTEYLVKAGESTLVASSADRYGEVRRPGDPIHLYIPPERVYLVE

SEQ ID NO: 65972 - DNA, 1047 bp, Symbiobacterium thermophilum IAM 14863
  CDS (1)..(1047): transl_table=11
atgcgctcgactctgcgattggcgaacctggtgaaagagttcgaatcccagaagcggaccgtgcgggcggtgaacgatgtctcgctggacttcccggcgggcgccttcgtcaccctgctcggcccttccggctgcggcaagacgacgatcctccggatgatcgcgggcctggagacccccacctccggggagatctacctggacgacaagcccatcacccatgtgccgcccaacaagcgcgaaacggcgatggtcttccagaactacgccctcttcccgcaccttaccgtctttgagaacgtcgcctacggcctgcggctccggaaggtgcccgaggcggagctgaagcgggcggttcacgagaagttggagatgatgggcctcagcaacatggcggacaggcagcccaaccagctctccggcggccagcagcagcgggtcgcactcgcccgggcgctggtgatgtcgccgaagatcctgctcttcgacgagccgctctccaacctggatgcgaagctgcgcatccaggtgcggcaggacatccgtgagctgcagcggaacctgggcgtcaccaccgtctacgtcacccacgaccaggaggaggcgatggccatctccgattacgtggtgatcatgaacggcggccaggtggagcaggcgggctcgcccgaggagatctacttccagccccgcaacagcttcgtggcggacttcatcggcggggtgaacctcatccccgggcgcatgaccggtcccgacgaggccgagctcctgggccggaaggtgcaggtccgcaatccgtacgggattgcagcgggccaggaggtgaaggtggcggtccggccggaggaggtcacgctgggcgacggccccttcaccgggacggttcggcgggccgtgttcctgggccgggtgaccgagtacgtgatccaggtcggggaccagcggctggtggcggtgatgcacgggcagcaccgccggatgccggagggcgcggagacgaccttcaacttcaacgccggggcgccgctggcgcttgcccggtga

SEQ ID NO: 65973 - protein, 348 aa, Symbiobacterium thermophilum IAM 14863
MRSTLRLANLVKEFESQKRTVRAVNDVSLDFPAGAFVTLLGPSGCGKTTILRMIAGLETPTSGEIYLDDKPITHVPPNKRETAMVFQNYALFPHLTVFENVAYGLRLRKVPEAELKRAVHEKLEMMGLSNMADRQPNQLSGGQQQRVALARALVMSPKILLFDEPLSNLDAKLRIQVRQDIRELQRNLGVTTVYVTHDQEEAMAISDYVVIMNGGQVEQAGSPEEIYFQPRNSFVADFIGGVNLIPGRMTGPDEAELLGRKVQVRNPYGIAAGQEVKVAVRPEEVTLGDGPFTGTVRRAVFLGRVTEYVIQVGDQRLVAVMHGQHRRMPEGAETTFNFNAGAPLALAR

SEQ ID NO: 65974 - DNA, 1119 bp, Bacillus licheniformis ATCC 14580
  CDS (1)..(1119): transl_table=11
atgagcgcaattcagattaggcatgtcagccggcatttcggaaacaccatcgcattggaagacgtacagcttgaagtcaaagaaggggagtttttctccctccttggtccgagcggctgcggaaagtcaacgctcctgaatattattgccgggttccttgaaccgacgtcaggttttgtatatataggaggacgagatgtaactgatttgccgccatacgaccgacatatcggaatggtttttcaggattatgctttattcccgcatctcagcgtttttgacaatgttgcatacggcttgaaagtccgaaaatggccccgccgcaagattgaagaacgggtgatggaatgcctcgctcttgtcaggcttgaagcgtttgctaatcgcatgccccatcagctgagcgggggtcagcagcagcgggtggcgattgcccgggcattggccgttcagccgtctgtgcttttgctagacgagccgctgagcaacctggatgcgaaacttcgaaaagaaatgcagacggagctgcgcagcatccaaaagcgcgtcggcattacaacgattttagtgacgcacgaccaggaggaggctttaagcttatcggacaggattggaattctcggatgcgggaggcttcagcagctcggcactccgttggacgtgtaccgcacgcctgccaatcaatttgtggccgaatttatcggacaggtcaatttactgaaagcgcgtgcgtcgaagatacagccttcatcgggcggctatggatacgaaacggtcgatttcgaagtgtatgaaggcgttccgctgacatttgaaatcaaccaggaactctcaaaaaaaacttctgtattgttcatggtgcggcctgagaggatctcagtctccttcgagaagcaaaagaacaggctgattgaaatgcctgcaacaattaccgaagtcagttacgccgggcatgatctcaggctgaaagccgctgttttcaaaggagaatggatcattcaggcgcccgatcctcaattccctagattgccgaaggcgggagatcaagtgtatctttctttggagccgggcgattttgttccgctggatgttaaggaggatgcagatgagggctgttga

SEQ ID NO: 65975 - protein, 372 aa, Bacillus licheniformis ATCC 14580
MSAIQIRHVSRHFGNTIALEDVQLEVKEGEFFSLLGPSGCGKSTLLNIIAGFLEPTSGFVYIGGRDVTDLPPYDRHIGMVFQDYALFPHLSVFDNVAYGLKVRKWPRRKIEERVMECLALVRLEAFANRMPHQLSGGQQQRVAIARALAVQPSVLLLDEPLSNLDAKLRKEMQTELRSIQKRVGITTILVTHDQEEALSLSDRIGILGCGRLQQLGTPLDVYRTPANQFVAEFIGQVNLLKARASKIQPSSGGYGYETVDFEVYEGVPLTFEINQELSKKTSVLFMVRPERISVSFEKQKNRLIEMPATITEVSYAGHDLRLKAAVFKGEWIIQAPDPQFPRLPKAGDQVYLSLEPGDFVPLDVKEDADEGC

SEQ ID NO: 65976 - DNA, 996 bp, Bacillus cereus E33L
  CDS (1)..(996): transl_table=11
ttggacgggaaaatgaaaaagattattaaagttgaagcagtagaaaaacattttggaaatcaagtgattatcccaccgctttctttagatattaaagaaggggaatttttaacgattttagggccgagtggttgcgggaaaacgacgttacttcgtatgatcgcaggatttgaaacgccaactaaaggaaatcttttattagatgatgaaaagattaacgatttgccaccatataagcgtcatatgaacctagtgttccaacattatgcgctattcccacatatgaatgtggagaaaaatatttgtttcggtatgaaaatgcagaaagtaccggcagcagagcagaaagagcgtgctgaagaggcaatgcgtttaacgcagttacttgagttccgtaatcgtaaacctgcgaagctttctggtggacagcagcagcgtgtagcaattgcgagagcgattgtaaataacccgcgtgtattattactagatgagccacttggggcgttagactttaagttaagaaaagacttgcaacgtgaattgaaaaacttacaacgtaatttaggaattacgttcatatacgtaacgcacgatcaagaagaagcgatgagcatgagtgatcgtatcgttgttatgaataaaggacatattgaacaaattggaacgccgaaagaaatttataataagccgaaaacgttgttcgttgcgacatttatcggtgaaaataatattgtgaaaaacggggaaggctatgtagcaattcgccctgaaaatgtaaaagtgcgttcggttgaagagccgattttaaaagaatatcatcttggacatattgaagacattgagtttgttggaaatatggaaaagctttatgtacgtgatgagaaaacatcagaattactaatggcatatcaaactgctgaagaagcagcgcagtggagcattggagataatgtatacgtaggctgggagcaagaggacgaggtgaccttaaattga

SEQ ID NO: 65977 - protein, 331 aa, Bacillus cereus E33L
MDGKMKKIIKVEAVEKHFGNQVIIPPLSLDIKEGEFLTILGPSGCGKTTLLRMIAGFETPTKGNLLLDDEKINDLPPYKRHMNLVFQHYALFPHMNVEKNICFGMKMQKVPAAEQKERAEEAMRLTQLLEFRNRKPAKLSGGQQQRVAIARAIVNNPRVLLLDEPLGALDFKLRKDLQRELKNLQRNLGITFIYVTHDQEEAMSMSDRIVVMNKGHIEQIGTPKEIYNKPKTLFVATFIGENNIVKNGEGYVAIRPENVKVRSVEEPILKEYHLGHIEDIEFVGNMEKLYVRDEKTSELLMAYQTAEEAAQWSIGDNVYVGWEQEDEVTLN

SEQ ID NO: 65978 - DNA, 1122 bp, Mannheimia succiniciproducens MBEL55E
  CDS (1)..(1122): transl_table=11
gtggaaaatattgttcaaagcaaaccaattattgaactgcgttctctcaaaaaatcgtataacgaaaatacgatcattgataattttaatttaaccattaacaatggtgaatttttaactattttaggcccttcgggttgcggtaaaacgacggtattacgtttgattgccggctttgaagaagccaatggtggtcagattatccttgatggcgaggatgtgactgatttgccggctgaacatcgcccggtaaatacggttttccaaagctatgcactattcccccacatgactattttcgaaaacgtcgcttttggtttgcgtatgcaaaaagtgccgaacgaagaaattaagcctcgcgtattggaagctttgcgcatggttcaattggaagaaatggcggatcgtaaaccgactcaattatccggtggtcagcaacaacgtattgctatcgcgcgcgcggtggtaaataaaccgaaagtactattactggacgaatcattatccgcactggactacaaattacgtaaacaaatgcaaaacgaattgaaagcattacaacgtaaattaggcattaccttcatttttgtaacccatgaccaagaagaagcgttaactatgtccgatcgtattatcgtgttacgtaaaggtaatattgaacaagacggttcaccgcgcgaaatctatgaagaaccgagcaatttatttgtggcgaaattcattggcgaaatcaatatctttgatgcgcaagtattaaatcgtgttgatgaaaaacgcgttcgcgctaatgtagaaggacgtgtttgcgatatttatacggatttagcggtaaaagaaggacaaaaactgaaagtattattacgcccggaagacgttcaattggaagaacttgatgaaaatgagcagtcaagcgccatcatcgggcatattcgtgagcgtaactacaaaggaatgactttagagtcaaccgttgagctggaacacaataacaaacttgtattagtaagcgaattctttaatgaagatgatccgaacattgatcactcattagaccaacgcgtaggtgtaacttggattgaaaaatgggaagtggtattgaacgatgaaaatgacaacgcgtaa

SEQ ID NO: 65979 - protein, 373 aa, Mannheimia succiniciproducens MBEL55E
MENIVQSKPIIELRSLKKSYNENTIIDNFNLTINNGEFLTILGPSGCGKTTVLRLIAGFEEANGGQIILDGEDVTDLPAEHRPVNTVFQSYALFPHMTIFENVAFGLRMQKVPNEEIKPRVLEALRMVQLEEMADRKPTQLSGGQQQRIAIARAVVNKPKVLLLDESLSALDYKLRKQMQNELKALQRKLGITFIFVTHDQEEALTMSDRIIVLRKGNIEQDGSPREIYEEPSNLFVAKFIGEINIFDAQVLNRVDEKRVRANVEGRVCDIYTDLAVKEGQKLKVLLRPEDVQLEELDENEQSSAIIGHIRERNYKGMTLESTVELEHNNKLVLVSEFFNEDDPNIDHSLDQRVGVTWIEKWEVVLNDENDNA

SEQ ID NO: 65980 - DNA, 1149 bp, Legionella pneumophila subsp. pneumophila str. Philadelphia 1
  CDS (1)..(1149): transl_table=11
ctggacaagataagtcacagcacacataattgcagtttttatttaataaagcagatgacaacaccgctcattgaaatccgtcagatttataaatcatacggcaatacaccaattttgaataatgtttcgctaaacgtcaatcacggtgaatttttaaccttactgggcccttcaggttgtggaaaaacaacccttcttcggcttatatctggttttgaacaaccaacgcaaggtgagattttcattaatggtcaatgtgttaatcaattaccacctcaaaaacgggatgtgcatactgtttttcaaagttatgcccttttccctcatttatccgtttttgaaaatgtcgcatttgccttgcgctgcaaaaaaacgcccaaccaggaaatcaggaagcgagtctttgatgcgttaaaacttgtacaacttgaatcgttagctgaaagaaatgtgaaacagttaagtggaggccaacaacaacgtgttgcgattgctcgagcaatcatcaatagacctcaagtactgttgttagatgagccattgagttcccttgactacaggcttaggaaagccatgcaatccgaattgaaacaattacaaaaaaccttgaatatgacgtttatttttgtaacgcatgatcaggaagaagccttatcaatgtctgaccgtattgtcgtctttaatcatggccacattgaacaaattggtactcccaaggctgtctatgaaacccctgccaacctgcatgttgccatgtttattggcgaagcgaatatatttgatattcaggttcacacagtaaaggatcaagacatcataacgaacattgaaggaatccagctatcctgtaaaaacactggcaattatcaagtcaacgaccggcttcatttgatcgttcgtccagaggatattcgagtttggagcttatccgaagtagaaaaaacagaaggaatgttgcctggtcgtattgttgatatcatttataaaggctctacggttgatctcaaagtggaattgtcatcaggcaaaatcatcaatgcttcggagttttttgatgaagacgatgataagctggaatacactctccatgaaaccgtttgggtacaatggttgcctggctgggaggttttattaccttatgaaggctaa

SEQ ID NO: 65981 - protein, 382 aa, Legionella pneumophila subsp. pneumophila str. Philadelphia 1
MDKISHSTHNCSFYLIKQMTTPLIEIRQIYKSYGNTPILNNVSLNVNHGEFLTLLGPSGCGKTTLLRLISGFEQPTQGEIFINGQCVNQLPPQKRDVHTVFQSYALFPHLSVFENVAFALRCKKTPNQEIRKRVFDALKLVQLESLAERNVKQLSGGQQQRVAIARAIINRPQVLLLDEPLSSLDYRLRKAMQSELKQLQKTLNMTFIFVTHDQEEALSMSDRIVVFNHGHIEQIGTPKAVYETPANLHVAMFIGEANIFDIQVHTVKDQDIITNIEGIQLSCKNTGNYQVNDRLHLIVRPEDIRVWSLSEVEKTEGMLPGRIVDIIYKGSTVDLKVELSSGKIINASEFFDEDDDKLEYTLHETVWVQWLPGWEVLLPYEG

SEQ ID NO: 65982 - DNA, 1137 bp, Burkholderia pseudomallei K96243
  CDS (1)..(1137): transl_table=11
gtggcgggcgcgccgtcctatcggccgcagacgggcgccgacgggcgcgccgaaaactttgtccagatcatcgacgtcgtcaagaagttcggcgagaccgtcgcggtgcgcaacgtcgagctgagcgtgcgcaagggcgagctgttcgcgctcctcggcagctccggctgcgggaagtcgacgctgctgcgcatgctcgccggcctcgagacgatcacgtcgggcaagatcctgatcgacggcgaggatctcgcgcagatgccgccgtacaagcggcccgtgaacatgatgttccagtcgtacgcgctgttcccgcacatgacggtcgaggcgaacgtcgccttcggcctcaagcaggaaggcgtgccgaaggccgagctcaaggagcgcgtgcgcgatgcgctcgagctcgtgcagatggcgcgctacgcgagccgcaagccgcatcagctctccggcggccagcagcagcgcgtcgcgctcgcgcgctcgctcgtcaagcggccgaagctgctgctgctcgacgagccgatgtcggcgctcgacaagcagatccgccagcgcacgcagatcgagctcgtcaacatcctcgacaaggtcggcgtcacctgcatcatggtcacgcacgatcaggaggaggcgatgacgatggcggggcgtctcgccgtgatgagcgaaggccagatcgtgcagatcggcacgccgcacgaagtctacgaatatccgaactgccgcttctccgccgagttcatcggctcgacgaacctgttcgagggcgtgaccgtcgaggacgagcccgatcacgtgttcatcgaatcgccggacctgccgtgccggctgtacgtgaaccacgggatcacgggcccgctcggcatgcccgtcacggtgtcggtgcgccccgagcgcatcgcgctgacccgcaagcccgccgacggcgcgtacaactgggggcgcggcgtcgtcacgaacgtcgcgtacatgggcggctattcgctgtatcacgtgaagctcgattccgggaagacggtgatcgcgaacgtgtcgagcctcgcgatcgccgatctcgattcgcccggctggggcgatgaaatctacgtgcgctggagcgccgcggccggcgtggtgctgacgtcatga

SEQ ID NO: 65983 - protein, 378 aa, Burkholderia pseudomallei K96243
MAGAPSYRPQTGADGRAENFVQIIDVVKKFGETVAVRNVELSVRKGELFALLGSSGCGKSTLLRMLAGLETITSGKILIDGEDLAQMPPYKRPVNMMFQSYALFPHMTVEANVAFGLKQEGVPKAELKERVRDALELVQMARYASRKPHQLSGGQQQRVALARSLVKRPKLLLLDEPMSALDKQIRQRTQIELVNILDKVGVTCIMVTHDQEEAMTMAGRLAVMSEGQIVQIGTPHEVYEYPNCRFSAEFIGSTNLFEGVTVEDEPDHVFIESPDLPCRLYVNHGITGPLGMPVTVSVRPERIALTRKPADGAYNWGRGVVTNVAYMGGYSLYHVKLDSGKTVIANVSSLAIADLDSPGWGDEIYVRWSAAAGVVLTS

SEQ ID NO: 65984 - DNA, 1092 bp, Burkholderia pseudomallei K96243
  CDS (1)..(1092): transl_table=11
atgacagctgcatttttgcaaatccagcgcttgcgcaagacctacgacgacgtagtcgcgatcgatcacgtgtccctggacgtgcgcaagggcgaattcatgacattcctcgggccgtccggctcgggcaagagcacgacgctctacatcgtcgcgggcttccaggaaccgaccgaagggtgcgtcttgctcgacggaaggccgttgctgtcggtggcgcccaataagcgcaataccggcatggtgtttcagcgatacacgctgtttcctcacttgaccgtgggcgaaaacgtcgcgtttccgttgcgtgtgcgtcgtcgtcccgatgcgcaggtgaaggcgaaggtcgagcagatgctgaagcttgttcatctggccgactgccgtgatcgtatgcctgcccaattgtcaggcgggcagcagcaacgcgttgcgatcgcacgtgcgttggcctacgatccgcccgtattgctgatggacgaaccgctcgccgcactcgacaaaaagctacgcgaggaaattcagctcgaattgcgtcgcattcaccaagagacgggcgtgacgattctctacgtcacgcacgaccaagaggaggcacttcgtctttccgatcgtattgccgtcttcaacaaaggcgcaatcgaacaggtcggaacgggcgaggagctgtacgccaacccgacgtcgcgcttcgtggcgagcttcatcggtaattcaaatttccttccggtcagggtcacagcgaacgccaatggcggcatgagcggcatattcccgaacggtctcgcagtggcgacggccggccaaggcccggcactgacggccggccatgacggcgcgctgatgatccgccccgagcagatgcgcattcgtgcgttgcaaggcgcgaagggggaggtcgggttacctgtcaccgtgcgcgacataacgtacctcggtgatgcgatgcattacgcggttgccacaccttggcagcaggaaatttcgattcgaatgccggcaagccatcgccatgacagcggactatcgatcggcacgcaggctttcgtcgagtgggatgcgcgcgacgcgcgtgtttttgtcgaggcatag

SEQ ID NO: 65985 - protein, 363 aa, Burkholderia pseudomallei K96243
MTAAFLQIQRLRKTYDDVVAIDHVSLDVRKGEFMTFLGPSGSGKSTTLYIVAGFQEPTEGCVLLDGRPLLSVAPNKRNTGMVFQRYTLFPHLTVGENVAFPLRVRRRPDAQVKAKVEQMLKLVHLADCRDRMPAQLSGGQQQRVAIARALAYDPPVLLMDEPLAALDKKLREEIQLELRRIHQETGVTILYVTHDQEEALRLSDRIAVFNKGAIEQVGTGEELYANPTSRFVASFIGNSNFLPVRVTANANGGMSGIFPNGLAVATAGQGPALTAGHDGALMIRPEQMRIRALQGAKGEVGLPVTVRDITYLGDAMHYAVATPWQQEISIRMPASHRHDSGLSIGTQAFVEWDARDARVFVEA

SEQ ID NO: 65986 - DNA, 1155 bp, Burkholderia pseudomallei K96243
  CDS (1)..(1155): transl_table=11
atgaaatcgacgccttcaatcgacaccgcgcaactggcgcgtcccccggtcggcacgccggccggaacgaacgagttcgtccgcatcgagaacgtcgtgaaaaaattcgcagacagcaccgccgtcgacaacgtcagcctgtcgatcgcgaaaaacgagctgttcgcgctgctcggcagctcgggctgcggcaaatccaccctgctgcggatgctcgccgggctcgagacggccacgtccgggcgcatcttcgtcgacggagaggatctcgcgacgctgccgccatatcgccggcccgtgaacatgatgttccagtcgtacgcgctctttccgcacatgagcgtcgagtcgaacgtcgcgttcggactgaagcaggaaggcacgccgaagcacgagattcgcgagcgcgtcgccgacgcgctgaacctcgtgcagatgagccgctacgcgcggcgcaagccgcatcagctctcgggcggccagcagcagcgtgtcgcgctcgcgcgctcgctcgtcaagcggccgaaactgctgctgctcgacgagccgatgtccgcgctcgacaagaagatccgccagaagacgcagctcgagctcgtgaacatcatcgagaaggtcgacgtgacctgcgtgatggtcacgcacgatcaggaagaagcgatgacgatggcgagccgcctcgcggtgatgagcgaaggccggatcgtgcagatcggcacgccgagccaggtctacgaatttccgaacagccgcttctcggccgaattcatcggctcgacgaatctgttcgagggcgtcgtcgtcgaggacgagcccgatcacatcttcgtcgaaagcgaggatctcgaagcgcgcatgtacgtgagccacggcgtcacgggcccgctcgggatgccggtcggcatctcggttcgcccggagcgcgtgcgcgtgtcgcgcgagcggccgagcgcaccgcacaactgggcgcgcggcgtcgtcaccgacgtcgcgtacatgggcagctattcgctgtatcacgtgcgtctgccgagcggcaagacggtcgtatccaatctctcgagctcgcacctgatgcaggacggtgcgcccgcgtacaacgacgacgtgttcgtctcctggtcgcccgcaagcggcgtggtgctgacgcaatga

SEQ ID NO: 65987 - protein, 384 aa, Burkholderia pseudomallei K96243
MKSTPSIDTAQLARPPVGTPAGTNEFVRIENVVKKFADSTAVDNVSLSIAKNELFALLGSSGCGKSTLLRMLAGLETATSGRIFVDGEDLATLPPYRRPVNMMFQSYALFPHMSVESNVAFGLKQEGTPKHEIRERVADALNLVQMSRYARRKPHQLSGGQQQRVALARSLVKRPKLLLLDEPMSALDKKIRQKTQLELVNIIEKVDVTCVMVTHDQEEAMTMASRLAVMSEGRIVQIGTPSQVYEFPNSRFSAEFIGSTNLFEGVVVEDEPDHIFVESEDLEARMYVSHGVTGPLGMPVGISVRPERVRVSRERPSAPHNWARGVVTDVAYMGSYSLYHVRLPSGKTVVSNLSSSHLMQDGAPAYNDDVFVSWSPASGVVLTQ

SEQ ID NO: 65988 - DNA, 1158 bp, Methylococcus capsulatus str. Bath
  CDS (1)..(1158): transl_table=11
atgcgcccatcccgacggcccaggttccggaacatcctggaaaatcggacaatagcggccatgacccgatccaccatcgccagtttccgcgccgtttccaagcactacggcagtcactgcgccctccgcgacttcaatctggaactccgggaaggcgagctgctcaccctcctcggcccgtcgggctgcggcaagaccacggtgctgcgccttttggccggtctggagattcccgattcgggcgaaatcttcctggacgggcgaacactcgccggcgtgccgccggaagcgcgtaacgtcaacacggtattccagagctatgcccttttcccccatctgagcgtggccgagaatgtcgccttcggcctgcggatgaaaaagctcggcagcgcggaaatccgggcgagaaccgcggaggcattgcgcatggtgcgtctggacgggctgggcgggcaccggccgctacagctgtcgggcggccagcagcagcgcgtggcgctggcccgcgctctggtcaaccgtccgcgggtcctgctgctggatgaatgcttgagcgccctggactatcaactgcggcgcgagatgcagctggaactcaagggtctgcagaggcagaccggcatcaccttcgtcttcgtgacccacgaccgggaagaagctttgtcgatgtcggaccgtatcgccgtgatgcggacgggacggatcgaacaactgggaccgccccgcgacatctacgagcggccggcgaacctgttcgtggcgcagttcgcgggtgagagcaacgttctggaagcgaccgtcacggcgatcacggctccggacagcctgatcgtcgagctggcagggacgccgctgaccgtgcgaaccgaccggcgattccgcgtcggcgccaggctcgtcctggtgctccggccggaggacctgcacgtgcacgatgatgccgccgccgaaggcggcctcgccggacatgtgctggaacgaacctaccgcggcgtgaccctggacacagtgatcgccctggatgccggaccgcggatcaagaccagcgaattcttccgcgaggacacgccggctctggatcatccgcccggccagcgggtacgggtgagctggacgccgggctgggaaatcgtgcttccccatgacccagagacctga

SEQ ID NO: 65989 - protein, 385 aa, Methylococcus capsulatus str. Bath
MRPSRRPRFRNILENRTIAAMTRSTIASFRAVSKHYGSHCALRDFNLELREGELLTLLGPSGCGKTTVLRLLAGLEIPDSGEIFLDGRTLAGVPPEARNVNTVFQSYALFPHLSVAENVAFGLRMKKLGSAEIRARTAEALRMVRLDGLGGHRPLQLSGGQQQRVALARALVNRPRVLLLDECLSALDYQLRREMQLELKGLQRQTGITFVFVTHDREEALSMSDRIAVMRTGRIEQLGPPRDIYERPANLFVAQFAGESNVLEATVTAITAPDSLIVELAGTPLTVRTDRRFRVGARLVLVLRPEDLHVHDDAAAEGGLAGHVLERTYRGVTLDTVIALDAGPRIKTSEFFREDTPALDHPPGQRVRVSWTPGWEIVLPHDPET

SEQ ID NO: 65990 - DNA, 1095 bp, Legionella pneumophila str. Paris
  CDS (1)..(1095): transl_table=11
atgacaacaccgctcattgaaatccgtcaaatttataaatcatacggcaatacaccaattttgaataatgtttcgctaaacgtcaatcacggtgaatttttaaccttactgggcccctcaggttgtggaaaaacaacccttcttcggcttatatctggttttgaacaaccaacgcaaggtgagattttcattaatggccaatgtgttaatcagttaccacctcaaaaacgagatgtacacacggtctttcaaagttatgcccttttcccccatttatccgttttcgaaaatgtcgcatttgccttgcgctgcaaaaaaacgtccaaccaggaaatcaaggagcgagtctttgatgcgttgaaacttgtacaactcgaattgttagccgaaagaaatgtaaaacagttaagtggaggccaacaacaacgtgttgcgattgcacgagcaatcatcaacagacctcaagtactgttgttagatgagccattgagttcccttgactataggcttaggaaagccatgcaatccgagttgaagcaattacaaaaaaccttgaatatgacgtttatttttgtaacgcatgatcaggaagaagccttatcaatgtctgaccgtattgtcgtctttaatcatggccacattgaacaaattggaacgcctaaggctgtctatgaaacccctgccaacctgcatgtcgccatgtttattggcgaagcgaatatatttgatattcaggttcacacagtaaaggatcaagacatcgtaacgaatattgaaggaatccagctatcctgtaaaaacactggcaattatcaagtcaatgagtggcttcatttgatcgttcgtccagaagatattcgagtttggagcttatccgaagtagaaaaaacagaaggaatgttgcctggtcgtattgttgatatcatttataaaggctctacggttgatctcaaagtggaattgtcatcaggcaaaatcatcaatgcttcggagttttttgatgaagacgatgataagctggaatatactctccatgaaaccgtttgggtacaatggctgcctggctgggaggttttattaccttatgaaggctaa

SEQ ID NO: 65991 - protein, 364 aa, Legionella pneumophila str. Paris
MTTPLIEIRQIYKSYGNTPILNNVSLNVNHGEFLTLLGPSGCGKTTLLRLISGFEQPTQGEIFINGQCVNQLPPQKRDVHTVFQSYALFPHLSVFENVAFALRCKKTSNQEIKERVFDALKLVQLELLAERNVKQLSGGQQQRVAIARAIINRPQVLLLDEPLSSLDYRLRKAMQSELKQLQKTLNMTFIFVTHDQEEALSMSDRIVVFNHGHIEQIGTPKAVYETPANLHVAMFIGEANIFDIQVHTVKDQDIVTNIEGIQLSCKNTGNYQVNEWLHLIVRPEDIRVWSLSEVEKTEGMLPGRIVDIIYKGSTVDLKVELSSGKIINASEFFDEDDDKLEYTLHETVWVQWLPGWEVLLPYEG

SEQ ID NO: 65992 - DNA, 1095 bp, Legionella pneumophila str. Lens
  CDS (1)..(1095): transl_table=11
atgacaacaccgctcattgaaatccgtcagatttataaatcatacggcaatacaccaattttgaataatgtttcgctaaacgtcaatcacggtgaatttttaaccttactgggcccttcaggttgcggaaaaacaacccttcttcggcttatatctggttttgaacaaccaacgctaggggagattttcattaatggtcaatgtgttaatcaattaccacctcaaaaacgggatgttcatactgtttttcaaagttatgcccttttccctcatttatccgtttttgaaaatgtcgcatttgccttgcgctgcaaaaaaacgcccaaccaggaaatcagaaagcgagtctttgatgcgttaaaacttgtacaacttgaatcgttagctgaaagaaatgtgaagcagttaagtggagggcaacaacaacgtgttgcgattgcacgagcaatcatcaacagacctcaagtactgttgttagatgagccattgagttcgcttgactataggcttaggaaggcaatgcaatccgaattgaaacaattacaaaaaaccttgaatatgacgtttatttttgtaacgcatgatcaggaagaagccttatcaatgtctgaccgtattgtcgtctttaatcatggccacattgaacaaattggtactcccaaggctgtctatgaaacccctgccaacctgcatgttgccatgtttattggcgaagcgaatatatttgatattcaggttcacacagtaaaggatcaagacatcgtaacaaacattgaaggaatccaactatcctgtaaaaacactggcaattatcaagtcaatgagtggcttcatttgatcgtccgtccagaagatattcgagtttggagtttatctgaagtagaaaaaacagaaggaatgttgcctggtcgtattgttgatatcatttataaaggctctacggttgatctcaaagtggaattgtcatcaggcaaaatcatcaatgcttcggagttttttgatgaagacgatgataagctggaatacactctccatgaaaccgtttgggtacaatggttgcctggctgggaggttttattacctcatgaaggctaa

SEQ ID NO: 65993 - protein, 364 aa, Legionella pneumophila str. Lens
MTTPLIEIRQIYKSYGNTPILNNVSLNVNHGEFLTLLGPSGCGKTTLLRLISGFEQPTLGEIFINGQCVNQLPPQKRDVHTVFQSYALFPHLSVFENVAFALRCKKTPNQEIRKRVFDALKLVQLESLAERNVKQLSGGQQQRVAIARAIINRPQVLLLDEPLSSLDYRLRKAMQSELKQLQKTLNMTFIFVTHDQEEALSMSDRIVVFNHGHIEQIGTPKAVYETPANLHVAMFIGEANIFDIQVHTVKDQDIVTNIEGIQLSCKNTGNYQVNEWLHLIVRPEDIRVWSLSEVEKTEGMLPGRIVDIIYKGSTVDLKVELSSGKIINASEFFDEDDDKLEYTLHETVWVQWLPGWEVLLPHEG

SEQ ID NO: 65994 - DNA, 1137 bp, Haloarcula marismortui ATCC 43049
  CDS (1)..(1137): transl_table=11
atgtcggagatagaactacagaacctctcgaaatcgttcggggagctcgatgcggtgacagatgtctccctatccgttcgggacggggaactgttgtgcttactcggtcccagtggctgtggcaagtcgacgacgatgcgaatgatcagtgggctggagacaccgtcgtccgggacagtctacatcggagatgcggacgtgaccgacgaaccggcctacgacagggacacctcgatggtgttccagaactgggcgctgttcccttacaagaccgtacttgagaacgttgcgttcggtctcaagatgcgtggcatgggaaaacagcagcggcgtgaccgcgccagcgagatgctggaccgcgttcacatggatgggtatgaaagtcacagtccgaccgacctctcgggtggccagaaacagcgtgtcgcgctggcacggtcgctggcagtggaccctgacgtgctactgcttgatgaacccctctcgaacttggataagcgactgcgtgaggagatggagatcgagctgaaagatattcgcgaagagtttcagaaaacgttcgttcacgtcacacacaatcaggacgaagcgttcacccttgctgatcgtatcggcataatgaacgatgggcgactggtgcaggtcggagagccgaatgaagtgtatcgggacccgaaaaacaagtttgtcgaggaattcctgggtgatacaaacttcgtcagtggtactgtaagcgacagtgacggccagtacagctatctggtgacggagttcgactcggagatccgtgtaccggtgacttcgaaaatccagcccgaagcgtcccttactgtctcgctccgtcccgagttcatgcaaatagctcctctcaccgatgaatcaacccgggcatctcaccagacccgtgccgacggtaacggcggtggtggtggtgtttccgggaccgtagagagtactatttatcgcggctccagcatccgccatgtcgtcgacatcggcggggagcaactgttcgtcgaacagagcgttactgaccaatcagcaattgatgaaggagatacggttgagctcagctgggatatcgatgacatactgctgttccgtcccgacggcacgagggtgagggaccgacaatga

SEQ ID NO: 65995 - protein, 378 aa, Haloarcula marismortui ATCC 43049
MSEIELQNLSKSFGELDAVTDVSLSVRDGELLCLLGPSGCGKSTTMRMISGLETPSSGTVYIGDADVTDEPAYDRDTSMVFQNWALFPYKTVLENVAFGLKMRGMGKQQRRDRASEMLDRVHMDGYESHSPTDLSGGQKQRVALARSLAVDPDVLLLDEPLSNLDKRLREEMEIELKDIREEFQKTFVHVTHNQDEAFTLADRIGIMNDGRLVQVGEPNEVYRDPKNKFVEEFLGDTNFVSGTVSDSDGQYSYLVTEFDSEIRVPVTSKIQPEASLTVSLRPEFMQIAPLTDESTRASHQTRADGNGGGGGVSGTVESTIYRGSSIRHVVDIGGEQLFVEQSVTDQSAIDEGDTVELSWDIDDILLFRPDGTRVRDRQ

SEQ ID NO: 65996 - DNA, 1119 bp, Thermus thermophilus HB8
  CDS (1)..(1119): transl_table=11
gtgccaggcctggggttgccccccggggcggcgcgccctaaactgggcgtcgtggccgaggtgctggtgcgtctccagggggtgcggaagcgctacggaaccaccgtggccctggacggggtggacctcgaggtccataggggcgagttcttcagcctcctcgggccctcgggctgcggcaagaccacccttttgcggctcctcgccgggtttgagaccccggacgcgggccggatagagatcggcggccgggacatggcccgggtccccccctacgagcgcccggtgaacaccgtctttcagaactacgccctcttcccccacatgaccgtggaggcgaacatcgccttcggcctcaggatgaaaggccttcccccggaggccatccgggagaaggtggcctgggcgttggagctcgtggacctcctgggcctggagaagcgctaccccagggagctttccggggggcagaagcagcgggtggccctggcccgggccctggtcttggagccccaggtcctcctcctggacgagcccctctccgccctggacgcaaggctccgccaggacctcagggtggagctcatgcagctccagaggcggcttggcaccaccttcatcttcgtcacccacgaccaggaggaggccctggtcatgtccgaccgcatcgccgtgatgcgctcgggccgcattgagcaggtggggcttcccgacgaggtctacgagcgccccaagacccgcttcgtagcggcctttctcggccgctccaacttcctccccgcaaggccccaccccttgggggccgaaacccctttggggcctttgcgccttaaggcccctttggcgcgggaggcccttttggccatccgcccggagaagatccggctctacccggcccaggggggggttcccgcccgggagaacctggtgcgggcggtggtggaggagatcgtctacacgggggcggagaaccagtactacctgagggcgggggaggtgaggcttctggcctataccctgaaccaggacctgcaggagcccggggccgaggagttcgggtacggggaggaggtcctctgctacctccccccggagaacctggtggtggtccatgaatga

SEQ ID NO: 65997 - protein, 372 aa, Thermus thermophilus HB8
MPGLGLPPGAARPKLGVVAEVLVRLQGVRKRYGTTVALDGVDLEVHRGEFFSLLGPSGCGKTTLLRLLAGFETPDAGRIEIGGRDMARVPPYERPVNTVFQNYALFPHMTVEANIAFGLRMKGLPPEAIREKVAWALELVDLLGLEKRYPRELSGGQKQRVALARALVLEPQVLLLDEPLSALDARLRQDLRVELMQLQRRLGTTFIFVTHDQEEALVMSDRIAVMRSGRIEQVGLPDEVYERPKTRFVAAFLGRSNFLPARPHPLGAETPLGPLRLKAPLAREALLAIRPEKIRLYPAQGGVPARENLVRAVVEEIVYTGAENQYYLRAGEVRLLAYTLNQDLQEPGAEEFGYGEEVLCYLPPENLVVVHE

SEQ ID NO: 65998 - DNA, 1062 bp, Geobacillus kaustophilus HTA426
  CDS (1)..(1062): transl_table=11
gtgaacggggaagagatcatccgcttcgagcgagtgacgaaggaatacgacggaacggtcgtattggatgacgtcagttttgcgatggagcgcgggaagttttatacgctgcttggcccgtcagggtgcgggaagacgacgattttgcggctgattgccgggtttatcgaaccgacggaaggaacgatttatttccacgggaagccgattcaaaacgtcccgccgaacaaacggcaagtcaacactgtctttcaagactatgcgttgtttcctcacctcgatgtgtttgaaaacgtggcatttggcttgcgcgtgaaaaagatgaaagaagcggacatccgccaaaaagtgagcgaagcgctccggtttgtcaacttggaaggctatgagcgccgccgcattcaagagatgtccggcggccaacgccagcgcgtcgccattgcccgggcgattgtcaatgaacctgaggtgttgctcttggatgaaccgctgtcagccttggatttgaaattgcgcacggaaatgcagtatgaattgcgtgagctccaacgtcgattgggcattacgtttatttttgtcacgcatgaccaagaagaagcgctggcgatgtccgattacatttttgttctgaataaagggaaaattcagcagttcgggacgccgaaagacatttacgacgagcccatcaaccgattcgtcgccgatttcatcggggaatcgaacattttgtcggggcgcatgatcgacgatttcctcgtcgaatttgccggcaaacagtttgcgtgtgttgaccgcggcttcgcgccaaacgaaccggtcgatgtcgtcatccgcccggaagatttggagctcgcggcgccggaagacgggcagatcgtcatccgcgtcgattcgctcttattccgcggtgtccattatgaaatttgcggctatgacgaaaacggcaacgaatggcttgtccattcgacgaaaaaggcggaagtcggggaaacggtcggcctccgttttgaaccggaagcgattcacgtcatgcgagtcgaaagggaggatgagggcgcatga

SEQ ID NO: 65999 - protein, 353 aa, Geobacillus kaustophilus HTA426
MNGEEIIRFERVTKEYDGTVVLDDVSFAMERGKFYTLLGPSGCGKTTILRLIAGFIEPTEGTIYFHGKPIQNVPPNKRQVNTVFQDYALFPHLDVFENVAFGLRVKKMKEADIRQKVSEALRFVNLEGYERRRIQEMSGGQRQRVAIARAIVNEPEVLLLDEPLSALDLKLRTEMQYELRELQRRLGITFIFVTHDQEEALAMSDYIFVLNKGKIQQFGTPKDIYDEPINRFVADFIGESNILSGRMIDDFLVEFAGKQFACVDRGFAPNEPVDVVIRPEDLELAAPEDGQIVIRVDSLLFRGVHYEICGYDENGNEWLVHSTKKAEVGETVGLRFEPEAIHVMRVEREDEGA

SEQ ID NO: 66000 - DNA, 1137 bp, Salmonella enterica subsp. enterica serovar Paratyphi A str. ATCC
  CDS (1)..(1137): transl_table=11
atgggacagagtaagaaattgaataaacaaccgcgttcgctttcaccgctggtgcttttgtcgggaattagcaaaagtttcgatggcaaagaggtcatttcacagctggatttgaccatcaacaatggcgaattcctcacgctgcttggcccttccggctgcggtaaaacaaccgttcttcgcctgattgccggcctggaaaccgttgatgccgggcatatcatgttggataaccaggatatcacccacgttcccgccgaaaatcgttatgtaaataccgtatttcaaagctacgctttatttccgcatatgacggtgtttgaaaatgtcgcgtttggcttacgaatgcaaaaaacaccagccgccgagatagcgcctcgcgtgaccgatgcgctgcgtatggtgcagcttgaagagtttgcacaacgtaaaccgcaccagctttccggcggacagcagcagcgtgtggctatcgctcgcgcggtggtgaataaacctcgcctgttattactggacgaatcgctctccgcgctggactataaattgcgcaaacaaatgcagaacgagcttaaagcattacagcgtaaactcggtatcacgtttgtttttgtcactcacgatcaggaagaagcgctcaccatgtccgatcgtatcgtggtaatgcgtaatggcgtgattgagcaagacggcacgccgcgtgaaatctatgaagagccaaaaaacctgtttgtcgctggttttatcggcgaaattaaccgctttgacgcaaccgtcattgaacggcttgatgaacagcgcgtccgcgccagcgtagaaggtcgggagtgcaatatatacgtcaatttcgctgtcgaaccgggccaaaaactgaacgtcctgctgcgaccggaagatctacgcgtcgaagagatcaacgatgataaccacatcgaagggcttatcggctacgtgcgcgagcgcaattacaaaggtatgacgctggagtcggtggttgaactggaaaatggcaaaatggtgatggtcagcgaattcttcaacgaagacgatcctgacttcgaccattcacttgaccaaaaaatggccattagttgggtagaaagctgggaggtcgtactggctgatgaagaacacaagtaa

SEQ ID NO: 66001 - protein, 378 aa, Salmonella enterica subsp. enterica serovar Paratyphi A str. ATCC
MGQSKKLNKQPRSLSPLVLLSGISKSFDGKEVISQLDLTINNGEFLTLLGPSGCGKTTVLRLIAGLETVDAGHIMLDNQDITHVPAENRYVNTVFQSYALFPHMTVFENVAFGLRMQKTPAAEIAPRVTDALRMVQLEEFAQRKPHQLSGGQQQRVAIARAVVNKPRLLLLDESLSALDYKLRKQMQNELKALQRKLGITFVFVTHDQEEALTMSDRIVVMRNGVIEQDGTPREIYEEPKNLFVAGFIGEINRFDATVIERLDEQRVRASVEGRECNIYVNFAVEPGQKLNVLLRPEDLRVEEINDDNHIEGLIGYVRERNYKGMTLESVVELENGKMVMVSEFFNEDDPDFDHSLDQKMAISWVESWEVVLADEEHK

SEQ ID NO: 66002 - DNA, 1134 bp, Salmonella enterica subsp. enterica serovar Paratyphi A str. ATCC
  CDS (1)..(1134): transl_table=11
gtgaatgatgtccccaaccgcccgcaggtgaaagcccgtaaagcgctgacgccgcttctggaaattcgcaacctgacgaagtcattcgacgggcaacatgctgtcgatgatatcagtctgactatctataaaggcgagatttttgccctgctgggcgcgtcaggttgtggaaaatcgactctgctacggatgctggcaggttttgaaccgccgagcagcgggcaaattatgctcgacggcgtcgatctggcgcatgttccgccgtatcagcgtccgattaatatgatgtttcagtcctatgcgttgtttccgcatatgacggtagagcagaacatcgcttttggtctgaagcaggacaaactgccgaaggcggagattactagccgcgtcaatgagatgctgggtctggtgcacatgcaggagtttgcgaaacgtaagccgcatcagctttccggcggtcagcgtcagcgcgtggccctggcgcgcagcctggcgaaacgtcctaagctgctcttgttggatgaaccgatgggcgcgctggataaaaaattacgcgaccggatgcagcttgaagtagttgatatccttgagcgcgtcggcgtgacctgcgtcatggtgacgcacgatcaggaagaagccatgacgatggcggggcgcattgccatcatgaaccgtggaaaatttgtgcaaattggcgaaccggaggagatttacgagcatccgacgacccgctatagcgccgaatttatcggatcggtaaatgtttttgagggcttactgaaagcgcgtgaagaggacggtctggtcattgacgcgcccggtttggtacatccgttaaaagtcgatgcggatgcctctgtcgttgataatgtgccggtatatgtggcgctacgtccggaaaaaatcatgctgtgtgagtcgctgcccgccgatggctataatttcgccgtcggcgaagtggcgcatattgcgtatctcggcgatctgtctatttatcatgtgcggctaaaaagcgggcagatgatcagcgctcaactgcagaatgcgcaccgttaccggaaagggttaccgacctggggcgatgaagtgcgtttgtgctgggaagcggatagctgcgtggtcctgacggtataa

SEQ ID NO: 66003 - protein, 377 aa, Salmonella enterica subsp. enterica serovar Paratyphi A str. ATCC
MNDVPNRPQVKARKALTPLLEIRNLTKSFDGQHAVDDISLTIYKGEIFALLGASGCGKSTLLRMLAGFEPPSSGQIMLDGVDLAHVPPYQRPINMMFQSYALFPHMTVEQNIAFGLKQDKLPKAEITSRVNEMLGLVHMQEFAKRKPHQLSGGQRQRVALARSLAKRPKLLLLDEPMGALDKKLRDRMQLEVVDILERVGVTCVMVTHDQEEAMTMAGRIAIMNRGKFVQIGEPEEIYEHPTTRYSAEFIGSVNVFEGLLKAREEDGLVIDAPGLVHPLKVDADASVVDNVPVYVALRPEKIMLCESLPADGYNFAVGEVAHIAYLGDLSIYHVRLKSGQMISAQLQNAHRYRKGLPTWGDEVRLCWEADSCVVLTV

SEQ ID NO: 66004 - DNA, 1104 bp, Silicibacter pomeroyi DSS-3
  CDS (1)..(1104): transl_table=11
ttgcgagggtttgttttgacctccacaaccaacgaagccctgccgatctcggtgaagaacgtgaccaagacctatggtcctgtgcatgcgctcaacgatgtgtcgctcgaggtgcgaagcggcgagttcctgacgctgctgggcccgtccggctcgggcaagacgacgctgttgatggtgctggcggggttcacccggcccgattgcggcagtctgaaattcggtgaccgcgaggtgatccgcacgccgccgcatctgcgcgatgtggggatgacatttcaaagctatgcgctgttcccgcatatgacggtggcgggcaacgtgggctatccgctgaaactgcgcaaggtgcccaaggccgagatcgcccagcgggtcgaggcggcgctggaaaccgtgcagctgggcgggtttggcgagcggcgcatcgaccagctgtcgggcggccagcgccagcgtgtcgccgttgcccgcgccatcgtgttcgaaccgcgcatcctgttgatggacgagccgctgtcggcgctggacaagaagctgcgcgaccagatgcagatcgagctgcgccacctgcatgaaaagctgggcatgaccacggtctatgtcacccatgaccagcgcgaggcgctgaccatgtcggaccggatcgccgtggtgaaccatggccgcatcatgcagctggccaccccgcgcgacctgtacgagcggcccgccaatcgcttcgtggcggatttcatcggggaatccacctttttgccggtgtcgcgccagggcgatacggtgctgttcgacggcacgcccctgttgcatgacagcccgccgcccgaggcggcgagcctgctgttgatgatccgccccgaacgggtggtgctgtcgcgcgaggggccgcgcgagggggccaacaactttgccgccaccgcgaccgaggtggtctatcagggcgacagtttcctgctgcatgcggcgctggccaatggcgagcagatcgtgctgcgcggcgccatgcggggtgccaatgtcaccgccttgccagcggtgggcgaggcgctgaccctgtgcctggcgcccgaggataccgtgctgatcgacggaagcgaggcctag

SEQ ID NO: 66005 - protein, 367 aa, Silicibacter pomeroyi DSS-3
MRGFVLTSTTNEALPISVKNVTKTYGPVHALNDVSLEVRSGEFLTLLGPSGSGKTTLLMVLAGFTRPDCGSLKFGDREVIRTPPHLRDVGMTFQSYALFPHMTVAGNVGYPLKLRKVPKAEIAQRVEAALETVQLGGFGERRIDQLSGGQRQRVAVARAIVFEPRILLMDEPLSALDKKLRDQMQIELRHLHEKLGMTTVYVTHDQREALTMSDRIAVVNHGRIMQLATPRDLYERPANRFVADFIGESTFLPVSRQGDTVLFDGTPLLHDSPPPEAASLLLMIRPERVVLSREGPREGANNFAATATEVVYQGDSFLLHAALANGEQIVLRGAMRGANVTALPAVGEALTLCLAPEDTVLIDGSEA

SEQ ID NO: 66006 - DNA, 1101 bp, Silicibacter pomeroyi DSS-3
  CDS (1)..(1101): transl_table=11
atggtgccaccgacgggggaacgatccttgaccaaagccatcagcgcacgtgcgttgcgcaaggtgtatccgggcacgccgcccgtcgaggccctgggcggcgtcgacatcgacatcgccgataacgagttcttcaccctgctggggccctcggggtgcggcaagacgacgatcctgcggctgatcgcggggtttgaacaccccacttctggttcgctggacatgttcgggcaaagcctgctggacctgcccccctacaagcgccagatcaacaccgtcttccagagctatgcgctgtttccgcatatgagcgttgccgagaacatcggctttggcctggaaatgctgggcaagcccaaatccgagatcaagagcaccgtggccgagatgatggatctggtgcagatgtcccatctcgccgaccgccagaccagccagatctcgggcggccagcaacagcgcgtggccctggcccgggctctggcgcccaaaccccgggtgctgctgctggacgagccactgagcgcgctggatttcaagctgcgcaaaaacatgcagctggagctgaagaggcttcagaccgaaaccggcatcaccttcatctttgtcacccatgaccaggaagaggcgctgaccatgtcggaccggatcgcggtgatgtccgatggcgccatccgccagatcggctctccgcgcgacatctacgaccatcccgccgaccggttcgtggccgatttcatcggcgacaccaatttcctgcccgctgacgtgatcgccaccgagggtgagcgcgtgtcgctgcggctggggtcaggcaagaccatcaccgcgcccgcccgccatgccggcggcggccgggtcacactggcggtgcgccccgaacatgcccgcctggaagccgaggacagcggcctgttgcccggcgtgctgagcgatgcggtctatttcggcaccgacacccatttccacatcgcgctggatgacggcaccgcctttgtcctgcgccagcagaacagccccgataccgagacccgctttgccaagggggagagggtttcggtcagcttcccgggcgaggtggcccaggtgctgagggactga

SEQ ID NO: 66007 - protein, 366 aa, Silicibacter pomeroyi DSS-3
MVPPTGERSLTKAISARALRKVYPGTPPVEALGGVDIDIADNEFFTLLGPSGCGKTTILRLIAGFEHPTSGSLDMFGQSLLDLPPYKRQINTVFQSYALFPHMSVAENIGFGLEMLGKPKSEIKSTVAEMMDLVQMSHLADRQTSQISGGQQQRVALARALAPKPRVLLLDEPLSALDFKLRKNMQLELKRLQTETGITFIFVTHDQEEALTMSDRIAVMSDGAIRQIGSPRDIYDHPADRFVADFIGDTNFLPADVIATEGERVSLRLGSGKTITAPARHAGGGRVTLAVRPEHARLEAEDSGLLPGVLSDAVYFGTDTHFHIALDDGTAFVLRQQNSPDTETRFAKGERVSVSFPGEVAQVLRD

SEQ ID NO: 66008 - DNA, 1002 bp, Silicibacter pomeroyi DSS-3
  CDS (1)..(1002): transl_table=11
atggccgaggcgttctctggcggcagtctgcggatcgcgggtgtgtcgaagtattttggcacgttccgggcggtcaacgcggtcgatctggaaatccgcaagggagagttcctgaccctgctgggcccttcgggctcgggcaagacgacgctgttgatgatgatcgcggggtttctggacatcaccagcggtgacatcgcgctggacggaagctcgattgccaatgtgccggcggaaaaacgcaacttcgggatggtgtttcagggctatgccctgttcccgcatatgacggtgcgcgacaatatcggctatgcgctgagcgtgcgcaaacgtcccgaggccgagatccggacccgtgtcgacgagatgctggaactggtgcagttgcaggatttcgccaaccgcaagcccggccagctgtcgggcggtcagcaacaacgcgtggcgctggcgcgggcgctgtgtttcgcgccgccggtcctgctgctggacgagccgctgggcgcgctcgacaagaagctgcgggtcgaggtgcaggaacagctcaaggacattcaccgccgcgtcggcacgaccttcatctacgtcacccatgaccaggaagaggcgctgtcgatgtccgaccgcatcgtcatcatgcgggacggggccatcgaacaggtgggctctccgcaagagctgtacgagcggcccgcaacccgctttgccgccagtttcctgggcaagtcgaactttgttcaacagaacggccagacctatgcgctgcgccccgagaagatcgacattcacctgggcaccggtcacccgcaggcccggcgtaagggaactattaccagcatcacctatttcgggtcgatgcagcggatcatcgtcgaaaccaccgaggccgaacagatcgaagtggatatcgacgtctggcgcaaccagcagcccctgcacgagggcgagaccgtcgagctgagctggcaggacgcggcggcggtggacctgaaggaaagctga

SEQ ID NO: 66009 - protein, 333 aa, Silicibacter pomeroyi DSS-3
MAEAFSGGSLRIAGVSKYFGTFRAVNAVDLEIRKGEFLTLLGPSGSGKTTLLMMIAGFLDITSGDIALDGSSIANVPAEKRNFGMVFQGYALFPHMTVRDNIGYALSVRKRPEAEIRTRVDEMLELVQLQDFANRKPGQLSGGQQQRVALARALCFAPPVLLLDEPLGALDKKLRVEVQEQLKDIHRRVGTTFIYVTHDQEEALSMSDRIVIMRDGAIEQVGSPQELYERPATRFAASFLGKSNFVQQNGQTYALRPEKIDIHLGTGHPQARRKGTITSITYFGSMQRIIVETTEAEQIEVDIDVWRNQQPLHEGETVELSWQDAAAVDLKES

SEQ ID NO: 66010 - DNA, 1128 bp, Silicibacter pomeroyi DSS-3
  CDS (1)..(1128): transl_table=11
ttgcaatcatcgacctttgcgccttgggaagatcccaacgcgaaaccgctgatccgtttcaagaacgtgaccaaacggtttggcgaattcaccgctatcgacaacctgacgctggatatcttcgagcgcgagttctttgccctgcttggcccgtccggctgcggcaagaccacgatgatgcgtatgctggccggcttcgagaccgccaccgagggtgttatcgaactggccgggcaggatatcgcgccggtgccgccgaacaagcgcgcagtgaacatgatgttccagtcctacgcgctgttcccgcatctcagcgtgtgggacaacatcgcctttggcctgcgccgcgaccgcaagtccaaggccgagatcgaagcccgggtcgaagagatgctgcgcctggtccggctggagaagtttgcccaacgcaaaccgcaccagatctcgggcgggcagcggcagcgggtggcacttgcccgatcgctggcaaaggcgccgaaactcttgctgctggacgagccgctgggtgcgctggacaagaagctgcgccaggatacccagttcgaactgatggacattcaggagaaaaccggcaccaccttcgtgatcgtgacccacgatcaggaagaggcgatgaccgtggccagccgcgtcgcggtcatggatcagggccagctgatgcaggttgccacgcctgaccgcatctatgaaactccaaattcggtttatgtggccgacttcatcggcgacgtgaacatcatcgaaggccgcgccacacccgagggcgaagacggctatcgcatcgactgggccgagggacagccggcgctgaccgcaaaatccgccaccaggttcgacaaggggcagaaatgccatctggcgatccgccccgaaaaggtggcgatcagcgccgaacgccccgccgacgctgccaatgcggtgcagggtcgggtgcatgacatcgcctatctcggcaacctctcaacctattacgtggaacttgccgacggcacgatcatcaaggcgcagacctcgaacacgcgccgcatctcgcgccgcagctttacctgggaagacaccgtctggctgtcatggacagccacggcgggtgtgctgctggcaaactga

SEQ ID NO: 66011 - protein, 375 aa, Silicibacter pomeroyi DSS-3
MQSSTFAPWEDPNAKPLIRFKNVTKRFGEFTAIDNLTLDIFEREFFALLGPSGCGKTTMMRMLAGFETATEGVIELAGQDIAPVPPNKRAVNMMFQSYALFPHLSVWDNIAFGLRRDRKSKAEIEARVEEMLRLVRLEKFAQRKPHQISGGQRQRVALARSLAKAPKLLLLDEPLGALDKKLRQDTQFELMDIQEKTGTTFVIVTHDQEEAMTVASRVAVMDQGQLMQVATPDRIYETPNSVYVADFIGDVNIIEGRATPEGEDGYRIDWAEGQPALTAKSATRFDKGQKCHLAIRPEKVAISAERPADAANAVQGRVHDIAYLGNLSTYYVELADGTIIKAQTSNTRRISRRSFTWEDTVWLSWTATAGVLLAN

SEQ ID NO: 66012 - DNA, 1119 bp, Silicibacter pomeroyi DSS-3
  CDS (1)..(1119): transl_table=11
gtgtacggggagctggcattgaccacacgcaccagcagcgacacgttcgttgaattcgaacgtgtccagaagagttatgacggcgaaacgcttgttgtaaaagacctcaatctgaccatgcccaaaggcgagtttctgacgatgctcggcccctcgggttccggtaagacaacctgtctgatgatgctggccggctttgaaaccgccacccatggcgagatcaagctcgacgggcgtccgatcaacaacatccctccgcacaaacgcgggatcggcatggtgttccagaactacgccctgttcccgcacatgacgattgccgagaacctgtcctttccgctggaagtgcgcaagatcggcaaatccgaccgcgaggccaagatcaagcgcgcgttggacatggtcgagatgggcgcctttggcggccgccgcccggcccagctctcgggtggccagcaacagcgggtcgcattggcccgcgcgctggtattcgaaccggaactggtgctgatggacgaaccgctgggcgcgctggacaagcagctgcgcgaaaagatgcagttcgaaatcacccgtctggcgcatgagctgggaatcaccgtggtctatgtgacccatgaccagaccgaggcgctgaccatgtcggaccgcgtcgcggtgttcaacgatggcgtgatccagcagctggcgccgcctgacgagctttatgaacagcctgccaacagcttcgttgcccaattcatcggcgagaacaacaccctcgaaggtgaggtgcaggagattcgcgacggtatcgcagtggtccggctcgacgatggcgggctgatcgactgcaaaccggtcaatgtcagccgcccgggcgaacgcacccgcgtgtcgatccgccccgaacgggtcgaattcaacaagagccgcctgcaaaaaggtgtccacacgctcaaggccgaggtgatggaattcatctacatgggcgacatcttccgcacccgcgtgcgcgttgccggtaatgacgaattcatcatcaagacccggaacgcgcccgaccaggtgcggctggaacccggcgcccagatcgagatcggctggctgcccgaagattgccgcgcgctggacgcctga

SEQ ID NO: 66013 - protein, 372 aa, Silicibacter pomeroyi DSS-3
MYGELALTTRTSSDTFVEFERVQKSYDGETLVVKDLNLTMPKGEFLTMLGPSGSGKTTCLMMLAGFETATHGEIKLDGRPINNIPPHKRGIGMVFQNYALFPHMTIAENLSFPLEVRKIGKSDREAKIKRALDMVEMGAFGGRRPAQLSGGQQQRVALARALVFEPELVLMDEPLGALDKQLREKMQFEITRLAHELGITVVYVTHDQTEALTMSDRVAVFNDGVIQQLAPPDELYEQPANSFVAQFIGENNTLEGEVQEIRDGIAVVRLDDGGLIDCKPVNVSRPGERTRVSIRPERVEFNKSRLQKGVHTLKAEVMEFIYMGDIFRTRVRVAGNDEFIIKTRNAPDQVRLEPGAQIEIGWLPEDCRALDA

SEQ ID NO: 66014 - DNA, 1122 bp, Francisella tularensis subsp. tularensis SCHU S4
  CDS (1)..(1122): transl_table=11
atgcaaaaatcttcaaaaaaacctttggtttctataaagaacctatctaaacaatttgatgatggtcacctagctgttgactctgtaaaccttgatgtctatccaaaagaatttttttctttgcttggcggatctggaagtggtaaaagtacactacttagaatgctcgcaggatttgaaagacctactgatggtaagataattatcgatggtgtagatatgtcaaatactccatcatacaaaagacctgtaaacatgatgtttcaatcttatgcattatttccgcatatgaatgtaaagcaaaatatcatgtttggcttaaaacaagagaagtcccttaaaaaagaagaaattgagaaagcaacagacgcagctttgaaaattattaagatggatcatcttgctaaaagaaaaccacatcaattatctggtggacaacgtcaacgtgtggctctagcaagatgtttggcaaaaagacctaaattgattctcctagatgaaccattatctgcactagacaaaaacctacgtgaccaaatgcagtttgaacttgtagatattcaagaacaaacaggtagtacttttataatggtaactcatgatcaagaagaagctatgacaatgtcgacaagaattggtatcatgacagatggttggctagagcaagtaagtactccttcagaaatttatgaattccctaaaagtcgatttgtagcgaattttattggtaaaagtacaatttttgagggtcgtgtagaagcagtaagtagaactcgaagcattataacttcagagcaagctggcactaattttgtattaagaagaaatatagaagctattgaagatcaagaaatctgggttggattgcgacctgaaaagatagttataagtaaagacaaacccgaagattacaatcctaataaacctgtgaattgtattaaaggtattgttgaagatattgcttatatgggcggcttatctacttaccatgttaggactgctaacggcaatataattaagtctactgacttcaatattgagagaaatgcagatcatccttcttgggatgatgaagtatatctcacttgggaatcagaaaatatcatggtgctatactcataa

SEQ ID NO: 66015 - protein, 373 aa, Francisella tularensis subsp. tularensis SCHU S4
MQKSSKKPLVSIKNLSKQFDDGHLAVDSVNLDVYPKEFFSLLGGSGSGKSTLLRMLAGFERPTDGKIIIDGVDMSNTPSYKRPVNMMFQSYALFPHMNVKQNIMFGLKQEKSLKKEEIEKATDAALKIIKMDHLAKRKPHQLSGGQRQRVALARCLAKRPKLILLDEPLSALDKNLRDQMQFELVDIQEQTGSTFIMVTHDQEEAMTMSTRIGIMTDGWLEQVSTPSEIYEFPKSRFVANFIGKSTIFEGRVEAVSRTRSIITSEQAGTNFVLRRNIEAIEDQEIWVGLRPEKIVISKDKPEDYNPNKPVNCIKGIVEDIAYMGGLSTYHVRTANGNIIKSTDFNIERNADHPSWDDEVYLTWESENIMVLYS

SEQ ID NO: 66016 - DNA, 1095 bp, Bacillus clausii KSM-K16
  CDS (1)..(1095): transl_table=11
atgggtgtagcaattgatattgacaatgtggtcaaaatgtacgatgagcatacggttattgatgggttgtcgctcacgattcagccaggtgaattgtttacgttattaggtccgtctggttgtgggaaaacgacgctcttgcgaatgattatcggttttaattctgtggacggcggtgcgattaaagtcgatggccagcgcatcaatgatgttcctgtcagcaagcggaaaatggggatggtgtttcaaaactatgcgattttcccccatatgacagtggcagagaacatcgcctttgggttgaagacgctcaaggatagcaaggcgcaaatgcaaagcaagattgatcatataatgaaggtcgtgcacattcaagaccaccatagcaaaaagccagataagctttcagggggccaacaacaacgggttgcacttgcccgggcgcttgtgattaatccgaatgttttgttaatggatgagccgctttcgaacttggatgcgaaactgcggattgagatgagaaatgcgattaaagaaattcagcaagaagtggggataacgaccgtttatgtgacccatgaccaagaagaggcgctggcgatttctgaccggattgctgtcatgaataaaggggtgatccaacaaattggcaaacctgaacaaatttatttgcgtccgtcaaatttgttcgttgcccagtttattggcacttccaatgtgattaaagcgaaggttgaaaagcaaggcactgatacgttcatcgtctttaatggcgaatacaaagaaaagcttgataacgttgtagaaacggttgaaaatgggcaggaagtgctggtgtctgtccgtccacaggaatttacgattacgcaagaagcaagtgccatcgctggcgttgtcgaaagcacgatgtttttagggatcaatactcattatctcgtcacccttacgactggagagcgagtggaagtggtgcaacatatcgaagacaaagcgatcattccagagggaacgaatatttatgtaaaggtgaagccgcatttaattaacttgtttgatgtggcgaatgaacaaacgctcatgaaggcaggtgagtga

SEQ ID NO: 66017 - protein, 364 aa, Bacillus clausii KSM-K16
MGVAIDIDNVVKMYDEHTVIDGLSLTIQPGELFTLLGPSGCGKTTLLRMIIGFNSVDGGAIKVDGQRINDVPVSKRKMGMVFQNYAIFPHMTVAENIAFGLKTLKDSKAQMQSKIDHIMKVVHIQDHHSKKPDKLSGGQQQRVALARALVINPNVLLMDEPLSNLDAKLRIEMRNAIKEIQQEVGITTVYVTHDQEEALAISDRIAVMNKGVIQQIGKPEQIYLRPSNLFVAQFIGTSNVIKAKVEKQGTDTFIVFNGEYKEKLDNVVETVENGQEVLVSVRPQEFTITQEASAIAGVVESTMFLGINTHYLVTLTTGERVEVVQHIEDKAIIPEGTNIYVKVKPHLINLFDVANEQTLMKAGE

SEQ ID NO: 66018 - DNA, 1284 bp, Xanthomonas oryzae pv. oryzae KACC10331
  CDS (1)..(1284): transl_table=11
ttgtgctggtctgcattgggaggagtgaggagttcgatggcatccaccgagaccacgccgcagccgcatgttgccccttacgacagcggttatctcagcattagcgaggtccgcaaggagttcgatggattcgttgccgtggacgctgtcagcctgcagatccgcaagggcgaaatgttcgcgttgctgggaggctcgggcagtggcaaatccacgctgctgcgttgtcttgcggggttcgaccggccaagcagtgggcgcatcgttctggacggtcagcccatcgatgcgctgccgccgtacgaacgcccgatcaatatgatgttccagtcgtatgcgctgtttccgcatatgagcgtggagcagaacatcgccttcggcctgaaacaggaaggcttgtccaaggctgcgatcgccgcccgtgtcggcgagatgctcgagctggtgcagcttggcgcgctggccaagcgcaagccgcatctgctctccggcgggcagcagcaacgcgtggccctggcgcgctcgctggccaagcggcccaagctgttgttgctggacgaaccgatgggcgcgctggacaagaagctgcgctcgcagatgcagctggagctggtcaacatcatcgaaacctccggcgtcacctgcgtcatgctgacccacgatcaggaagaggccatgacgatggccacccgcatcgcgctgatggaccagggctggattcaacaagtcggcacgcccgacgaaatctacgagcagccagcgaatcgctttgcggccgagttcatcggctcggtcaatctgatcgatgcggtcatcgccgacgacgcgcccgattacgtcggcttgaagacctctgcgttcgatgcctgcatccgcatcggtcacggcatcaccggcttcgaagggcaggcggtggcgttcgcgctgcgcccggaaaagctcgccatcggcaaggacgagccgacgcaggcgtgcaacaaggcgcagggcgtgatcgaggacatcgcctatttcggcagccattcggtgtatcacgtgcgcctgcccagcgggatcaagctgatggccaacttcgccaatcgccagcgctgggccagcgaagcgctgacctggggcgacaccgtgtgggtgggctggggcgaagacgacggcgtagtgctcaccgttatacacgccaatcgccgcctacatcggcatcgtgtactgctatttgccgttcatggtgttgccgctgtacgccaacctggtcaagcacgacaaccgtctgctcgaagccgcctatga

SEQ ID NO: 66019 - protein, 427 aa, Xanthomonas oryzae pv. oryzae KACC10331
MCWSALGGVRSSMASTETTPQPHVAPYDSGYLSISEVRKEFDGFVAVDAVSLQIRKGEMFALLGGSGSGKSTLLRCLAGFDRPSSGRIVLDGQPIDALPPYERPINMMFQSYALFPHMSVEQNIAFGLKQEGLSKAAIAARVGEMLELVQLGALAKRKPHLLSGGQQQRVALARSLAKRPKLLLLDEPMGALDKKLRSQMQLELVNIIETSGVTCVMLTHDQEEAMTMATRIALMDQGWIQQVGTPDEIYEQPANRFAAEFIGSVNLIDAVIADDAPDYVGLKTSAFDACIRIGHGITGFEGQAVAFALRPEKLAIGKDEPTQACNKAQGVIEDIAYFGSHSVYHVRLPSGIKLMANFANRQRWASEALTWGDTVWVGWGEDDGVVLTVIHANRRLHRHRVLLFAVHGVAAVRQPGQARQPSARSRL

SEQ ID NO: 66020 - DNA, 1119 bp, Vibrio fischeri ES114
  CDS (1)..(1119): transl_table=11
ttgaacgttacacaacaatccgaaaaagaagcagttattaaattaactggtatttctaaaagctttgatggcaaagaagtgatttctaattttgacttagatgtaaatcacggtgaatttttaacaattcttggtccttcaggttgtggtaaaaccacagtgttacgcatgatcgcaggtttcgaaaccgctgatgcaggaacaattttattggattcgacagatgtaacgtcagtgcccgcagaacagaggcatgtgaataccgtattccaaagctacgccctattcccgcacatgacggtgtttgagaacgttgcgtttggtttacgtatgcaaaaagttgcagaatcagaaattgagcctcgtgtaacagaagctctgcaaatggttcgtttagctcaaatggcaaaccgtaagcctcatcagttatctggtggtcaacaacaacgtatcgcaattgctcgtgcagttgtaaacaagcctaaggttcttcttcttgatgaatctttatctgcgcttgattacaaactacgtaagcaaatgcaaattgaacttaaacaattacaacgtcaattaggtattacttttattttcgtaactcacgaccaggaagaagctctttcaatgtctgaccgtattatcgtgatgcgtgatggtgttattgaacaagacggtactcctcgtgaaatatacgaagaaccaaagaacttatttgttgctcgcttcatcggtgaaatcaacgtatttgctgctacagtgcaagaacgtcttgatgaaaaacgtattaaagcagaaatcgaagatacttcagctatcgtatattgcgaccttgatgttgctcctggcgataaagtgaaagtattacttcgtcctgaagatttacgcctagaagaaatcaaagagtctgataataaaggcatcactggctatgtacgtgaacgtacgtacaaaggtatgactttagactctgtacttgagttagattcaggtatgcgtgtaatgatcagtgagttctttaatgaagatgatccagatgttgatcactctttaggtcaaaaagtagcaattacttgggttgaaagctgggaagtggtgttagcagatgaacaagaagtttaa

SEQ ID NO: 66021 - protein, 372 aa, Vibrio fischeri ES114
MNVTQQSEKEAVIKLTGISKSFDGKEVISNFDLDVNHGEFLTILGPSGCGKTTVLRMIAGFETADAGTILLDSTDVTSVPAEQRHVNTVFQSYALFPHMTVFENVAFGLRMQKVAESEIEPRVTEALQMVRLAQMANRKPHQLSGGQQQRIAIARAVVNKPKVLLLDESLSALDYKLRKQMQIELKQLQRQLGITFIFVTHDQEEALSMSDRIIVMRDGVIEQDGTPREIYEEPKNLFVARFIGEINVFAATVQERLDEKRIKAEIEDTSAIVYCDLDVAPGDKVKVLLRPEDLRLEEIKESDNKGITGYVRERTYKGMTLDSVLELDSGMRVMISEFFNEDDPDVDHSLGQKVAITWVESWEVVLADEQEV

SEQ ID NO: 66022 - DNA, 1293 bp, Neisseria gonorrhoeae FA 1090
  CDS (1)..(1293): transl_table=11
atgcggggttctttagaacccctttttatttcatgctgcccgtgcgcttcacaagagtttcagacggcatcagacgttgcgactcccgccagcaatcaaacagctttttatcacccattcgaaaatccgttttgccggtactcgtctttttattggagtattgccattatgaccgcaaccacagcgtcttcagccaaaccttatctgcaaatccaaggtttggtgaaaaagtttggtgacaattacgctgtcgataacatcgacttggacatttatcaaaacgaaatcttcgcccttttgggcagttccggcagcggaaaatctacgctgctgcgtatgctggcgggtatggaaagtcccaatcagggaaaaatcatccttgatggtcaagatattaccaaacttgcaccctatgaccgccccatcaatatgatgttccaaagttacgcgctttttccgcatatgacggtggagcaaaacattgccttcggtctgaaacaggacaaaatgcctaaaggcgaaatcgatgcgcgcgtcgaagaaatgctgcgtctggttcagatgaccaaatttgccaaacgcaaaccgcaccaattgtccggtggtcagcagcaacgtatcgccttggcgcgcagtttggcaaaacgtccgaaaatcctgttgcttgacgaacctttgggggcgttggataagaaattgcgccagcaaacccagctcgagttggtcaatacgctggaacaagtcggcgtaacctgcattatggttacgcacgaccaagaagaggcgatgacgatggcgacccgcatcgccattatgtccgacggtcagttgcagcaggtcggcacgcccagcgacgtgtacgactatcccaacagccgcttcactgccgagtttatcggcgaaaccaacatctttgacggtgtggtgattgaaaatcatgccgactatgccgttatcgaatgcgaaggtttggaaaaccacgtccgtatcgaccatggtttgggtggcccgagcgagcaggatctttgggttagtattcgaccagaggatattgatttatataaagaaaaacccgaatatttgggcgactacaactgggcgaaaggcacggtaaaagaaattgcctatttgggcagcttcgccatataccatatcaaactcgccaacgggcgcgtcgtcaaaagccaagttcctgcaccttactggtatgtgcgtaacatcacgccgccgacttgggatgaaaccgtctatatcagctggccggaaaaccaaccgactccgttgttccgttga

SEQ ID NO: 66023 - protein, 430 aa, Neisseria gonorrhoeae FA 1090
MRGSLEPLFISCCPCASQEFQTASDVATPASNQTAFYHPFENPFCRYSSFYWSIAIMTATTASSAKPYLQIQGLVKKFGDNYAVDNIDLDIYQNEIFALLGSSGSGKSTLLRMLAGMESPNQGKIILDGQDITKLAPYDRPINMMFQSYALFPHMTVEQNIAFGLKQDKMPKGEIDARVEEMLRLVQMTKFAKRKPHQLSGGQQQRIALARSLAKRPKILLLDEPLGALDKKLRQQTQLELVNTLEQVGVTCIMVTHDQEEAMTMATRIAIMSDGQLQQVGTPSDVYDYPNSRFTAEFIGETNIFDGVVIENHADYAVIECEGLENHVRIDHGLGGPSEQDLWVSIRPEDIDLYKEKPEYLGDYNWAKGTVKEIAYLGSFAIYHIKLANGRVVKSQVPAPYWYVRNITPPTWDETVYISWPENQPTPLFR

SEQ ID NO: 66024 - DNA, 1134 bp, Salmonella enterica subsp. enterica serovar Choleraesuis str
  CDS (1)..(1134): transl_table=11
gtgaatgatgtcccccaccgcccgcaggtgaaaacccgtaaagcgctgacgccgcttctggaaattcgcaacctgacgaagtcattcgacaggcaacatgctgtcgatgatgtcagtctgactatctataaaggcgagatttttgccctgctgggcgcgtcaggttgtggaaaatcgactctgctacggatgctggcaggttttgaaccgccgagcagcgggcaaattatgctcgacggcgtcgatctggcgcatgttccgccgtatcagcgtccgattaatatgatgtttcagtcctatgcgttgtttccgcatatgacggtagagcagaacatcgcttttggtctgaagcaggacaaactgccgaaggcggagattaccagccgcgtcaatgagatgctgggtctggtgcacatgcaggagtttgcaaaacgtaagccgcatcagctttccggcggtcagcgccagcgcgtggccctggcgcgcagcctggcgaaacgtcctaagctgctcttgttggatgaaccgatgggcgcgctggataaaaaattacgcgaccggatgcagcttgaagtggtggatatccttgagcgcgtcggcgtgacctgcgtcatggtgacgcacgatcaggaagaagcgatgacgatggcggggcgcattgccatcatgaaccgtggaaaatttgtgcaaattggcgaaccggaggagatttacgagcatccgacgacccgctatagcgccgaatttatcggatcggtaaatgtttttgagggcttactgaaagcgcgtgaggaggacggtctggtcattgacgcgcccggtttggttcatccgttaaaagtcgatgcagatgcctctgtcgttgataatgtgccggtatatgtggcgctacgtccggaaaaagtcatgctgtgtgagtcgccgcctgccgatggctataatttcgccgtcggcgaagtggcgcatattgcgtatctcggcgatctgtctatttatcatgtgcggctaaaaagcgggcagatgatcagcgctcaactgcagaatgcgcaccgttaccggaaagggttaccgacctggggcgatgaagtgcgtttgtgctgggaagcggatagctgcgtggtcctgacggtataa

SEQ ID NO: 66025 - protein, 377 aa, Salmonella enterica subsp. enterica serovar Choleraesuis str
MNDVPHRPQVKTRKALTPLLEIRNLTKSFDRQHAVDDVSLTIYKGEIFALLGASGCGKSTLLRMLAGFEPPSSGQIMLDGVDLAHVPPYQRPINMMFQSYALFPHMTVEQNIAFGLKQDKLPKAEITSRVNEMLGLVHMQEFAKRKPHQLSGGQRQRVALARSLAKRPKLLLLDEPMGALDKKLRDRMQLEVVDILERVGVTCVMVTHDQEEAMTMAGRIAIMNRGKFVQIGEPEEIYEHPTTRYSAEFIGSVNVFEGLLKAREEDGLVIDAPGLVHPLKVDADASVVDNVPVYVALRPEKVMLCESPPADGYNFAVGEVAHIAYLGDLSIYHVRLKSGQMISAQLQNAHRYRKGLPTWGDEVRLCWEADSCVVLTV

SEQ ID NO: 66026 - DNA, 1062 bp, Brucella abortus biovar 1 str. 9-941
  CDS (1)..(1062): transl_table=11
atggcttttctgaatatcaaaaacctgaaaaagagcttcggcaccaatacggtcgtccatgatttcaacctcgccgtggaaaagggtgaattcgtctcctttctcggcccatcgggctgcggcaagaccacagttctgcgcatgattgccggctttgaaacctcggacgacggctcgattgaaatcgacggcaaggacgtggtgaacctgaggcccaaccagcgcaatatcggcatggtgtttcaggcttatgcgctctttcccaatatgaccgttgcacagaacgtttcgttcggcctgcgcgtttcgggcaagtcccgctcggaaatcgatgccaccgtgaaggaaatgctgagcctcatccggctcgaccatctggccgaccgctacccctaccagatgtccggtggccagcagcagcgcgtggcgcttgcccgtgcactcgccaccaagccgcaggttctcctgctcgacgagccactttcggcgctcgatgcgaaaatccgcatatccttgcgggaagaaatccgcgccatccagcaaaagctcggcatcaccacggttttcgtcacgcatgaccaggaagaggcgctgtcgatctccgaccgcatcgtggtgatgcatgaaggccgcgccgaccagatcggctcacccttcgatatttataaccgcccggcctcgcgcttcgtcgcatccttcgtcggcacgctcaacatgctggaagcttctgtcagcgaaccggcacagaacagcatcgatctcgacgggcgccagatcaccgtgcaggaaacgctcgctcatcaccccaagggcaagccattgacgctggcgctccgcccggaggcggtgagccttgaagcccgcaagagccacgacacttcgctggaagccactattgatgacgtgcacttcctcggctccgtcatccgtacgcgcgtgatactcggcaagaaccggctgtccttcgacacgtttaacgacccgacccacccgccgccacaacgcggcgacaaggtgacagtgcatttcgcctcacacgatcttctcgtgctggcagattag

SEQ ID NO: 66027 - protein, 353 aa, Brucella abortus biovar 1 str. 9-941
MAFLNIKNLKKSFGTNTVVHDFNLAVEKGEFVSFLGPSGCGKTTVLRMIAGFETSDDGSIEIDGKDVVNLRPNQRNIGMVFQAYALFPNMTVAQNVSFGLRVSGKSRSEIDATVKEMLSLIRLDHLADRYPYQMSGGQQQRVALARALATKPQVLLLDEPLSALDAKIRISLREEIRAIQQKLGITTVFVTHDQEEALSISDRIVVMHEGRADQIGSPFDIYNRPASRFVASFVGTLNMLEASVSEPAQNSIDLDGRQITVQETLAHHPKGKPLTLALRPEAVSLEARKSHDTSLEATIDDVHFLGSVIRTRVILGKNRLSFDTFNDPTHPPPQRGDKVTVHFASHDLLVLAD

SEQ ID NO: 66028 - DNA, 1068 bp, Brucella abortus biovar 1 str. 9-941
  CDS (1)..(1068): transl_table=11
ttgacggactatcgcatccgctttgaaaatatcagtaaatcctatggcgatttcaaagttatagacggcctgaacctcgatatcgaacggggcgaattcgtaagcctgctggggccctcggggtcgggcaagaccacccttttgatgatgctcgccggttttgaaaatccaagtagcggcacgatccatgtggacggaaagtccatcaactccgtcccttcctataagcgcaatatgggcgtcgttttccagaattatgcgctgtttccacatatgacggtggcggaaaacattgcctttcccttgcagatgcggggggtgggcaaggcgcaagcagctgagaaggtcgcgcgcgtgctggatatggtgcagctttcggccatgagcgagcgtaaaccatcgcaactttcgggtggtcagcaacagcgtgtcgctttggcgcgtgcgctggtgttcgagccgcatgtggtgctgatggatgagccgctcggcgcgctcgacaagcagttgcgcgagcagatgcagcttgatatccgcgccctgcacaaccggcttggcctcaccatcgttttcgtcacacatgaccagagcgaggcactcaccatgtcggaccgcatcgcggtcttcaacaagggcaagatcgagcagatcggctcgccacgcgctatttatgacgagccgcagacacgtttcgtcgccgaattcatcggcgagacgaacctggccgaaggcacggtggaaagcgttgaaggttcaagaattcttatccgtttgaaggacggcaccgccattgccgcttcatccgcttccaggcccatcagcggccagaatgtgcttctttccattcgcccggagcgcatcgagcttggagaggcggatggcgcggaaaaccggctggcggcgcgcgtgatggacagtgtttatcagggcgaccatctgcgtatccagcttgaggccaaggcgcataattttgtggttcgccttgatcgcaaggcgcgcgaatggcagccgggtgcggacgtggccgcaagcttcaaggccgccgattgctggaccatcctcgtatga

SEQ ID NO: 66029 - protein, 355 aa, Brucella abortus biovar 1 str. 9-941
MTDYRIRFENISKSYGDFKVIDGLNLDIERGEFVSLLGPSGSGKTTLLMMLAGFENPSSGTIHVDGKSINSVPSYKRNMGVVFQNYALFPHMTVAENIAFPLQMRGVGKAQAAEKVARVLDMVQLSAMSERKPSQLSGGQQQRVALARALVFEPHVVLMDEPLGALDKQLREQMQLDIRALHNRLGLTIVFVTHDQSEALTMSDRIAVFNKGKIEQIGSPRAIYDEPQTRFVAEFIGETNLAEGTVESVEGSRILIRLKDGTAIAASSASRPISGQNVLLSIRPERIELGEADGAENRLAARVMDSVYQGDHLRIQLEAKAHNFVVRLDRKAREWQPGADVAASFKAADCWTILV

SEQ ID NO: 66030 - DNA, 1029 bp, Pseudomonas syringae pv. syringae B728a
  CDS (1)..(1029): transl_table=11
atggcatttctgcagctcgaaggtctctccaaacgctacggctccattgacgcggtggttgccaccaacctggccgtcgacaagggcgaattcgtttcactgctcggcccttccggctgcggcaaaaccaccaccctgcaaatgatcgccggtttcgttgaagtcagtgacgggcgcattgtgctcgacgggcgcgacatcacccacgccaaacccagcagccgaggcctcggcgtagtgtttcaaagctatgcgctgtttccgcacatgaccgtggccgacaacgttgcatttggcctgcggatgcgcaaggtggctgccgccgagttgcacccgcgtgtcaaacgggtgctggagctggtgcgcctcggtcagcatgccgagcgctacccgcgcgagctgtccggtggtcagcgccagcgggtcgcattggcccgcgcactggtaatcgagccgccagtgctgctgctcgacgagccgctgtccaacctggacgccaacctgcgcgaagagatgcagttcgagatccgccgcattcagaacgaagtcggcattaccacgctgatggtcacccatgatcaggccgaagccctgtcgatcagcgatcgggtggtggtgatgcaggccggtcgtatcacccagatcgacgagccatacaagctctacgaacacccgcgcacacgcttcatctcgggttttgtcggcaaggccaacatgttgcagggtgatctggacagcagcggcattccgcagattcgtcaggtgcccggcgatggcagcctgaccctcagcctgcgtcccgagaagatcgatctggtggcgcctggctgcggacggctgtccgggcgcatcgtcacgcgttattttctcggcagccagtggctgtatcggattgagaccggcattggcgaagtgacggtagtacgtcgcaacgacggccaggcgccgctggaacaaggcgcggcggtcgacatggactggcccgacgagttgctgcgcgtgctggatgccgacgaggtgcgcgcatga

SEQ ID NO: 66031 - protein, 342 aa, Pseudomonas syringae pv. syringae B728a
MAFLQLEGLSKRYGSIDAVVATNLAVDKGEFVSLLGPSGCGKTTTLQMIAGFVEVSDGRIVLDGRDITHAKPSSRGLGVVFQSYALFPHMTVADNVAFGLRMRKVAAAELHPRVKRVLELVRLGQHAERYPRELSGGQRQRVALARALVIEPPVLLLDEPLSNLDANLREEMQFEIRRIQNEVGITTLMVTHDQAEALSISDRVVVMQAGRITQIDEPYKLYEHPRTRFISGFVGKANMLQGDLDSSGIPQIRQVPGDGSLTLSLRPEKIDLVAPGCGRLSGRIVTRYFLGSQWLYRIETGIGEVTVVRRNDGQAPLEQGAAVDMDWPDELLRVLDADEVRA

SEQ ID NO: 66032 - DNA, 1155 bp, Pseudomonas syringae pv. syringae B728a
  CDS (1)..(1155): transl_table=11
atgagtgccgtgatcaaagaccccgcccatcagccacacaacacactggtcagcctgtgtaatctgaacaagcactatggaaatttcgccgccgtcgacgacatttccctggacatccaggacggcgaattcctgaccttcctgggctccagcggctcgggaaaaagcaccacgctgtcgatgctcgccggcttcgaaacgcccagctcgggcgagattctggtgggtggcaaatcgctggtgaatgtgccgccacacaagcgcgacatcggcatggtgtttcagcgctactcgctgttcccgcacctgtcggtacgcgacaacattgccttcccgctggcgatccgcaagctgcctgcggccgagcgcgagaagaaagtcgatgcgatgctcaagctggttcagctggaagcctttgctcatcggcgcccgtcgcaactgtcaggcggccagcagcagcgggtcgccatcgcccgagcgctggtttacgagccgcgcatcctgctgatggacgagcctctgggcgcactggacaagaagctgcgcgaagacctgcaggacgaactgcgccagttgcatcgccggctgggcatcaccatcgtttacgtaacccatgatcaggaagaagccatgcgcctgtcacagcgcatcgccattttcagccatggcaagatcgtcggtctgggctcgggctatgacctgtatcaggatccgccgaatgccttcgtcgcctcgtttctcggcaactcgaacttcctcaggctcaaggcccagggcaatgccgtggcaaccttcgaaggcagcacactggcgattcgcctgaccgcagggctgaagaccgatcaggaggtgctgctcatggtgcgcccggagaaagcccaggcgctgagcgtgtcccaggcagcggccatgccgcttgaagcaggctggaacgaggtaaacgccacggttgctgaagtgctttttctcggcgagagccagacatgctcggtggtctcagccggaggcactgccatgacggtcaaagcgctttctgcgaacggcatggcgctcaaggcgggcgacccggtgcgcgtgcgttgggccgcggcagacgcgtgcatctacaccgagtggaccgacagcgacctgaacaaggccgccggcacgcactga

SEQ ID NO: 66033 - protein, 384 aa, Pseudomonas syringae pv. syringae B728a
MSAVIKDPAHQPHNTLVSLCNLNKHYGNFAAVDDISLDIQDGEFLTFLGSSGSGKSTTLSMLAGFETPSSGEILVGGKSLVNVPPHKRDIGMVFQRYSLFPHLSVRDNIAFPLAIRKLPAAEREKKVDAMLKLVQLEAFAHRRPSQLSGGQQQRVAIARALVYEPRILLMDEPLGALDKKLREDLQDELRQLHRRLGITIVYVTHDQEEAMRLSQRIAIFSHGKIVGLGSGYDLYQDPPNAFVASFLGNSNFLRLKAQGNAVATFEGSTLAIRLTAGLKTDQEVLLMVRPEKAQALSVSQAAAMPLEAGWNEVNATVAEVLFLGESQTCSVVSAGGTAMTVKALSANGMALKAGDPVRVRWAAADACIYTEWTDSDLNKAAGTH

SEQ ID NO: 66034 - DNA, 1125 bp, Pseudomonas syringae pv. syringae B728a
  CDS (1)..(1125): transl_table=11
atgagcgacgtcgatacaagcgctggagcaaatgatgttctggtcagctttcgtggtgtgcagaagagctacgacggcgaagcactgatcgtcaaagacctcaacctggacattcgcaagggcgagttcctgaccctgctcggtccttccggctccggcaagaccaccagtctgatgatgctggccggtttcgagaccccgacggccggtgaaatcctcctcggtggccgcgccatcaacaacgtgccaccgcataaacgcgacatcggcatggtgttccagaactacgccttgtttccgcacatgaccgtggccgagaacctggcgttcccgttatcggtgcgtggcatgagcaagacagacgtcggcgagaaggtcaaaaaggcactgggcatggtccagctcgatacctttgcgcatcgctatccggcgcagctgtccggtggccagcagcagcgcgttgcgctggcgcgtgcgctggtcttcgaaccgcaactggtgctgatggatgagccgctcggcgccctcgacaagcagctgcgcgaacacatgcagatggagatcaagcacttgcaccagcgcctgggtgtgaccgtggtctatgtgactcacgaccagggcgaagcgctgaccatgtcggaccgggtcgcggtcttccatcagggcgagatccagcagatcgcgccgccccgcagcttgtacgaagaaccgaagaacaccttcgtcgccaacttcatcggcgagaacaaccgcctcaacggacgtctggtcagtcaggacggcgaccgctgtgtggtcgagctggagcgtggcgaaaaagtccacgcgctggcaatcaatgtcggtcagccaggtggcccggtcaccctgtcgatccgtcccgagcgcatcaacctcaatggccgcagcgagagctgcgccaaccgtttttccggtcgtgtggccgagttcatctatctgggcgaccacgttcgcgtgcgtctggaagtggcaggcaagcacgacttcttcgtcaaacagccgattgccgaactggaccccggcctgagcgtgggcgacgtggtgcccatcggctggcaagtcgagcacgtccgagcgctcgaccccttgcagcaagtgcattga

SEQ ID NO: 66035 - protein, 374 aa, Pseudomonas syringae pv. syringae B728a
MSDVDTSAGANDVLVSFRGVQKSYDGEALIVKDLNLDIRKGEFLTLLGPSGSGKTTSLMMLAGFETPTAGEILLGGRAINNVPPHKRDIGMVFQNYALFPHMTVAENLAFPLSVRGMSKTDVGEKVKKALGMVQLDTFAHRYPAQLSGGQQQRVALARALVFEPQLVLMDEPLGALDKQLREHMQMEIKHLHQRLGVTVVYVTHDQGEALTMSDRVAVFHQGEIQQIAPPRSLYEEPKNTFVANFIGENNRLNGRLVSQDGDRCVVELERGEKVHALAINVGQPGGPVTLSIRPERINLNGRSESCANRFSGRVAEFIYLGDHVRVRLEVAGKHDFFVKQPIAELDPGLSVGDVVPIGWQVEHVRALDPLQQVH

SEQ ID NO: 66036 - DNA, 1143 bp, Pseudomonas syringae pv. syringae B728a
  CDS (1)..(1143): transl_table=11
atggcagttgcctccggcgcctacaagaaagccctcgaaggcggtcagcaacccaaagaggtgctggtcaggattgatcgggtcacgaaaaagttcgacgagacgatcgcggtggacgatgtgtccctgcagatcaacaagggcgagatcttcgccctgcttggcggctctggctccggcaaatcgacactgctgcgcatgctggccgggttcgaacggccgaccgaaggccgcatctacctcgacggcgtcgacatcaccgacatgccgccgtacgaacgcccgatcaacatgatgttccagtcctacgcgctgttcccgcacatgaccgtggcggacaacatcgccttcggcctgaagcaggacaagctgggcaagccggaaatcgaagcccgcgtggcggagatgctcaagctggtgcagatgacccagtacgccaagcgcaagccgcatcagctctctggcggtcagcgtcagcgcgtggccctggctcgttcgctggcgaaaaagcccaagctgttgctgctcgacgagccgatgggtgcgctggacaagaaactgcgttcgcagatgcaactggagctggtggagatcatcgagcgcgtcggcgtgacctgcgtgatggtgactcacgatcaggaagaggccatgaccatggccgagcgcatcgcgatcatgcacctgggctggatcgcgcagatcggcagcccgatcgacatctacgagaccccgaccagccgtctggtctgcgaattcatcggcagcgtcaacctcttcgaaggtgacgtgatcgaggacatggaagcccatgcgctgatccgcagtcccgagctggagcgcaatatctatgtcggccacggcgtcagtacgtcggtggaagacaagcacattacctacgcactgcgtccggagaagctgctgatcaccaccgagcagccaggcttcgaatacaactggtcgcgtggcaaggtccacgacatcgcctatctgggcggtcattcggtgttctacgtcgagctgccgggcggcaagctggtgcagtcgttcgtcgccaacgccgagcgtcagggcgcgcggcctacctggggcgatgaagtctacgtctggtgggaagacgacagcggcgtggtactgcgctcatga

SEQ ID NO: 66037 - protein, 380 aa, Pseudomonas syringae pv. syringae B728a
MAVASGAYKKALEGGQQPKEVLVRIDRVTKKFDETIAVDDVSLQINKGEIFALLGGSGSGKSTLLRMLAGFERPTEGRIYLDGVDITDMPPYERPINMMFQSYALFPHMTVADNIAFGLKQDKLGKPEIEARVAEMLKLVQMTQYAKRKPHQLSGGQRQRVALARSLAKKPKLLLLDEPMGALDKKLRSQMQLELVEIIERVGVTCVMVTHDQEEAMTMAERIAIMHLGWIAQIGSPIDIYETPTSRLVCEFIGSVNLFEGDVIEDMEAHALIRSPELERNIYVGHGVSTSVEDKHITYALRPEKLLITTEQPGFEYNWSRGKVHDIAYLGGHSVFYVELPGGKLVQSFVANAERQGARPTWGDEVYVWWEDDSGVVLRS

SEQ ID NO: 66038 - DNA, 1152 bp, Xanthomonas campestris pv. campestris str. 8004
  CDS (1)..(1152): transl_table=11
ttgttgtcaccgagaggatgcatggccctttccgaagccgtcttgcccgcacctgccgccgccgatgcggggtatctgtcgatccgtgaggtccgcaaggagttcgacggcttcgtggcggtggacgatgtcagcctgcagatccgcaagggcgagatcttcgcgctgctgggcggctcgggcagcggcaaatccaccttgctgcgctgtcttgccggcttcgagcggcccaccaagggcagcatcgtgctcgatggccagcccatcgacgcgttaccgccgtacgagcggccgatcaacatgatgttccaatcgtatgcgctgttcccgcatatgacggtggagcagaacatcgccttcgggctcaagcaggaaggcttgcccaaggcggcggtggcccagcgggtgggcgagatgctcgagctggtgcaacttgcgcgcctggccaagcgcaagccgcatgagttgtccggtgggcagcagcagcgcgtggcgctggcgcgctcgttggccaagcggcccaagctgctgctgctggacgagccgatgggcgcgctggacaagaagctgcgttcgcagatgcagctggaactggtcaacatcattgaaacctccggcgtcacctgcgtgatggtcacccacgaccaagaagaagccatgaccatggcgacgcgcatcgcactgatggaccacggctggatccagcaggtgggcacgccggatgaaatctacgagcagccggccaaccgtttcgcggccgaattcatcggctcggtcaatctgatcgaggccgtcatcgccgaagacgcgcccgattcggtcagcctcaccaccgcggcgttcgccgcgccaattcgcatcggccacggcatcaccgggttcgaagggcaggctgtggcatttgcagtgcgcccggaaaaactcggcatcggcaagcaggagccggcgcaggcctgcaacaaggcgcagggcgtgatcgaagacattgcctatttcggcagccactcggtctaccacgtgcgcctgcccagcggcatcaagctgatggcgcatttcgccaatcggcaacgctgggccagcgaagcgctgacctggggcgatgcagtgtgggtggggtggggcgaggacgacggcgtggtcctcaccgcatga

SEQ ID NO: 66039 - protein, 383 aa, Xanthomonas campestris pv. campestris str. 8004
MLSPRGCMALSEAVLPAPAAADAGYLSIREVRKEFDGFVAVDDVSLQIRKGEIFALLGGSGSGKSTLLRCLAGFERPTKGSIVLDGQPIDALPPYERPINMMFQSYALFPHMTVEQNIAFGLKQEGLPKAAVAQRVGEMLELVQLARLAKRKPHELSGGQQQRVALARSLAKRPKLLLLDEPMGALDKKLRSQMQLELVNIIETSGVTCVMVTHDQEEAMTMATRIALMDHGWIQQVGTPDEIYEQPANRFAAEFIGSVNLIEAVIAEDAPDSVSLTTAAFAAPIRIGHGITGFEGQAVAFAVRPEKLGIGKQEPAQACNKAQGVIEDIAYFGSHSVYHVRLPSGIKLMAHFANRQRWASEALTWGDAVWVGWGEDDGVVLTA

SEQ ID NO: 66040 - DNA, 1146 bp, Haemophilus influenzae 86-028NP
  CDS (1)..(1146): transl_table=11
gtgaaattagggagaaaaccaaagctagtggaaaatcagcctcaaaacaagcctattattgagcttcgttcaatcaaaaaatcctatggttctaacaccattattaacgatttcaatcttgcaattaataacggtgagtttgtcactattcttggcccttcaggctgtggtaagaccacagttttacgcttacttgcaggcttagaagaattggattcaggtagcattattttagatggtgaagatatcaccaatgtgccagcggaaaaacgtcatattaatacggtattccaaagctatgcgctatttccacatatgacaatttttgagaacgtggctttcggtttgcgtatgcaaaaagtaccaaacgaggaaattaaaccgcgtgttttagaagccttgcgtatggtacaactagaagaaatggctgatcgtaagccaactcaactttctggcggacaacaacaacgtattgctatcgctcgtgccgtagtaaataaaccaaaagtgttgttacttgatgagtctttatctgcattggattacaaattgcgtaaacaaatgcaacaagaactcaaaatgttacaacgtcagcttggcattacctttatttttgtcacccacgatcaagaagaagcgattacaatgtctgatcgtattgtattattgcgtaaaggtaaaatcgcacaggatggttctccacgtgaaatctatgaagatccagctaacttattcgttgctcgtttcattggcgaaattaacgtatttgaagccactgtgattgaacgaaaatcagaacaagttgtactggcaaatgttgaaggtcgtatttgtgatatttatacggatatgcctgtggaaaaagatcaaaaacttcaagtactccttcgccctgaagatattgtgattgaagaattagatgaaaatgaacattctaaagcaattatcggtcatattattgaccgcacttataaaggaatgacattagaatcaacggtagagtttgatcataacggaatgcgtgtccttgtaagtgaattctttaatgaagatgatccacatatggatcatagcataggacaacgcgtaggtatcacatggcacgaaggctgggaggttgtactcaacgatgaagataatcaataa

SEQ ID NO: 66041 - protein, 381 aa, Haemophilus influenzae 86-028NP
MKLGRKPKLVENQPQNKPIIELRSIKKSYGSNTIINDFNLAINNGEFVTILGPSGCGKTTVLRLLAGLEELDSGSIILDGEDITNVPAEKRHINTVFQSYALFPHMTIFENVAFGLRMQKVPNEEIKPRVLEALRMVQLEEMADRKPTQLSGGQQQRIAIARAVVNKPKVLLLDESLSALDYKLRKQMQQELKMLQRQLGITFIFVTHDQEEAITMSDRIVLLRKGKIAQDGSPREIYEDPANLFVARFIGEINVFEATVIERKSEQVVLANVEGRICDIYTDMPVEKDQKLQVLLRPEDIVIEELDENEHSKAIIGHIIDRTYKGMTLESTVEFDHNGMRVLVSEFFNEDDPHMDHSIGQRVGITWHEGWEVVLNDEDNQ

SEQ ID NO: 66042 - DNA, 1143 bp, Pseudomonas fluorescens Pf-5
  CDS (1)..(1143): transl_table=11
atggcaaacgcctccagcacttaccgcaaggccctcgaaggcactccgagcccgcagaaggtcctggtcaagatcgaccgcgtgaccaagaagttcgatgaaaccgtggccgtggacgatgtgtccctggagatccaccaaggcgagatctttgccctgctgggcggttccggctccggcaaatccaccctgctgcgcatgctcgccggcttcgaacgccccaccgaaggccgcatcctgctggatggcgtggacatcaccgacatgccgccctacgagcggccgatcaacatgatgttccagtcctacgccctgttcccccacatgaccgtggcccagaacattgccttcggcctcaagcaggaccgcctgccggccagcgagatcgacgcccgggtcgaggaaatgctcaagctggtgcacatgacccagtacgccaagcgcaagccgcaccagctctccggtggccagcgccagcgcgtggccctggcccgctccctggccaagcgccccaagctgctcttgctggacgaacccatgggcgccctggacaagaagctgcgctcgcagatgcaactggaactggtggagatcatcgagcgcgtgggcgtgacctgcgtgatggtgacccacgaccaggaagaggccatgaccatggcccagcgcatcgccatcatgcacctgggctggatcgcccagaccggcagcccggtggacatctacgaagcgccggtgagccgcctggtgtgcgaattcatcggcaacgtcaacgccttcgacggcaccgttaccgaagacctggaaggctacgccatcatcgactgcgcggacctcgagcagcagatctacgtcggccacggggtcagcacctcggtgcaggacaagtcggtgacctacgccatccgcccggaaaagatgctggtcaccaccctcaagcccgacgcccgctacaactggtccaagggcaaggtgcatgacatcgcctacctgggcggtcactcggtgttctacgtcgagctgcctggcggcaagatcgtccagtcgttcatggccaacgccgagcgccgtggctcgcggccgacctgggatgacgaagtctacgtctggtgggaagacgacagcggcgtggtactgcgagcatga

SEQ ID NO: 66043 - protein, 380 aa, Pseudomonas fluorescens Pf-5
MANASSTYRKALEGTPSPQKVLVKIDRVTKKFDETVAVDDVSLEIHQGEIFALLGGSGSGKSTLLRMLAGFERPTEGRILLDGVDITDMPPYERPINMMFQSYALFPHMTVAQNIAFGLKQDRLPASEIDARVEEMLKLVHMTQYAKRKPHQLSGGQRQRVALARSLAKRPKLLLLDEPMGALDKKLRSQMQLELVEIIERVGVTCVMVTHDQEEAMTMAQRIAIMHLGWIAQTGSPVDIYEAPVSRLVCEFIGNVNAFDGTVTEDLEGYAIIDCADLEQQIYVGHGVSTSVQDKSVTYAIRPEKMLVTTLKPDARYNWSKGKVHDIAYLGGHSVFYVELPGGKIVQSFMANAERRGSRPTWDDEVYVWWEDDSGVVLRA

SEQ ID NO: 66044 - DNA, 1119 bp, Pseudomonas fluorescens Pf-5
  CDS (1)..(1119): transl_table=11
atgaatgccctgcatgcgctgcaaacgctggcggtgtccatccgttcagtgcgcaaggtctacggcgatccacacagcggcccggtggccctgaagaacatcgacctggatatccgcgacaacgaattcttcacccttctcggcccctcgggctgtggcaagaccaccctcttgcggatgatcgccgggttcgagttcccgacccagggcgagatccttctctatggcgagaacatcgccgaccggccgcccttcgagcgcccggtgaacacggtgttccagcattacgcactgttcccccacatgaccctggccgagaacctggccttcggcctggaatcgcgccctatgggccaggtattgagcaaggcgcagatcgacgagcgggtgcgcgagatgctggccctggtgcagatggaacgctttgcggcgcgcaagcccaaccagctgtccggcggccagcagcaacgcatcgccctggcccgagccctggctccccaccccaaggtactgctgctggacgagccgctgtcggccctggacctcaagctgcgccaggccatgcgcgaagaactcaaggccatccaggccaagaccggtatcaccttcatcttcgtcacccacgaccaggaagaagccctgaccctgtccgaccgcatcgctgtgctctccgaaggtgaagtgcaacaggtgggtcgcccggaagaaatctacgagcagccgcgcaatcgcttcgtcgccgacttcatcggtgaaaccaacttcatcccggccatggtcagccgtgtcgaagcgggcctggcctggttcagcgggcccgccgggcaggcgctgccggcgcaaccctgcaccaccgccaaggtcggccagcaggtcaccctgtcggtgcgccccgagcgcttgcacctgcgcggtgatgcctcgcaaggcgccctggcgtgccgcatcgaagcgctgatctacctgggcaccgacctgcaataccaggtcagcctcggcgacggcacgcgcctcaccgtgcgcacgcccaacagcctcgaacaccacccgcgtctgagcgtaggcagcagcgccgggctgctgttcgaacgcggcagcgccagcgtcctgctggattga

SEQ ID NO: 66045 - protein, 372 aa, Pseudomonas fluorescens Pf-5
MNALHALQTLAVSIRSVRKVYGDPHSGPVALKNIDLDIRDNEFFTLLGPSGCGKTTLLRMIAGFEFPTQGEILLYGENIADRPPFERPVNTVFQHYALFPHMTLAENLAFGLESRPMGQVLSKAQIDERVREMLALVQMERFAARKPNQLSGGQQQRIALARALAPHPKVLLLDEPLSALDLKLRQAMREELKAIQAKTGITFIFVTHDQEEALTLSDRIAVLSEGEVQQVGRPEEIYEQPRNRFVADFIGETNFIPAMVSRVEAGLAWFSGPAGQALPAQPCTTAKVGQQVTLSVRPERLHLRGDASQGALACRIEALIYLGTDLQYQVSLGDGTRLTVRTPNSLEHHPRLSVGSSAGLLFERGSASVLLD

SEQ ID NO: 66046 - DNA, 1125 bp, Pseudomonas fluorescens Pf-5
  CDS (1)..(1125): transl_table=11
atgagcgaggtcgtttcaagtgctggggccaacgatgttctggtcagctttcgtggtgtgcagaagagctacgacggcgagaacctgatcgtcaaagacctcaacctggaaattcgcaaaggcgagttcctcaccctgctggggccgtccggttccggcaagaccaccagcctgatgatgctggccggtttcgaaaccccgaccgccggcgagatccagctggccgggcgttcgatcaacaatgtgccgccgcacaagcgcgacatcggcatggtgttccagaactacgcgctgttcccccacatgaccgtggccgagaacctggcctttccgctgtcggtgcgcggcctcggcaagaccgacatcagcgagcgggtcaagcgcgtgctgagcatggtccagctcgacgctttcgcccagcgctacccggcccagctgtccggcggccagcagcagcgggtggccctggcccgggccctggtgttcgagccacagctggtgctgatggacgaaccccttggtgccctcgacaagcaactgcgcgaacacatgcagatggagatcaagcacctgcaccagcgcctgggcgtgaccgtggtctatgtgacccacgaccagggcgaagccctgaccatgtccgaccgggtggcggtgttccaccagggcgagatccagcagatcgcgccgccgcgcactctctacgaagaaccgaagaacaccttcgtcgccaacttcatcggcgagaacaaccgcctcaacggccgcctgcacagccacaacggcgagcgttgcgtggtggagctggggcgtggcgagaaggtcgaggcgctggcggtgaatgtcggccaggtcggcggcccggtgaccttgtccatccgcccggagcgggtgagcctcaacggttccagcgaaagctgcgtcaaccgcttctccggccgggtggcggaattcatctatctgggcgaccacgtccgggtgcgcctggaagtctgcggcaagagcgacttcttcgtgaaacagccgattgccgagctcgatcctgcgctggcagtgggtgacgtggtgccgcttggctggcaagtcgagcacgttcgcgcgctcgacccgcttctagaggcgaattga

SEQ ID NO: 66047 - protein, 374 aa, Pseudomonas fluorescens Pf-5
MSEVVSSAGANDVLVSFRGVQKSYDGENLIVKDLNLEIRKGEFLTLLGPSGSGKTTSLMMLAGFETPTAGEIQLAGRSINNVPPHKRDIGMVFQNYALFPHMTVAENLAFPLSVRGLGKTDISERVKRVLSMVQLDAFAQRYPAQLSGGQQQRVALARALVFEPQLVLMDEPLGALDKQLREHMQMEIKHLHQRLGVTVVYVTHDQGEALTMSDRVAVFHQGEIQQIAPPRTLYEEPKNTFVANFIGENNRLNGRLHSHNGERCVVELGRGEKVEALAVNVGQVGGPVTLSIRPERVSLNGSSESCVNRFSGRVAEFIYLGDHVRVRLEVCGKSDFFVKQPIAELDPALAVGDVVPLGWQVEHVRALDPLLEAN

SEQ ID NO: 66048 - DNA, 1143 bp, Pseudomonas fluorescens Pf-5
  CDS (1)..(1143): transl_table=11
atggcagttgcctccggcgcctataagaaagccctcgagggcgaccagacacctaagcaggtgctggtcaaaatcgaccgggtcacgaagaagttcgacgagacggttgccgtggacgatgtgtccctggaaatcaagaagggcgagattttcgccctgctcggcggttcgggttcaggcaagtccaccttgctgcggatgctggccggtttcgaacggccaacggaggggcgaatcttcctcgatggtgtagacatcaccgacatgccgccctacgagcggccgatcaacatgatgttccagtcctacgccctgttcccccacatgaccgtggcgcaaaacatcgccttcggtctcaagcaggacaagatccccagcgcggaaatcgacgcccgggtggcggagatgctcaagctggtgcagatgagccagtacgccaagcgcaagccgcaccagctctccggcggccagcgccagcgcgtggccctggcccgttccctggccaagcgtcccaagctgctcttgctggacgagcccatgggcgccctggacaagaagctgcgctcgcagatgcagttggagctggtggagatcatcgagcgcgtgggcgtgacctgcgtaatggtgacccacgaccaggaagaggccatgaccatggccgaacgcatcgccatcatgcacctgggctggatcgcccagatcggcagcccgatcgacatctacgagaccccggtcagccgcctggtctgcgaattcatcggcaacgtcaacatcttcgagggtgaagtggtggacgatgccgagggccacgccctgatcacctgcaaggacctggaccgcagcatctatgtcggccacggcatcagcacttcggtgcaggacaaatcggtgacctacgcgatccgcccggaaaagctcctggtgactgccgagatgccgacctgcgagtacaactggtccagcggcaaggtccacgacattgcctacctgggcggccactcggtgttctacgtcgagctgccgagcggcaaactggtgcaatccttcgtcgccaacgccgagcgccgtggtgcgcggccgacctggggtgaccaggtctacgtctggtgggaagacgacagcggcgtggtactgcgctcatga

SEQ ID NO: 66049 - protein, 380 aa, Pseudomonas fluorescens Pf-5
MAVASGAYKKALEGDQTPKQVLVKIDRVTKKFDETVAVDDVSLEIKKGEIFALLGGSGSGKSTLLRMLAGFERPTEGRIFLDGVDITDMPPYERPINMMFQSYALFPHMTVAQNIAFGLKQDKIPSAEIDARVAEMLKLVQMSQYAKRKPHQLSGGQRQRVALARSLAKRPKLLLLDEPMGALDKKLRSQMQLELVEIIERVGVTCVMVTHDQEEAMTMAERIAIMHLGWIAQIGSPIDIYETPVSRLVCEFIGNVNIFEGEVVDDAEGHALITCKDLDRSIYVGHGISTSVQDKSVTYAIRPEKLLVTAEMPTCEYNWSSGKVHDIAYLGGHSVFYVELPSGKLVQSFVANAERRGARPTWGDQVYVWWEDDSGVVLRS

SEQ ID NO: 66050 - DNA, 1089 bp, Candidatus Pelagibacter ubique HTCC1062
  CDS (1)..(1089): transl_table=11
atgactaaaaacaaagaatttgtaaaatttgacaatgtagacaagagctatgatggcaaagtattggtcgttaaaggattaaatctagacattgaagaaggtgaatttgtaactatgctaggaccctctggttctggtaaaacaacttgtcttatgatgctggctggttttgaaacaccaactcatggagaaatttatttagatggtaaggttatttcaaatattccacctcacaaaagaggaataggaatggtattccagaactatgctttatttccacacatgactgtttatgaaaatttagcttttccattaagagttagaaaaattccaaaagatgaagctgataaaaaaatagataaagctttatccatggtttcacttcatggttttgaagcaagaatgccgatgcaattatcaggtggacaacaacagcgtgttgctgttgcaagatcattagtttttgatccacaagtggtattaatggatgaaccacttggagcattagataaaaatttaagagaaagcatgcaatatgaaattaaacatattcacgaaagtattggtgtaacagttgtgtatgttacacacgatcaaacggaagcattaacaatgtcaaaccgtattgcagttttcaatgatggtaaagttcagcaactatcaagtcctgatgaattgtatgaaaaaccagttaattcgtttgttgctgagttcattggagaaaataataaattttcaggtcaagttttagatatttcaggagataaatgtaaagttaaattagaaaatggcacagaaattttagcaaatccagttgctgttaaagcaaaaggggataagactaaagtttcactaagacccgaaagagcaattatagatccttcagataagatggataataatcataaaggaaaaatagaagaaataatttatcacggcgatcacacaagacttagagttgacttactaggtaataaagattttatccttaaagtaccaaatagtactgcaagattagaccttaaaaagggtaatgtactagatataggctggaatagtattgactgtagagccttagatccaaaataa

SEQ ID NO: 66051 - protein, 362 aa, Candidatus Pelagibacter ubique HTCC1062
MTKNKEFVKFDNVDKSYDGKVLVVKGLNLDIEEGEFVTMLGPSGSGKTTCLMMLAGFETPTHGEIYLDGKVISNIPPHKRGIGMVFQNYALFPHMTVYENLAFPLRVRKIPKDEADKKIDKALSMVSLHGFEARMPMQLSGGQQQRVAVARSLVFDPQVVLMDEPLGALDKNLRESMQYEIKHIHESIGVTVVYVTHDQTEALTMSNRIAVFNDGKVQQLSSPDELYEKPVNSFVAEFIGENNKFSGQVLDISGDKCKVKLENGTEILANPVAVKAKGDKTKVSLRPERAIIDPSDKMDNNHKGKIEEIIYHGDHTRLRVDLLGNKDFILKVPNSTARLDLKKGNVLDIGWNSIDCRALDPK

SEQ ID NO: 66052 - DNA, 1071 bp, Colwellia psychrerythraea 34H
  CDS (1)..(1071): transl_table=11
atgagtcacgctataagtataaaaaatgtcagtaaattttacggcgattaccgcgcgataaaagatatctcttttgacatacaagacaatgaatttttcaccttactcggccctagtggttgtggtaaaacaaccttattgagaatgattgctggttttgagataccaagtggcggggtaattaaactgcacggcacagatattcaatcgctgccggcccatcaacgtcgtgttaatacggtgttccaaaattacgcactatttccacatatgactttagcgcaaaatattggcttcggtttgcagatgcttaaatggagtaaagaaaagatcgcagctcgggtagatgaaatgcttgagttagttcacatgcggtcatttgcatcacgtatgccttcggcactttcgggaggacaacaacagcgaatcgcattggctcgtgcgcttgcacctaagccagaagtactacttttagatgaacccttatcagctctggatttaaagttacgccaatcaatgcgcgatgagttacagcaactacagcgcgatacagggattacctttattttcgtcacccacgatcaggaagaagcgttggcgatgtcggacagaatctgtgtgttagctgaaggcactgttcagcaaataagcagtcctaatgagatttacgaaaatccgaataataagtttgttgcagattttattggcgaaaccaattttatgcctgtcactattaacagtcatgacaaagcaacggtatcagttacaaaccctctcggcattgagttgaatgtgcctaataagggctttagtcaaggacaagaagctacgatgtccttgcgtcctgaaaagatttcaatcaacacccctggattagaggtgaatttacaaggcaagatagtacaccgaacctatatgggtggttatacccactataaggtacgcactgagaatgccacagaattacgaatttctaaacgtaatactattagtaacgatactgaatataaccttgatcaacaagtagccattggctttagcaaagcgtctgtaagggtgttaagccaatga

SEQ ID NO: 66053 - protein, 356 aa, Colwellia psychrerythraea 34H
MSHAISIKNVSKFYGDYRAIKDISFDIQDNEFFTLLGPSGCGKTTLLRMIAGFEIPSGGVIKLHGTDIQSLPAHQRRVNTVFQNYALFPHMTLAQNIGFGLQMLKWSKEKIAARVDEMLELVHMRSFASRMPSALSGGQQQRIALARALAPKPEVLLLDEPLSALDLKLRQSMRDELQQLQRDTGITFIFVTHDQEEALAMSDRICVLAEGTVQQISSPNEIYENPNNKFVADFIGETNFMPVTINSHDKATVSVTNPLGIELNVPNKGFSQGQEATMSLRPEKISINTPGLEVNLQGKIVHRTYMGGYTHYKVRTENATELRISKRNTISNDTEYNLDQQVAIGFSKASVRVLSQ

SEQ ID NO: 66054 - DNA, 1131 bp, Colwellia psychrerythraea 34H
  CDS (1)..(1131): transl_table=11
atgactcaagaaacaactatgcctctttggaaacaagatggcgctaaaccttttattcaaataaaaaacgtgactaaaaaattcggtgaatttaccgccgtagataatgtttcgttagatatttatgaaaatgaattattttgtttattaggaggttcgggatcaggaaaaagcaccctgttaaggatattagccggttttgaggacctcacctctggtcaggtactcatcgatggcgttgatatggctaatattgagccatggaatcgaccgataaatatgatgtttcagtcatacgcattatttcctcatatgaccgtggctaagaatattgcttttggtttaaagcgagataacgtgccgaaaaaagaaattgcagaacgtgttactgaaatgcttaccatgatgcaaatagaagcatttgcagatagaaaacccgatcaattatcaggcggtcagcgccaacgtgttgcgttagcaagatcattgatcaaacgccctaaattactattacttgatgagcctttaggtgcactggataaaaagcttagagaagaaactcaatttgaattagttaatattcaagataagttaggagttacctttgttgtggtgactcatgaccaagaagaagccatgacactagcgacccgcattggcgttatgggtaatggtattattacccaagttgatgaacctcgcgatgtttatgaatatccaagcagccgttttgttgcagaatttgttggctctattaatttatttgagggtcgtatttatgaagatgaagttgagcatgtaaaaataaagtcaaaagaagctggttgtaacttttttgtcaatcatggcattagctgtgcccctaatcaaaaagtgacagttgctgttcgtcctgaaaaaatgaaagtcacccgtagaaaaccagatcaggaatataactgcttacacgggcaaatcatcgacattgcctatatgggtaacctgtcaatttttagggtcaagttagagagtggcgtcattgttcgtgtcaccttacctaatcttgtcagagaaaaccgcaatccattaacatgggatgattttgtttaccttgcatgggatgacgacagcagcgtggtattaacatcatga

SEQ ID NO: 66055 - protein, 376 aa, Colwellia psychrerythraea 34H
MTQETTMPLWKQDGAKPFIQIKNVTKKFGEFTAVDNVSLDIYENELFCLLGGSGSGKSTLLRILAGFEDLTSGQVLIDGVDMANIEPWNRPINMMFQSYALFPHMTVAKNIAFGLKRDNVPKKEIAERVTEMLTMMQIEAFADRKPDQLSGGQRQRVALARSLIKRPKLLLLDEPLGALDKKLREETQFELVNIQDKLGVTFVVVTHDQEEAMTLATRIGVMGNGIITQVDEPRDVYEYPSSRFVAEFVGSINLFEGRIYEDEVEHVKIKSKEAGCNFFVNHGISCAPNQKVTVAVRPEKMKVTRRKPDQEYNCLHGQIIDIAYMGNLSIFRVKLESGVIVRVTLPNLVRENRNPLTWDDFVYLAWDDDSSVVLTS

SEQ ID NO: 66056 - DNA, 1125 bp, Pseudomonas syringae pv. phaseolicola 1448A
  CDS (1)..(1125): transl_table=11
atgagcgacgtcgatacaagcgctggagcaaatgatgttctggtcagctttcgtggtgtgcagaagagctacgacggcgaagcactgatcgtcaaagaccttaacctggatattcgcaagggtgagttcctgacgctgctcggtccgtccggctcgggcaagaccacaagcctgatgatgctggccggtttcgagaccccgacggctggtgaaatcctcctcggcgggcgcgccatcaacaacgtgccgccgcacaagcgcgacatcggcatggtgttccagaactacgcattgtttccacacatgacggtggccgagaacctggcgttcccgttgtcagtgcgtggcatgagcaagaccgatgttggcgagaaagttaaaaaggcgctgggcatggtccagctggacacctttgcacatcgttacccgacgcagttgtccggtggccagcagcagcgcgtggcgctggcgcgtgcgctggtgttcgaaccgcaactggtgctgatggacgaaccgctcggcgcgctcgacaaacagctgcgtgagcacatgcagatggagatcaagcacctgcatcagcgtctgggtgtgaccgtggtctacgtgacccacgaccagggcgaagccctgaccatgtccgaccgggtcgccgtcttccatcagggcaagatccagcagatcgcaccgccccgcagcctgtacgaagagccgaagaacacctttgtggccaatttcattggcgaaaacaaccggctgaacggacttctggtcagtcaggatggcgaccactgtgtcgtcgagcttgagcgcggcgaaaaagtacatgcgctggcgatcaacgtcggccagcctggcggcccggtgaccctgtcgatccgccctgagcgcatcaacctcaatggtcgcagcgagaattgtgcaaaccgtttttccggccgcgtggccgagttcatctacctgggcgaccacgttcgcgtgcgtctggaggtagccggcaagaacgacttcttcgtcaaacagccgattgctgaactggacccgacgctcagcgtgggcgatgtcgtgccgatcggctggcaagtcgagcacgtccgcgcgctcgaccccttgcagcaagtgcattga

SEQ ID NO: 66057 - protein, 374 aa, Pseudomonas syringae pv. phaseolicola 1448A
MSDVDTSAGANDVLVSFRGVQKSYDGEALIVKDLNLDIRKGEFLTLLGPSGSGKTTSLMMLAGFETPTAGEILLGGRAINNVPPHKRDIGMVFQNYALFPHMTVAENLAFPLSVRGMSKTDVGEKVKKALGMVQLDTFAHRYPTQLSGGQQQRVALARALVFEPQLVLMDEPLGALDKQLREHMQMEIKHLHQRLGVTVVYVTHDQGEALTMSDRVAVFHQGKIQQIAPPRSLYEEPKNTFVANFIGENNRLNGLLVSQDGDHCVVELERGEKVHALAINVGQPGGPVTLSIRPERINLNGRSENCANRFSGRVAEFIYLGDHVRVRLEVAGKNDFFVKQPIAELDPTLSVGDVVPIGWQVEHVRALDPLQQVH

SEQ ID NO: 66058 - DNA, 990 bp, Pseudomonas syringae pv. phaseolicola 1448A
  CDS (1)..(990): transl_table=11
atgagttttgtcagcattgaaaacctgcagaaaagctatgccagcacgtcagtgttcagcgacatcaactgcagtatcacgaaaggcgagtttgtcaccttgctcggcccgtccggctgtggcaagtccacgttattgcgctgcattgccgggctgacaccggtcaatagcgggcgcatcctgcttgatggcactgacctggtgccgctcactccacaaaaacgcaacatcggcatggtgttccagagctacgcgctgtttcccaacatgaccgtcgagcaaaacgtcgcgttcggcctgcggattcagaaagtcagtgcggccgacagcgaaaagcgcgttgccgatattctgcgcatggtcgagctgcacgactttgccacgcgttacccgcatcagttgtccggcgggcaatgccagcgcgtggctctggcgcgctcgctggtcactcgcccacgcctgctgttgcttgatgagccgctgtcggcactggatgcgcgaattcgcaaaaacctgcgtgagcagatccgcgccattcagcgcgagctgggccttaccacgatcttcgtgacccacgatcaggaggaggcgctgaccatgtccgaccgcatcttcctgatgaacgaaggccggatcgtgcagagtggtgacgcagaaaccctttacaccgctccggttgacgtgttcgctgcgggcttcatcggcaactacaacctgctggaagccgaagatgccacacgcctgatgcaacgcccgatcaccagccgcattgcgattcgccctgaatcgatccaattgagcctgaccggcgaactggaaggcgaagtacgcagtcacagtctgctcggcaacgtcatccgctaccggatacaggcccgcggcgtggaactggtggtcgacgtactgaaccgcagcgccgacgacctgcacccggatggaaggcgtgtaacactgaacatcgaaccgtcggcgctctgtgctctgaactaa

SEQ ID NO: 66059 - protein, 329 aa, Pseudomonas syringae pv. phaseolicola 1448A
MSFVSIENLQKSYASTSVFSDINCSITKGEFVTLLGPSGCGKSTLLRCIAGLTPVNSGRILLDGTDLVPLTPQKRNIGMVFQSYALFPNMTVEQNVAFGLRIQKVSAADSEKRVADILRMVELHDFATRYPHQLSGGQCQRVALARSLVTRPRLLLLDEPLSALDARIRKNLREQIRAIQRELGLTTIFVTHDQEEALTMSDRIFLMNEGRIVQSGDAETLYTAPVDVFAAGFIGNYNLLEAEDATRLMQRPITSRIAIRPESIQLSLTGELEGEVRSHSLLGNVIRYRIQARGVELVVDVLNRSADDLHPDGRRVTLNIEPSALCALN

SEQ ID NO: 66060 - DNA, 1155 bp, Pseudomonas syringae pv. phaseolicola 1448A
  CDS (1)..(1155): transl_table=11
atgagtgccgtgatcaaagaccccgcccatcaggatcagaaaacgctggtcagcctgtgcaacctgaacaagcactacggtgatttcgccgctgtcgacaacatttccctggatattcaggacggcgaattcctgacctttctcggttccagtggctcgggcaaaagcaccacgctgtcaatgctcgccggtttcgagacgcccagttcgggcgagattctggtcagtggcaaatcgctggtcaatgtgccgccgcacaagcgcgacatcggcatggtgtttcagcgctactcgctgttcccgcacctgtcggtacgcgacaacattgctttcccgctggcgatccgcaagttgcctgcggctgagcgcgaaaagaaagtcgatgcgatgctcaagctcgtccagctggaagagtttgctcaccgccgcccttcgcaactgtccggtggccagcagcaacgagtcgccattgccagggcgctggtctacgagccacgcatcctgctgatggacgagccgctgggcgcactggacaagaagctgcgtgaagacctgcaggacgaactgcgtcagttgcatcgtcggctgggcatcaccatcgtctatgtgacccacgatcaggaggaagccatgcgcctgtcccagcgcatcgcgattttcagccacggcaaaatcgtcggtctgggctcgggttatgacctgtatcaggacccgccaaatgccttcgttgcgtcgtttctcggcaactcgaacttcctcaggctcaaagcacagggcaacgccgtagctacgtttgaaggccttgcgctggcgattcgcctgaccccgggcctgaagaccgatcaggacgttctgctgatggttcgcccggagaaagcccagacgctgagcgttgaacaggctgctggcacaccactggaagcaggctggaacgaagtgagtgccatggtcaatgaggtgctttttctcggcgagagccagacctgctcggtggtcaccacaggcggcactgccatgactgtcaaagcgctttcagcgaccggcatgctgctcagggctggcgacccggtgcgggtacgctgggccgctgccgacgcgtgtatctacactgaatggacggacagcgacctgaacaaggcagcgggagcgcactga

SEQ ID NO: 66061 - protein, 384 aa, Pseudomonas syringae pv. phaseolicola 1448A
MSAVIKDPAHQDQKTLVSLCNLNKHYGDFAAVDNISLDIQDGEFLTFLGSSGSGKSTTLSMLAGFETPSSGEILVSGKSLVNVPPHKRDIGMVFQRYSLFPHLSVRDNIAFPLAIRKLPAAEREKKVDAMLKLVQLEEFAHRRPSQLSGGQQQRVAIARALVYEPRILLMDEPLGALDKKLREDLQDELRQLHRRLGITIVYVTHDQEEAMRLSQRIAIFSHGKIVGLGSGYDLYQDPPNAFVASFLGNSNFLRLKAQGNAVATFEGLALAIRLTPGLKTDQDVLLMVRPEKAQTLSVEQAAGTPLEAGWNEVSAMVNEVLFLGESQTCSVVTTGGTAMTVKALSATGMLLRAGDPVRVRWAAADACIYTEWTDSDLNKAAGAH

SEQ ID NO: 66062 - DNA, 1029 bp, Pseudomonas syringae pv. phaseolicola 1448A
  CDS (1)..(1029): transl_table=11
atggcatttctgcagctcgaaggtctctccaaacgctacggttccatagacgctgtggtcgccacgaacctggccgtcgacaagggcgaattcgtttcactgctcggcccttccggctgcggcaagaccaccactctgcaaatgatcgccggcttcgttgaagtcagtgacggacgcattgtgctcgacgggcgcgacatcactcacgccaaacccagcagccggggcctcggcgtagtgttccaaagctatgcgctgtttccgcacatgactgtggctgacaacgttgcgtttggcctgcgtatgcgcaaggtgcctgccgccgagttgcacccgcgtgtcaaacgggtgctggagctggtgcgcctcggtcagcatgccgagcgctatccgcgcgagttgtccggtgggcagcgccagcgggtcgcattggcccgcgcactggtcatcgagccgccagtactgctgctcgacgagccgctgtccaacctggatgccaacctgcgcgaagagatgcagttcgaaatccgccgcattcagaacgaagtcggcattaccatgctgatggtcacccatgatcaggccgaagccctgtcgatcagcgatcgggtggtggtgatgcaggccggtcgtatcacccagatcgacgagccttacaagctctacgaacacccgcgtacacgcttcatctcgggtttcgtcggcaaggccaacatgttgcagggagatctggacagcagcggcatcccgcagattcgtcaggtgcccggcgatggcagcctgaccctcagcctgcgtcccgagaagatcgatcttgtagcacctggctgcggacgactgtccgggcgcatcgtcacccgttactttcttggcagccagtggctgtatcgcatccagaccagaattggcgaagtgacggttgtacgccgtaacgatggccaagcgccgctggaacaaggcgcagcggtcgacatggactggcccaccgagttgctgcgcgtgctggatgccgacgaggtgcgcgcatga

SEQ ID NO: 66063 - protein, 342 aa, Pseudomonas syringae pv. phaseolicola 1448A
MAFLQLEGLSKRYGSIDAVVATNLAVDKGEFVSLLGPSGCGKTTTLQMIAGFVEVSDGRIVLDGRDITHAKPSSRGLGVVFQSYALFPHMTVADNVAFGLRMRKVPAAELHPRVKRVLELVRLGQHAERYPRELSGGQRQRVALARALVIEPPVLLLDEPLSNLDANLREEMQFEIRRIQNEVGITMLMVTHDQAEALSISDRVVVMQAGRITQIDEPYKLYEHPRTRFISGFVGKANMLQGDLDSSGIPQIRQVPGDGSLTLSLRPEKIDLVAPGCGRLSGRIVTRYFLGSQWLYRIQTRIGEVTVVRRNDGQAPLEQGAAVDMDWPTELLRVLDADEVRA

SEQ ID NO: 66064 - DNA, 1143 bp, Pseudomonas syringae pv. phaseolicola 1448A
  CDS (1)..(1143): transl_table=11
atggcagttgcctccggcgcctacaagaaagccatcgaaggcggtcagcaacccaaagaggtgctggtcaggatcgatcgggtcacgaagaagttcgacgagacgattgcggtggacgacgtgtcgctgcaaatcaacaagggtgagatctttgccctgcttggcggctccggttccggaaagtccacactgctgcgcatgctggccgggttcgaacggccaaccgaaggccgtatctacctcgacggtgtcgacatcaccgacatgccgccgtacgaacgcccgatcaacatgatgttccagtcctacgcgctgttcccgcacatgaccgtggcggacaacatcgcctttggcctgaaacaggacaagctggccaagccggaaatcgaagcccgcgtggcggagatgctcaagctggtgcagatgacccagtacgccaagcgcaagccgcaccagctctcgggcggccagcgtcaacgtgtggccctggcccgctcgctggccaaaaagcccaagctgctgttgcttgatgagccaatgggtgcgctggacaagaaactgcgttcgcagatgcagctggaactggtggagatcatcgagcgcgtcggcgtgacctgcgtaatggtgactcacgatcaggaagaggccatgaccatggccgagcgcatcgcaatcatgcacctgggctggatcgcgcagatcggcagcccgatcgatatctacgaaaccccgaccagccgtctggtctgcgaattcatcggcagcgtcaacctgttcgaaggtgacgtgatcgaagacatggaagcccacgcgctgatccgcagtcccgagctggagcgcaatatctatgtcggccacggcgtcagtacgtcggtggaagacaagcacatcacctacgccctgcgccctgagaaactgctgatcaccaccgagcagccaggcttcgaatacaactggtcacgcggcaaggtccacgacatcgcctatctgggcggtcattcggtgttctacgtcgagctgccgggcggcaagctggtgcaatcgttcgtcgccaacgccgagcgtcagggcgcacggcctacctggggcgatgaagtctacgtgtggtgggaagacgacagcggcgtggtactgcgctcatga

SEQ ID NO: 66065 - protein, 380 aa, Pseudomonas syringae pv. phaseolicola 1448A
MAVASGAYKKAIEGGQQPKEVLVRIDRVTKKFDETIAVDDVSLQINKGEIFALLGGSGSGKSTLLRMLAGFERPTEGRIYLDGVDITDMPPYERPINMMFQSYALFPHMTVADNIAFGLKQDKLAKPEIEARVAEMLKLVQMTQYAKRKPHQLSGGQRQRVALARSLAKKPKLLLLDEPMGALDKKLRSQMQLELVEIIERVGVTCVMVTHDQEEAMTMAERIAIMHLGWIAQIGSPIDIYETPTSRLVCEFIGSVNLFEGDVIEDMEAHALIRSPELERNIYVGHGVSTSVEDKHITYALRPEKLLITTEQPGFEYNWSRGKVHDIAYLGGHSVFYVELPGGKLVQSFVANAERQGARPTWGDEVYVWWEDDSGVVLRS

SEQ ID NO: 66066 - DNA, 1155 bp, Thermobifida fusca YX
  CDS (1)..(1155): transl_table=11
atggcgaccacgacggaaaaaacaccggccgcgcctggcgtagtagcgacagagagcaaccaggcagtccccgccatcagtctggaaaaagtcagcaagacctaccgatccgggcaggtcaccaccaccgcggtcgaatccatcgacttggagatccgtcaaggggagttcttctccctgctcgggccttccggttgcggcaagaccaccaccatgcggatgatcgccggcttcgaggagcccacttcaggagtcgtgcgcctgtccggtaaagacgtcaccggggttcccccgaaccgccgcgacgtcaacatggtcttccaaagctacgccctgttcccgcacatgaccgtcgcggagaacgtggccttcggactgaaacgcaagaaagtccccgcggccgagatccgcactcgggtcgctgaaatgctcgaactcgtcgagttgggggaccgggccaagtacaagcccaggcagctttctgggggtcagcagcagcgtgtcgcactggcccgcgccctcgtcaaccggccgagcgcactcctgctcgacgaacctctcggtgctcttgacctgaaactgcgccaggccatgcagttggagctcaaacgcatccaacgcgaggtcggcatcaccttcgtctacgtcactcacgaccagagtgaagcgttgaccatgtccgaccgcatcgccgtcatgaacaagggccggatcgaacagctcggcacgccagcgcagatctacgagacccccgcgacccggttcgtggccgggttcatcggcacctccaacatcctcaccgggaccgcgcagcgggtctctgacactctcgtccgcattgactacggcggcgaccagcacgtcctcgcgaacaccccgcaacaaatgtcggatttggggctcgtaattaccgttcgtcctgaaaagatccgacttgggaaagatgtgccggatgccaatgtaagccgcattcgcggtacggtgcgtgaggttgtctatttgggagcaacgacgcactacactgtgcgaacggttgacgacaccgacatcgtggtgtttcaacagaactcctccgacgccagcaacctcgcagatcacggagacaccgtgtggctgtcctggcgtcccgagcactcttacgtgcttccaggctga

SEQ ID NO: 66067 - protein, 384 aa, Thermobifida fusca YX
MATTTEKTPAAPGVVATESNQAVPAISLEKVSKTYRSGQVTTTAVESIDLEIRQGEFFSLLGPSGCGKTTTMRMIAGFEEPTSGVVRLSGKDVTGVPPNRRDVNMVFQSYALFPHMTVAENVAFGLKRKKVPAAEIRTRVAEMLELVELGDRAKYKPRQLSGGQQQRVALARALVNRPSALLLDEPLGALDLKLRQAMQLELKRIQREVGITFVYVTHDQSEALTMSDRIAVMNKGRIEQLGTPAQIYETPATRFVAGFIGTSNILTGTAQRVSDTLVRIDYGGDQHVLANTPQQMSDLGLVITVRPEKIRLGKDVPDANVSRIRGTVREVVYLGATTHYTVRTVDDTDIVVFQQNSSDASNLADHGDTVWLSWRPEHSYVLPG

SEQ ID NO: 66068 - DNA, 1149 bp, Nitrobacter winogradskyi Nb-255
  CDS (1)..(1149): transl_table=11
atgacggacgaggcgagacttggttccgaagcgacggcacaggccgacaagccattgttgcaggtcgatgcggccgtcaagcgctttggcggatttaccgcggtggatcatctgtcgctcgacatcaggacgggggagttctttgcgctgctggggccgagcggctgcggcaagaccacgctgctccggatgctgggagggttcgagacgcctgatggcgggcgcatccttctcgacggtcaggacatatccggcgttccgccgcatcggcgaccggtcaacatgatgttccagaactacgcgctgtttccgcatctgtcggtgcgggacaacatcgcgttcgggctgaggcgggcgggcatgccgcgcgccgacatcgaagcgcgggtcgcggagatggtggcgctggtgagtctggagggcatggagaagcgcaagccggagcaactatcgggcggccagaggcagcgcgtggcgctggcgcgcgcgctcgcccggcgtccgcggctgttgctgctcgatgaaccgatggccgcgctcgacaagaagctgcgcgagaacacgcaagccgaattgatgcggctgcagcgccagctcggcatgaccttcatcatcgtcacccatgaccaggaggaggcgatgatgatggcggatcgcatcggcgtcatgaatgcggggcgtctgcaacaggtggcgacgccgcgtgagctctatgaggtgccgaactcccgctggatcgccgagttcgtcggcggaatcaacatcatcgatggcgcggtggagtcgagcggcggcggccgcatcacggtcgcgacgcaggccgccggttcggtgacggtggcgacgcccttgcaggcgctgacgacggatcaggtgtgcgttgcgatacgcccggagaagattcgcctgtcgagcggcgaggcggcacccgatgcgggagatgcggccgggaccaaccgcgtggaaggcgtcattgccggcgttagctatcttggcggccagacccgctatcaggtcaggctcgatcgcggcgcgctgctgcatgcgtcggtcgccaacaccgttcggcgggaggccgaagccttcgatacggcgcagcgcgtggtggcgtgtttcgcgccggacgattgcatggtgcttgaccgatga

SEQ ID NO: 66069 - protein, 382 aa, Nitrobacter winogradskyi Nb-255
MTDEARLGSEATAQADKPLLQVDAAVKRFGGFTAVDHLSLDIRTGEFFALLGPSGCGKTTLLRMLGGFETPDGGRILLDGQDISGVPPHRRPVNMMFQNYALFPHLSVRDNIAFGLRRAGMPRADIEARVAEMVALVSLEGMEKRKPEQLSGGQRQRVALARALARRPRLLLLDEPMAALDKKLRENTQAELMRLQRQLGMTFIIVTHDQEEAMMMADRIGVMNAGRLQQVATPRELYEVPNSRWIAEFVGGINIIDGAVESSGGGRITVATQAAGSVTVATPLQALTTDQVCVAIRPEKIRLSSGEAAPDAGDAAGTNRVEGVIAGVSYLGGQTRYQVRLDRGALLHASVANTVRREAEAFDTAQRVVACFAPDDCMVLDR

SEQ ID NO: 66070 - DNA, 1146 bp, Anabaena variabilis ATCC 29413
  CDS (1)..(1146): transl_table=11
atgaatatggctcaaactgtcacgcagaatcccaggggcgtaaaaacacttctacccctcgatgttgaactacgtaacgtgttcaagtttttcaaccaagaaccggcggtacatggagtggacttagatgtaaaacaaggggaattctttagtattctcggcccttctggttgtggtaagacaacgacactacgtttaatagccggatttgaacaagttgatgctggtaaattattgattcagggtcagccgatgaccaatattcccccttaccgccgaccagttaatacagtatttcaaagttacgctctatttaatcaccttaacgtctgggataatgttgctttcgggttgcggctgaagaaatcccggaaatcagaagtagaaagcagagttaaagaggctttaaaactggtaaaaatggaaagtttgcgatcgcgctttcctagtcaactgtccggtggtcaacagcagcgcgttgctttggctagggctttggtgaatcgtccggctgtggtgttactagatgaacctttaggggcgttggatttaaagttacgtaaggaaatgcaggttgagttatcaaatttacataaaaacctgggtttgacctttattatggtaactcatgaccaagaggaggcgttatctttaagcgatcgcattgcggtgatgaaccaggggaaaattgaacaaattggtactccccaagagatttacgaacgtcctaaaacttcctttgtcgccgattttatcggtgatactaatttgtttagtggtgaaatcaccgtattagaagctgaatatattcaaattgttaccaaaactggactcacgattgtagttgcccggaatgaagatacacccgcagaattattaaaatctgtagttgtaagtgtacgaccagaaaaaattcaactttccctttatccgcctagttcgctcaataactgttttgaaggaaggctgataaatgtcatgtatttaggaactcacgttaattatcttgtccaattaattaacggcattaatattaatgttttacaacctaatacatttggtaatttaccagaccgtgaaacacctatttatgcttggtgggcggaaagtgattgtttggctattaatcaaatgactaatgactaa

SEQ ID NO: 66071 - protein, 381 aa, Anabaena variabilis ATCC 29413
MNMAQTVTQNPRGVKTLLPLDVELRNVFKFFNQEPAVHGVDLDVKQGEFFSILGPSGCGKTTTLRLIAGFEQVDAGKLLIQGQPMTNIPPYRRPVNTVFQSYALFNHLNVWDNVAFGLRLKKSRKSEVESRVKEALKLVKMESLRSRFPSQLSGGQQQRVALARALVNRPAVVLLDEPLGALDLKLRKEMQVELSNLHKNLGLTFIMVTHDQEEALSLSDRIAVMNQGKIEQIGTPQEIYERPKTSFVADFIGDTNLFSGEITVLEAEYIQIVTKTGLTIVVARNEDTPAELLKSVVVSVRPEKIQLSLYPPSSLNNCFEGRLINVMYLGTHVNYLVQLINGININVLQPNTFGNLPDRETPIYAWWAESDCLAINQMTND

SEQ ID NO: 66072 - DNA, 1155 bp, Natronomonas pharaonis DSM 2160
  CDS (1)..(1155): transl_table=11
gtgtctagcgaactcaagcgaaccgaccagtctgccggccccgcagcggccgccgcgggtcagaccgtactcgagctggatgacgtgcagaaatcctacgatgggatggatgtcatccgcgacctctcgttggatgtccgggacggagagctgctgacacttctgggaccgtccgggtgcgggaagacgacgacgctccggcttatcgcagggctcgaacgaccggataacgggactgtccgactcggctcaacgcccgtctccgggtcggagtttgtgccgccagaacagcgcgatgtcggtgttgtcttccaggagttcgcgctgtttccccacctctcggctcgtgaaaatatcgccttcggtatccaggagtggtccgaagccgaacagcaagagcgggtcgacgaactgctcgaactcgtcggcctggtcgaccacggcgacaagtccccggaggaactgtccggcggccaacaacagcgtgtcgcgctcgctcgctcgctggcccccgagccgaaactgcttctgcttgacgagccgttctcgaatctcgatgtcgacctccgtgtcgagatgcgcgaagaggtcagagatatcctcaaagaagcgggtgttacggccatttccgtgacccacgaccaagaggaggcgatgtcgatttcggaccgcgtcgcggtgatgaacaacggtcgcatcgaacaggtcggaacgcctgaaggggttttccagcagccgaagtcccgctttgtcgctgggttcctcggccacgcctctttcgtcagcggctatgtcgaggacggctgcgtcgaaacgggtgtcggctgcgttccgctcgagcaggtaaacggtctgaccgacgtctacgacggctccgaaatcgacctgatggtccggcctgacgatgtctgtgcccgccctgcatcccccgaggaggcaaacggcgaagtcgtccatcggcggtatctcggccccacggtgctgtatcgcgtcgaaatcgaatccggcgatgtcgtcggctgcatgcataaccacgccgacgaagtctcgcttgacgaccctgtttttgtctctatcgacgccgaccacgaactcgcctggttcccccgtggcgagcggaaaatggcagacggcggcccggacagtacggcataa

SEQ ID NO: 66073 - protein, 384 aa, Natronomonas pharaonis DSM 2160
MSSELKRTDQSAGPAAAAAGQTVLELDDVQKSYDGMDVIRDLSLDVRDGELLTLLGPSGCGKTTTLRLIAGLERPDNGTVRLGSTPVSGSEFVPPEQRDVGVVFQEFALFPHLSARENIAFGIQEWSEAEQQERVDELLELVGLVDHGDKSPEELSGGQQQRVALARSLAPEPKLLLLDEPFSNLDVDLRVEMREEVRDILKEAGVTAISVTHDQEEAMSISDRVAVMNNGRIEQVGTPEGVFQQPKSRFVAGFLGHASFVSGYVEDGCVETGVGCVPLEQVNGLTDVYDGSEIDLMVRPDDVCARPASPEEANGEVVHRRYLGPTVLYRVEIESGDVVGCMHNHADEVSLDDPVFVSIDADHELAWFPRGERKMADGGPDSTA

SEQ ID NO: 66074 - DNA, 1092 bp, Burkholderia pseudomallei 1710b
  CDS (1)..(1092): transl_table=11
atgacagctgcatttttgcaaatccagcgcttgcgcaagacctacgacgacgtagtcgcgatcgatcacgtgtccctggacgtgcgcaagggcgaattcatgacattcctcgggccgtccggctcgggcaagagcacgacgctctacatcgtcgcgggcttccaggaaccgaccgaagggtgcgtcttgcttgacggaaggccgttgctgtcggtggcgcccaataagcgcaataccggcatggtgtttcagcgatacacgctgtttcctcacttgaccgtgggcgaaaacgtcgcgtttccgttgcgtgtgcgtcgtcgtcccgatgcgcaggtgaaggcgaaggtcgagcagatgctgaagcttgttcatctggccgactgccgtgatcgtatgcctgcccaattgtcaggcgggcagcagcaacgcgttgcgatcgcacgtgcgttggcctacgatccgcccgtattgctgatggacgaaccgctcgccgcactcgacaaaaagctacgcgaggaaattcagctcgaattgcgccgcattcaccaagagacgggcgtgacgattctctacgtcacgcacgaccaagaggaggcacttcgtctttccgatcgtattgccgtcttcaacaaaggcgcaatcgaacaggtcggaacgggcgaggagctgtacgccaacccgacgtcgcgcttcgtggcgagcttcatcggtaattcaaatttccttccggtcagggtcacagcgaacgccaatggcggcatgagcggcatattcccgaacggtctcgcagtggcgacggccggccaaggcccggcactgacggccggcgatgacggcgcgctgatgatccgccccgagcagatgcgcattcgtgcgttgcaaggcgcgaagggggaggtcgggttgcctgtcaccgtgcgcgacataacgtacctcggtgatgcgatgcattacgcggttgccacaccttggcagcaggaaatttcgattcgaatgccggcaagccatcgccatgacagcggactatcgatcggcacgcaggctttcgtcgagtgggatgcgcgcgacgcgcgtgtttttgtcgaggcatag

SEQ ID NO: 66075 - protein, 363 aa, Burkholderia pseudomallei 1710b
MTAAFLQIQRLRKTYDDVVAIDHVSLDVRKGEFMTFLGPSGSGKSTTLYIVAGFQEPTEGCVLLDGRPLLSVAPNKRNTGMVFQRYTLFPHLTVGENVAFPLRVRRRPDAQVKAKVEQMLKLVHLADCRDRMPAQLSGGQQQRVAIARALAYDPPVLLMDEPLAALDKKLREEIQLELRRIHQETGVTILYVTHDQEEALRLSDRIAVFNKGAIEQVGTGEELYANPTSRFVASFIGNSNFLPVRVTANANGGMSGIFPNGLAVATAGQGPALTAGDDGALMIRPEQMRIRALQGAKGEVGLPVTVRDITYLGDAMHYAVATPWQQEISIRMPASHRHDSGLSIGTQAFVEWDARDARVFVEA

SEQ ID NO: 66076 - DNA, 1161 bp, Burkholderia pseudomallei 1710b
  CDS (1)..(1161): transl_table=11
atgaatagtcagtcgggcgcggcggtggcgggcgcgccgtcctatcggccgcagacgggcgccgacgggcgcgccgaaaactttgtccagatcatcgacgtcgtcaagaagttcggcgagaccgtcgcggtgcgcaacgtcgagctgagcgtgcgcaagggcgagctgttcgcgctcctcggcagctccggctgcgggaagtcgacgctgctgcgcatgctcgccggcctcgagacgatcacgtcgggcaagatcctgatcgacggcgaggatctcgcgcagatgccgccgtacaagcggcccgtgaacatgatgttccagtcgtacgcgctgttcccgcacatgacggtcgaggcgaacgtcgccttcggcctcaagcaggaaggcgtgccgaaggccgagctcaaggagcgcgtgcgcgatgcgctcgagctcgtgcagatggcgcgctacgcgagccgcaagccgcatcagctctccggcggccagcagcagcgcgtcgcgctcgcgcgctcgctcgtcaagcggccgaagctgctgctgctcgacgagccgatgtcggcgctcgacaagcagatccgccagcgcacgcagatcgagctcgtcaacatcctcgacaaggtcggcgtcacctgcatcatggtcacgcacgatcaggaggaggcgatgacgatggcggggcgtctcgccgtgatgagcgaaggccagatcgtgcagatcggcacgccgcacgaagtctacgaatatccgaactgccgcttctccgccgagttcatcggctcgacgaacctgttcgagggcgtgaccgtcgaggacgagcccgatcacgtgttcatcgaatcgccggacctgccgtgccggctgtacgtgaaccacgggatcacgggcccgctcggcatgcccgtcacggtgtcggtgcgccccgagcgcatcgcgctgacccgcaagcccgccgacggcgcgtacaactgggggcgcggcgtcgtcacgaacgtcgcgtacatgggcggctattcgctgtatcacgtgaagctcgattccgggaagacggtgatcgcgaacgtgtcgagcctcgcgatcgccgatctcgattcgcccggctggggcgatgaaatctacgtgcgctggagcgccgcggccggcgtggtgctgacgtcatga

SEQ ID NO: 66077 - protein, 386 aa, Burkholderia pseudomallei 1710b
MNSQSGAAVAGAPSYRPQTGADGRAENFVQIIDVVKKFGETVAVRNVELSVRKGELFALLGSSGCGKSTLLRMLAGLETITSGKILIDGEDLAQMPPYKRPVNMMFQSYALFPHMTVEANVAFGLKQEGVPKAELKERVRDALELVQMARYASRKPHQLSGGQQQRVALARSLVKRPKLLLLDEPMSALDKQIRQRTQIELVNILDKVGVTCIMVTHDQEEAMTMAGRLAVMSEGQIVQIGTPHEVYEYPNCRFSAEFIGSTNLFEGVTVEDEPDHVFIESPDLPCRLYVNHGITGPLGMPVTVSVRPERIALTRKPADGAYNWGRGVVTNVAYMGGYSLYHVKLDSGKTVIANVSSLAIADLDSPGWGDEIYVRWSAAAGVVLTS

SEQ ID NO: 66078 - DNA, 1038 bp, Pseudomonas fluorescens PfO-1
  CDS (1)..(1038): transl_table=11
atgacgcttgcagtccagttcactaacgtttcccggcagttcggcgaagtgaaagccgttgaccgggtttccatcgatatccaggacggcgagttcttttccatgctcggcccctccggttcgggcaagaccacgtgcctgcgcctgatcgccgggttcgagcaaccgagcgcgggctcgatccgcattcacggtgccgaagccgccggcctgccgccctatcaacgcgacgtcaacaccgtgtttcaggattacgcgctgttcccgcacatgaacgtgctggacaacgtcgcctacggtttgaaagtcaaaggcgtaaacaaaaccgaacgccacaagcgcgccgaagaagccttggacatggtcgccctcggcggctacggtgcccgtaaaccggtgcagttgtccggcggtcagcgccagcgtgtcgccctcgcccgcgccctggtcaatcgcccgcgagtgttgttgctcgacgagccgttgggcgctctcgacctgaagctgcgcgaacagatgcaaagcgagctgaagaagctgcaacgccagctcggcatcaccttcatcttcgtcactcacgaccagaccgaagcgctgtcaatgtccgaccgcgtggccgtgttcaacaagggccgcatcgaacaggtcgacacgccgcgcaatctgtacatgaaaccgaccactaccttcgtcgccgaattcgtcggcacttcgaacgtgattcgtggcgatctggcgcgccagctcagcggtcatccgcagccgttttcgatccgcccggaacacgtgcgtttcgccgaaggcccgctggccagccacgagatcgaagtcagtggtctgctccacgacatccagtatcagggcagcgccacgcgctatgaactgaagctggaaaacggccagaccctgagcatcagccaggccaacaatcagtggatcgacaccagctcgcagcaccagaccggtcagcgcatcagcgcgcgctgggcgcgggaagcgatgattccgttgcacgacaccgttgcgagcggggtgtga

SEQ ID NO: 66079 - protein, 345 aa, Pseudomonas fluorescens PfO-1
MTLAVQFTNVSRQFGEVKAVDRVSIDIQDGEFFSMLGPSGSGKTTCLRLIAGFEQPSAGSIRIHGAEAAGLPPYQRDVNTVFQDYALFPHMNVLDNVAYGLKVKGVNKTERHKRAEEALDMVALGGYGARKPVQLSGGQRQRVALARALVNRPRVLLLDEPLGALDLKLREQMQSELKKLQRQLGITFIFVTHDQTEALSMSDRVAVFNKGRIEQVDTPRNLYMKPTTTFVAEFVGTSNVIRGDLARQLSGHPQPFSIRPEHVRFAEGPLASHEIEVSGLLHDIQYQGSATRYELKLENGQTLSISQANNQWIDTSSQHQTGQRISARWAREAMIPLHDTVASGV

SEQ ID NO: 66080 - DNA, 1143 bp, Pseudomonas fluorescens PfO-1
  CDS (1)..(1143): transl_table=11
atggcaaacgcctccagcacttacaggaaggctcttgaaggtcatcagcaaccgaaaaaggttctggtgaaggtcgatcgagttaccaagaagttcgacgaaaccacggcggtggacgatgtgtccctggagatccatcagggcgaaatcttcgccctgctcggcggctccggctcgggcaaatcgaccctgctgcgcatgctcgccggtttcgaacggccgactgaaggacgcattctgctcgacggtgtcgacatcaccgacatgccgccgtacgagcggccgatcaacatgatgttccagtcctacgccctgttcccgcacatgaccgtggcgcagaacatcgccttcggcctcaagcaggaccgtttgccggccagcgaaatcgacgctcgcgtcgaagaaatgctgcgcctcgtccatatgacccaatacgccaagcgtcgcccgcatcaactgtccggcggtcagcgtcagcgcgtggccctcgcccgctccctggccaagcggccgaaactgttgctgctcgacgaaccgatgggcgcgctggataaaaagctgcgttcgcaaatgcagctggaactggtggaaatcatcgagcgcgtcggcgtgacctgcgtgatggtgacccacgaccaggaagaggccatgaccatggccgaacgcatcgcgatcatgcacctgggctggatcgcccagatcggcagcccggtcgacatctatgaagcgccggtcagtcgcatggtctgcgaattcatcggcaacgtgaacgccttcgacggcaccgtggtcgaggaccttgaaggtcacgcgatcattcacagtccggacttgcagcaaaagatctacgtcggtcatggcgtcagcacgtcggtgcaggacaagtcgatcacctacgcgatccgcccggaaaaaatgctggtcagcacgatcaagccggagacccgctacaactggtccgaaggcaaggtgcatgacatcgcctacctcggcggtcactcggtgttctacgtcgagttgccgagcggcaagatcgtccagtcgttcatggccaacgccgaacgtcgtggcgcgcggccgacctgggacgacaaggtctacgtctggtgggaagacgacagcggcgtggtactgcgctcatga

SEQ ID NO: 66081 - protein, 380 aa, Pseudomonas fluorescens PfO-1
MANASSTYRKALEGHQQPKKVLVKVDRVTKKFDETTAVDDVSLEIHQGEIFALLGGSGSGKSTLLRMLAGFERPTEGRILLDGVDITDMPPYERPINMMFQSYALFPHMTVAQNIAFGLKQDRLPASEIDARVEEMLRLVHMTQYAKRRPHQLSGGQRQRVALARSLAKRPKLLLLDEPMGALDKKLRSQMQLELVEIIERVGVTCVMVTHDQEEAMTMAERIAIMHLGWIAQIGSPVDIYEAPVSRMVCEFIGNVNAFDGTVVEDLEGHAIIHSPDLQQKIYVGHGVSTSVQDKSITYAIRPEKMLVSTIKPETRYNWSEGKVHDIAYLGGHSVFYVELPSGKIVQSFMANAERRGARPTWDDKVYVWWEDDSGVVLRS

SEQ ID NO: 66082 - DNA, 1086 bp, Pseudomonas fluorescens PfO-1
  CDS (1)..(1086): transl_table=11
atgggtcagccaatagccattgaagtgcgtaacgtatccaagcggtattctgatgaccctggcctcgcgcctgccctcgacaacgtctcggtgaacatcgccgacaacgaattcttcaccctcctcggcccctcaggctgcggcaagaccaccctgctgcgcgccatcgccggtttcgaacatgtcagcgacggcgagatccgtctggcaggcgaaacggtcaatcacctgccgccgttcaagcgtcgggtcaacacggtgttccagagttacgcgctgtttccgcacatgagtgtcgcgcagaatatcgccttcggcctcgagatgcagggtcttgatcgcaagacgattcccggacgggtcgacgaaatgctcgcgctggtgcagatggagcacctggccgggcgcaaaccggcgcaattatccggcggccagcagcagcgcgtggctctggcccgggccctggcgccgaagccgaaagtgctgttgctcgacgagccgctgtcggcgctggacctgaagctgcgcaaggaaatgcaggtcgaactcaagcgcgtgcagcaggaagccggcatcactttcatcttcgtcacccacgatcaggaagaagcgctgaccctgtccgaccggatcgcggtgatgtccgccggcaagatcctgcagatcggcaccccgatcgacatctatgaacgtccgcagcaccgcttcgtcgcccagtttatcggcgacatcaatttccttcccggccaactcaaacgcggggaacacaacgaaaacatcttcgtaccgaacggcatgccggtggaaatcccctgcccgccccaaggcgtcaatggcagcagcgtgcagctggcattccggcccgagcgctcgcaactggttgcagcggatcagccgcatcatctgcgcggtgtgatcgaagcggtgctgtatgtcggcaccgcgacgctttaccagtgccgcttgaacaacgacatcaaagtcatgctgcgggaaaacaacgaaggcctgaaccgtggtcgcgcagtcggtgagcccgtggcggtgcacctgccgccccaggcctgcctgttgatggaggcctga

SEQ ID NO: 66083 - protein, 361 aa, Pseudomonas fluorescens PfO-1
MGQPIAIEVRNVSKRYSDDPGLAPALDNVSVNIADNEFFTLLGPSGCGKTTLLRAIAGFEHVSDGEIRLAGETVNHLPPFKRRVNTVFQSYALFPHMSVAQNIAFGLEMQGLDRKTIPGRVDEMLALVQMEHLAGRKPAQLSGGQQQRVALARALAPKPKVLLLDEPLSALDLKLRKEMQVELKRVQQEAGITFIFVTHDQEEALTLSDRIAVMSAGKILQIGTPIDIYERPQHRFVAQFIGDINFLPGQLKRGEHNENIFVPNGMPVEIPCPPQGVNGSSVQLAFRPERSQLVAADQPHHLRGVIEAVLYVGTATLYQCRLNNDIKVMLRENNEGLNRGRAVGEPVAVHLPPQACLLMEA

SEQ ID NO: 66084 - DNA, 1155 bp, Pseudomonas fluorescens PfO-1
  CDS (1)..(1155): transl_table=11
atgagtgccgtgatcaaagacgcatcccagcagaacgacaaacccctggtcagcctgcgcaacctgaacaagcactacggcgatttcgcggccgtggacaacatctcgctggacatcaaggacggcgaattcctgaccttcctcggctccagcggctcgggcaaaagcaccacgctgtcgatgctcgccggtttcgaaacgccgagcagcggcgagatcctggtcaacggccagtcgctggtgaatgtgcctccgcacaaacgcgacatcggcatggtgttccagcgctattcgctgttcccgcatctgtcggtgcgcgacaacatcgcgttcccgctggcgatccgcaaactcgcggctgccgagcgcgacaagcgcgtcgatgcgatgttgaaactggtgcagctcgaacaatttgcccatcgccgcccttcgcaactctctggtggccagcagcaacgggttgccatcgctcgcgctctggtttacgagccacgcattctgctgatggacgaaccgctcggtgcgctggacaagaaactgcgcgaagacctgcaggatgaattgcgccagctgcaccgccgcctcggcatcaccatcgtctacgtgacccacgaccaggaagaagccatgcgcctgtcccagcgcattgcgattttcagtcacggcaagattgtcgggctcggcagcggttatgacctttatcagaatccgccaaatgcgtttgtggcgtcgtttctgggtaactcgaacttcctcaagctcaaggcgcagggcaatgcggcggcgagttttgaggggcagtcgctgtcgatccgtctcaccgctggattgccgaccgggcaggatgtgctgctgatggtgcgtccggaaaaggcgttggcgttgagtgtgcagcaggcgaatgatgagccattggcggccggctggaatgaggtttcggcgaaggtggtcgaggtgttgtttctgggtgagagccagacttgcagtgtggtgacgtcgggtggcacgtccatgaccgtgaaagcattgtcggcggcggggatgccgctgaaggctggggatccggttcgggtgcgttgggcgacggcggatgcttgcgtctataccgagtgggccgagagtgatttgaacaaagccgccggcgcgcactga

SEQ ID NO: 66085 - protein, 384 aa, Pseudomonas fluorescens PfO-1
MSAVIKDASQQNDKPLVSLRNLNKHYGDFAAVDNISLDIKDGEFLTFLGSSGSGKSTTLSMLAGFETPSSGEILVNGQSLVNVPPHKRDIGMVFQRYSLFPHLSVRDNIAFPLAIRKLAAAERDKRVDAMLKLVQLEQFAHRRPSQLSGGQQQRVAIARALVYEPRILLMDEPLGALDKKLREDLQDELRQLHRRLGITIVYVTHDQEEAMRLSQRIAIFSHGKIVGLGSGYDLYQNPPNAFVASFLGNSNFLKLKAQGNAAASFEGQSLSIRLTAGLPTGQDVLLMVRPEKALALSVQQANDEPLAAGWNEVSAKVVEVLFLGESQTCSVVTSGGTSMTVKALSAAGMPLKAGDPVRVRWATADACVYTEWAESDLNKAAGAH

SEQ ID NO: 66086 - DNA, 1056 bp, Pseudomonas fluorescens PfO-1
  CDS (1)..(1056): transl_table=11
atgtctggtctgattctggaaaacgtcgagaaacactacggctcggcctgcgcggtaaaagacgtcaacctgcatttgcccgagggcaaactggtgtgcttcctcggcccgtcgggctgcggcaagaccacgttgctgcgaatgatcgccgggctggaaaccctcaccggcggcgagatccgcctggacggcgaggacatcggccacaccccggcgcacctgcgcaacttcggcatggtgtttcagtcgctggcattgttcccgcacatgaccgtgggcgagaacatcgcctatccactgaaactgcgcggtgtgagcaagtctgatcaacagacacgggtggtggagttgcttgagttgatccagctgcaaccgatgatcgatcgcccggtggccaagctgtccggcggtcagcgtcagcgggtggcgattgcccgggcgattgcctcgcatccgaaaatcctgttgctcgacgaaccgctgtcggcgctggacgccaaattgcgtgagtcgatgcaggtggaaatccgccagctgcaacaacgcctgaacatcaccaccatcatggtgacccacgatcagcgcgaggccatgaccatggccgatatcgtggtggtgctgggtgagcatcgggtgcagcaggtggggacgccgattgaaatctatcggcatccggccaacgaattcgtcgcggattttatcggctcggggaatatttttccggccaccgcgctgggcgatggcaaggttgtgctgccgggcggcgatgccctgcaagtgccgatctgcagcagcatcgtggtcgggcagaaggtgaaaatgctgatccgccccgaagacctgcaactgtcaccgccccaggccacggcgggcaatcgtctgctgggcaaggtgacgttcgtgcgggatattggcgcgacgatcgagactacggtggagtgttccggcgtgaccttcacggcgctgagcacgccgtgtcagggcttcgggctggggatcgggcatccggtgtcggtgacattgccgagtgaggcgtgtcgggtactcggcgcctga

SEQ ID NO: 66087 - protein, 351 aa, Pseudomonas fluorescens PfO-1
MSGLILENVEKHYGSACAVKDVNLHLPEGKLVCFLGPSGCGKTTLLRMIAGLETLTGGEIRLDGEDIGHTPAHLRNFGMVFQSLALFPHMTVGENIAYPLKLRGVSKSDQQTRVVELLELIQLQPMIDRPVAKLSGGQRQRVAIARAIASHPKILLLDEPLSALDAKLRESMQVEIRQLQQRLNITTIMVTHDQREAMTMADIVVVLGEHRVQQVGTPIEIYRHPANEFVADFIGSGNIFPATALGDGKVVLPGGDALQVPICSSIVVGQKVKMLIRPEDLQLSPPQATAGNRLLGKVTFVRDIGATIETTVECSGVTFTALSTPCQGFGLGIGHPVSVTLPSEACRVLGA

SEQ ID NO: 66088 - DNA, 1125 bp, Pseudomonas fluorescens PfO-1
  CDS (1)..(1125): transl_table=11
atgagccaggtcgaatcaaacgcaggggccagcgatgtgctggtcagctttcgtggagtgcagaagagctacgacggcgagaacctgatcgtcaaagacctcaacctggacattcgcaagggcgaattcctcaccttgctcggaccgtccggctccggaaagaccaccagcctgatgatgctcgccggtttcgagacgccgaccgccggcgaaattctccttgccgggcgggcgatcaacaacgtgccgccgcacaagcgcgacatcggcatggtgttccagaactacgcgctgtttccgcacatgaccgtcgccgaaaacctggcgtttccgctgaccgtacgcggcctgaacaagagcgacgtcagcgacaaggttaagaaagtcctgagcatggttcagctcgacgcgttcgcatcgcgttatccggcgcagttgtccggcggccagcaacaacgtgtagcactggcccgtgcgctggtgttcgagccgcagctggtgctgatggacgaacccctcggcgccctcgacaaacaactgcgcgaacacatgcagatggaaatcaaacacctgcaccagcgccttggcgtaaccgtggtctatgtgacccacgaccagggcgaagccctgaccatgtccgaccgcgtcgccgtgttccaccagggcgagatccagcagatcgccccgccgcgcaccctctacgaagaaccgaaaaacaccttcgtcgccaacttcatcggcgagaacaaccgcctcaacggtcgcctgctcagccagaacggcgagcgctgcgtggtcgagctggggcgcggggaaaaggtcgaggcgctggcggtcaacatcggccagaccggcgaaccggtcaccctgtctatccgccccgagcgcgtcagcctcaacggttcgagcgaccaatgcgtcaaccgcttctccgggcgggtggccgaattcatctatctgggcgaccacgtccgggtgcgcctggaagtctgcggcaagaccgacttcttcgtgaaacaaccgattgccgagctcgatcctgcgctcgcagtcggtgacgtggttccgcttggctggcaggtcgagcacgttcgcgcgctcgatcctcttctagaggcgcactga

SEQ ID NO: 66089 - protein, 374 aa, Pseudomonas fluorescens PfO-1
MSQVESNAGASDVLVSFRGVQKSYDGENLIVKDLNLDIRKGEFLTLLGPSGSGKTTSLMMLAGFETPTAGEILLAGRAINNVPPHKRDIGMVFQNYALFPHMTVAENLAFPLTVRGLNKSDVSDKVKKVLSMVQLDAFASRYPAQLSGGQQQRVALARALVFEPQLVLMDEPLGALDKQLREHMQMEIKHLHQRLGVTVVYVTHDQGEALTMSDRVAVFHQGEIQQIAPPRTLYEEPKNTFVANFIGENNRLNGRLLSQNGERCVVELGRGEKVEALAVNIGQTGEPVTLSIRPERVSLNGSSDQCVNRFSGRVAEFIYLGDHVRVRLEVCGKTDFFVKQPIAELDPALAVGDVVPLGWQVEHVRALDPLLEAH

SEQ ID NO: 66090 - DNA, 1143 bp, Pseudomonas fluorescens PfO-1
  CDS (1)..(1143): transl_table=11
atggcagttgcctccggcgcctataagaaagccctcgagggcgaccagacaccgaaacaggtgctggtcaaaatcgaccgggtcacgaagaagttcgacgagacggttgccgtggacgatgtgtccctggaaatcaagaagggcgagatcttcgccctgctcggcggttcgggatcgggcaaatccactctgctgcggatgctggcagggttcgaacggcccacggaggggcgcattttcctcgacggtgtcgacatcaccgacatgccgccgtacgagcgaccgatcaacatgatgttccagtcctacgccctgttcccgcacatgaccgtggcgcagaacatcgcgttcggtctgcaacaggacaagattcccaaggccgagatcgacgcccgcgtggccgagatgctcaagctggtgcagatgagccagtacgccaagcgcaagccgcaccagttgtccggcggtcagcgtcagcgtgtggcattggcgcgttcgctggccaagcggccgaaactgctgctgctcgatgaaccgatgggtgcactggataaaaaactgcgttcgcagatgcagcttgagctggttgagatcatcgagcgcgtgggtgtgacctgcgtgatggtgacccacgaccaggaagaggccatgaccatggccgagcgcatcgcgatcatgcacctgggctggatcgcccagatcggcagcccgatcgacatctacgaaaccccgaccagccgcctggtctgcgaattcatcggtaacgtgaacatcttcgaaggcgaagtgatcgacgacgccgaaggccacgcgaccattacctgcaaggacctcgaccggcagatctacgtcggccacggcatcagcacctcggtgcaggacaagtccgtgacctacgcgatccgtccggaaaaactgctggtcaccgccgatcagccgacctgcgagtacaactggtcgagcggcaaggtgcatgacatcgcctacctcggcggtcactcggtgttctacgtcgaattgccgagcggcaagctggtgcagtcgttcgtggccaacgccgagcgccgtggtgcgcgtccgacctggggcgatcaggtctacgtctggtgggaagacgacagcggcgtggtacttcgctcatga

SEQ ID NO: 66091 - protein, 380 aa, Pseudomonas fluorescens PfO-1
MAVASGAYKKALEGDQTPKQVLVKIDRVTKKFDETVAVDDVSLEIKKGEIFALLGGSGSGKSTLLRMLAGFERPTEGRIFLDGVDITDMPPYERPINMMFQSYALFPHMTVAQNIAFGLQQDKIPKAEIDARVAEMLKLVQMSQYAKRKPHQLSGGQRQRVALARSLAKRPKLLLLDEPMGALDKKLRSQMQLELVEIIERVGVTCVMVTHDQEEAMTMAERIAIMHLGWIAQIGSPIDIYETPTSRLVCEFIGNVNIFEGEVIDDAEGHATITCKDLDRQIYVGHGISTSVQDKSVTYAIRPEKLLVTADQPTCEYNWSSGKVHDIAYLGGHSVFYVELPSGKLVQSFVANAERRGARPTWGDQVYVWWEDDSGVVLRS

SEQ ID NO: 66092 - DNA, 1104 bp, Rhodobacter sphaeroides 2.4.1
  CDS (1)..(1104): transl_table=11
gtggtggcttctacccaggacgacggttttgtcgttttcgaacatgtgcaaaaaagctatgatggcgagacgctcgtcgtcaaagatctcaacctgacgatcgggcagggtgagttcctgaccatgctggggccctccgggtcgggcaagaccacctgcctgatgatgctcgcgggcttcgagacggcgacgcacggcgagatccgcctcgacggtcgcccgatcaacacggtgcccccgcacaagcgcggcatcggcatggtgttccagaactacgcgctttttcctcacatgacggtaggcgagaacctctccttcccgctcgaggtgcgcggcatgtccaagtcggaccgcgagcgcaagatcaagcgtgcgctcgacatggtccagatgggcgccttcgccaaccgccgtccggcgcagctgtccggcgggcagcagcagcggatcgcgctggcccgggccctcgtgttcgacccgcagctcgtgctgatggacgagccgctcggcgcgctcgacaagcagctgcgcgagcatatgcagttcgagatcaagcatctgcacgaaagcctcgggatcacggtggtctatgtcacccacgatcagggcgaggcgctgaccatgtcggaccggatcgccgtcttcaacgacgggcgcatccagcagctggccccgccgtccgagctctacgagcggccgaagaacagcttcgtggccagcttcatcggcgagaacaaccgcctgcccggcaccgtcgaggagatcgccgacgggcgcgcgctggtgcggctcgagaccggcgagctgatcgacgccacgccggtgaacgtcgcccgcaagggccagcagacgctcgtctcgatccgtcccgagcgggtcgagttcaagccggagatgctgccgcccaacgcacatctcatcgatgccgaagtgctcgagttcatctacatgggcgatatcttccgcacgcggctgcgggtcgccggatccgaggatttcgtgatcaagtgccgcaacaccctcggccagcgcgtcatgcagccgggcgagaaggtcaggatcggctgggcgcctcaggacgcccgcgcgctcgatccgctttaa

SEQ ID NO: 66093 - protein, 367 aa, Rhodobacter sphaeroides 2.4.1
MVASTQDDGFVVFEHVQKSYDGETLVVKDLNLTIGQGEFLTMLGPSGSGKTTCLMMLAGFETATHGEIRLDGRPINTVPPHKRGIGMVFQNYALFPHMTVGENLSFPLEVRGMSKSDRERKIKRALDMVQMGAFANRRPAQLSGGQQQRIALARALVFDPQLVLMDEPLGALDKQLREHMQFEIKHLHESLGITVVYVTHDQGEALTMSDRIAVFNDGRIQQLAPPSELYERPKNSFVASFIGENNRLPGTVEEIADGRALVRLETGELIDATPVNVARKGQQTLVSIRPERVEFKPEMLPPNAHLIDAEVLEFIYMGDIFRTRLRVAGSEDFVIKCRNTLGQRVMQPGEKVRIGWAPQDARALDPL

SEQ ID NO: 66094 - DNA, 1005 bp, Rhodobacter sphaeroides 2.4.1
  CDS (1)..(1005): transl_table=11
gtggccgtccgcgcgctggacgatgtctcggtggggatccggcggagcgagttcttcaccctgctcggcccctcgggctgcggcaagaccacgcttctgcggctgatcgcggggttcgaggcgccgacctccggcgcgatcctgctcgacgggcgcgacatcaccgccctgccgccgaaccgccggccgatcaacacggtcttccagagctacgcgctgtttccgcatctgacggtggccgagaacgtgggcttcggcctccggatgcagggcaagccgcgcgccgagatcgagacggtgacggcgcggatgctggcgctcgtccggctcaaggcgctggcgcagcgcaaggtggcgcagctgtcgggcgggcagcagcagcgggtggcgctggcccgggcgctcgcgccgcagccgcgggtgctcctgctcgacgagccgctctcggcgctcgatctgaagcttcgcaaggagatgcagatcgagctgaagcggctccagcacgagacgggcatcaccttcgtcttcgtgacccacgatcaggaggaggcgctgaccatgtcggaccggatcggggtgatgagcgcgggccggatcctgcagatcggcccgccgcgcgagatctacacgcgcccggccaaccgcttcgtggcgagcttcatcggcgagacgaatttcctgccggcgcgccatgcgggcgggcgggtcacgctcgatgcgggcggagagctcgcggtcgaaggcgggcccgaggggcgggtgacggtcgccgtgcgccccgagcaggtgcgcctcgtggcccccgacgagccgggcgccctgcccgccacgatccgcgatctggtctatttcggaaccgacacccactgccacttggccctcgccgacgggaccgaggtggtggcgcgcctgcagagcagcgcctcgggcgatccggggctcgcccccggccagcccgcgggcctgcgctttgcaccgggcgccgtgcagctgctgggggactga

SEQ ID NO: 66095 - protein, 334 aa, Rhodobacter sphaeroides 2.4.1
MAVRALDDVSVGIRRSEFFTLLGPSGCGKTTLLRLIAGFEAPTSGAILLDGRDITALPPNRRPINTVFQSYALFPHLTVAENVGFGLRMQGKPRAEIETVTARMLALVRLKALAQRKVAQLSGGQQQRVALARALAPQPRVLLLDEPLSALDLKLRKEMQIELKRLQHETGITFVFVTHDQEEALTMSDRIGVMSAGRILQIGPPREIYTRPANRFVASFIGETNFLPARHAGGRVTLDAGGELAVEGGPEGRVTVAVRPEQVRLVAPDEPGALPATIRDLVYFGTDTHCHLALADGTEVVARLQSSASGDPGLAPGQPAGLRFAPGAVQLLGD

SEQ ID NO: 66096 - DNA, 1098 bp, Rhodobacter sphaeroides 2.4.1
  CDS (1)..(1098): transl_table=11
gtgaccgttgccgcgaaacccacgatgatcgagttccgcgacgtccacaaatattacggcgactatcacgcgctgcgcggcatctcggccacgatccgggcgggcgagttcttctcgctgctcgggccctcgggctgcggcaagaccacgctcctgcgcaccatcgcggggttcgaggagatctcgtcgggggtggtgctgatcgacggcaaggacaccaggggggtgcccgccaacaagcggcccaccaacatggtgttccagagctatgcgatcttcccgcatctgacggtggccgagaacgtgggcttcggcctgcgccgcgcgaacctctcgaaggaggagacgacgcgacgtgtggccgaggcgctggagatggtggggctgcgcggctacggcgcgcgggcggcccatgcgctctcgggcgggcagcggcagcgggtggcgctggcgcgcgcgctgatcctgaagcccaaggtgctgctcctggacgagccgctctcggcgctcgacaagaagatgcgcgagcagatgcaggtcgagctcatcaagctgcagcggcaggtgggcatcaccttcatcctcgtgacgcacgatcaggaagaggcgctggtcatgtccgaccggatcgccgtcatgttcgagggcgagatcgcgcagctggccgatcccgagacgctctatcggcggccaacctcgcgcaaggtggccgatttcatcgggacgatgaacttcctgccggcgcggatcctgagcgagacccagcaggggatcgaggtcgaggcgcaggggctcgggcggatgctgctcgatccgatgcaggcgccgggcgcggcctcgggcaccggcgtcaccgtgggctttcgacccgagacggcgacgatcctcttcgaggggcagaaggccgaccgcgaggccatggggaccatcgaggaggtcgtctactacggcgacatgacctattacgacatccgcctagacggcaccgaggcgcccatccggctctccatgcgcaacgtcttcggccgcgcggtgctggagatcggcgcgcgggcccgcgtcgcctggagccccggggcgctggtcctgttccgctga

SEQ ID NO: 66097 - protein, 365 aa, Rhodobacter sphaeroides 2.4.1
MTVAAKPTMIEFRDVHKYYGDYHALRGISATIRAGEFFSLLGPSGCGKTTLLRTIAGFEEISSGVVLIDGKDTRGVPANKRPTNMVFQSYAIFPHLTVAENVGFGLRRANLSKEETTRRVAEALEMVGLRGYGARAAHALSGGQRQRVALARALILKPKVLLLDEPLSALDKKMREQMQVELIKLQRQVGITFILVTHDQEEALVMSDRIAVMFEGEIAQLADPETLYRRPTSRKVADFIGTMNFLPARILSETQQGIEVEAQGLGRMLLDPMQAPGAASGTGVTVGFRPETATILFEGQKADREAMGTIEEVVYYGDMTYYDIRLDGTEAPIRLSMRNVFGRAVLEIGARARVAWSPGALVLFR

SEQ ID NO: 66098 - DNA, 1098 bp, Rhodobacter sphaeroides 2.4.1
  CDS (1)..(1098): transl_table=11
atggtcgggcaccgcatgcagagtcaaccgattgccgaactcaggaacgtgaccaagcgctacgggctggtcacggcggcgacgaacctgactctggccatcgaaccgggcgagttcctgtccttcctcggcccgtccggctgcggcaagaccaccgcgctgcgcatgctggccggcttcgagcaggcctccgaagggcaggtgctgatcgacggacgggacgccacggccctgcccgcctggcagcgcccggtgaacatggtgtttcagcagtatgcgctgttccctcatctgaccgtcgcgcagaatgtcggctacggcctgaaccagcggcggccgaaaccgcccagggccgaggtcgccgccgccgtcgatgaggcgcttgcgctggtgcagctctcgggcttcggcgcgcgccggacgtgggaattgtcgggcggccagcagcagagggtcgcgctggcccgcgcaatcgtcaacaagcccaagatcctgctgctcgacgagccgatggccgcgctggacaagaagctgcgccacgacatgcagatcgagttgaagtcgctgcagcgcgagctcggcatcaccttcgtcctcgtcacccacgatcaggaggaggcgctgtcgatgtcggaccggatcgtgatcatggaccatggccgcatcgcccagatcggcggcccggaagagctctacgaccggccgcagagccgttatgtcgcggatttcgtaggccgctccaacttcatcggcgccacgggccggggccgcgaggccgaaatcctcgtcgccgaggccggcggcctgatcttccacgcccgcggcggcgagaagatcggaccgggaagccccgtgaccctgtcgctgcgccccgaggagatccgccttgcgccttcgggcgagggtcatcgcatggtcgtcacgcaccggatcttcctcggcgagcataccgaataccacctgacctccggagccctcccgcatctggtggcggtcgtcccgcgcaccgccgaggcagggtcggcgctgctggccccgggcgccgaggtcatggcctcctggcgcgacggcgccgctctggcgctcgacgccggctga

SEQ ID NO: 66099 - protein, 365 aa, Rhodobacter sphaeroides 2.4.1
MVGHRMQSQPIAELRNVTKRYGLVTAATNLTLAIEPGEFLSFLGPSGCGKTTALRMLAGFEQASEGQVLIDGRDATALPAWQRPVNMVFQQYALFPHLTVAQNVGYGLNQRRPKPPRAEVAAAVDEALALVQLSGFGARRTWELSGGQQQRVALARAIVNKPKILLLDEPMAALDKKLRHDMQIELKSLQRELGITFVLVTHDQEEALSMSDRIVIMDHGRIAQIGGPEELYDRPQSRYVADFVGRSNFIGATGRGREAEILVAEAGGLIFHARGGEKIGPGSPVTLSLRPEEIRLAPSGEGHRMVVTHRIFLGEHTEYHLTSGALPHLVAVVPRTAEAGSALLAPGAEVMASWRDGAALALDAG

SEQ ID NO: 66100 - DNA, 1119 bp, Rhodobacter sphaeroides 2.4.1
  CDS (1)..(1119): transl_table=11
atgatggtcgagcgcgcgatgaccccggaggccgccctcgggaccccggagggtcccgatcacctggtcctgagcgaggtcggcatgaccttcgggacgctcgacgtcatcccctcgctgtcgctttcggtcaggcggggcgagatggtggctttcctcggcccctcgggctgcggcaagaccacgacgctgcgcatgatcgcgggcttgctcgatcccacgcgcggccggatctcggtgggcgggcgggagatcacccacctgccggtccacgaccgcgacatgggcatggtgttccagagctatgcgctctttccccacatgaccgtgtcgcagaacgtggccttcgggctcgagatgcggcgcatggccaaggccgagatccggtcgcgggtcgagcgggcgctggccatggtgcagctcggccatctggccgggcgcaagcccaaggcgctgtccggcgggcagcagcagcgggtggcgctggcccgcgcactggtggtcgagccctcgatcctgctgctcgacgagccgctttccaacctcgatgcgaagctgcgcgacgagatgcgggtgcagatccgcagcctccagcagcagagcgggatcaccgcggtcttcgtgacccacgatcaggtcgaggcgctcagcatgtgcgaccggatcgtggtgatgcgcggcggccatgtcgagcagttcggcacgccgaacgagatctacgagcggccggcgacgcccttcgtggcctccttcgtgggccgcaccaaccggctttcgggccgggtcgatccgtcggggcggctgctgatcgagggccggccggtcgccgctgaagggcggctgcccgagggcgcggtcgaggtgctggtgcgcccgcaccggatgagcctgcgcgccgccgcggaggatcagcctgtcggtctcaacagcctgcccggcgtgttgaccggggccaccttcgtgggcgacctcattcaggccacggtgcggatcggcggcgacgagatcaccgtcgagcagctcacgcgccgccgctcgggcctgcccgagccgggctcggccgtgaccgtcgcctgggaggccggcgacacgatggtctatcccgagggcagggcatga

SEQ ID NO: 66101 - protein, 372 aa, Rhodobacter sphaeroides 2.4.1
MMVERAMTPEAALGTPEGPDHLVLSEVGMTFGTLDVIPSLSLSVRRGEMVAFLGPSGCGKTTTLRMIAGLLDPTRGRISVGGREITHLPVHDRDMGMVFQSYALFPHMTVSQNVAFGLEMRRMAKAEIRSRVERALAMVQLGHLAGRKPKALSGGQQQRVALARALVVEPSILLLDEPLSNLDAKLRDEMRVQIRSLQQQSGITAVFVTHDQVEALSMCDRIVVMRGGHVEQFGTPNEIYERPATPFVASFVGRTNRLSGRVDPSGRLLIEGRPVAAEGRLPEGAVEVLVRPHRMSLRAAAEDQPVGLNSLPGVLTGATFVGDLIQATVRIGGDEITVEQLTRRRSGLPEPGSAVTVAWEAGDTMVYPEGRA

SEQ ID NO: 66102 - DNA, 990 bp, Rhodobacter sphaeroides 2.4.1
  CDS (1)..(990): transl_table=11
atgaccctcctcgccatctccgacatcaccaagagcttcgcgggccacaaggcgctcgatcatgtcacgctcgacatccggcagggtgagttcatctcgctgctcgggccttcgggctgcggcaagaccactctcctgcgcacggtcgcgggcttcatgaccgcggacaagggccggatcctgatcgatggcgaggatgtctcgcggctgccgcccgagcggcggccgctcaacacggtcttccagaactatgcgctgttcccgcacatgacggttctggagaacgtggcttacgggccgcggcgggcgggtctttcgcgcgccgaagcggaccggcgggccgaggaggcgctcgagatggtgggtctggccgccatgtcccgccgcaatcccgccgccatgtcgggcggccagcagcagcgcgtggcgctggcgcgcgccatcgtgaaccggccgaagctcctcctgctcgacgagccgctgtcggcgctcgatcttcagctgcgcaagcgcatgcagatcgagctgaagcagcttcaggtgcagctcggcatcaccttcatcttcgtgacccacgatcaggacgaggccatggccatgtccgaccgcatcgcggtcatgtcggccggccggctcgagcaatgcgacgcgcccgaggcgatctatcgccgtcctcggacgcgcttcgtggccgagttcatcggcgaggccaacttcctgccgctcgacggcacgggaccggagggcgtgctgcgccccgaggacctcagggtccttgccgagggcgaggcgctgccgccgggctggcgcggcctgcccgcgcgggtcacgggcgtgacctatgtgggcggcaccagcaacatctatctggccgacggtccgcgcgagcttctggcgcgcagctacggtctgccgcccgcggggatctcggccggacggacggtgcaggcgggcttcgatccggccaacctgcatccgctgggagcctga

SEQ ID NO: 66103 - protein, 329 aa, Rhodobacter sphaeroides 2.4.1
MTLLAISDITKSFAGHKALDHVTLDIRQGEFISLLGPSGCGKTTLLRTVAGFMTADKGRILIDGEDVSRLPPERRPLNTVFQNYALFPHMTVLENVAYGPRRAGLSRAEADRRAEEALEMVGLAAMSRRNPAAMSGGQQQRVALARAIVNRPKLLLLDEPLSALDLQLRKRMQIELKQLQVQLGITFIFVTHDQDEAMAMSDRIAVMSAGRLEQCDAPEAIYRRPRTRFVAEFIGEANFLPLDGTGPEGVLRPEDLRVLAEGEALPPGWRGLPARVTGVTYVGGTSNIYLADGPRELLARSYGLPPAGISAGRTVQAGFDPANLHPLGA

SEQ ID NO: 66104 - DNA, 1038 bp, Xanthomonas campestris pv. vesicatoria str. 85-10
  CDS (1)..(1038): transl_table=11
ttgcggtcgacgacgtcagcctgcagattcgcaagggcgagatcttcgcgttgctcggtggttccggtagcggcaaatccacgctgctgcgctgccttgccgggttcgagcggccgaccaagggggcgcattgtcctggatggtcaaccgatcgacgcactgccgccgtacgagcgcccgatcaacatgatgttccagtcgtacgcgctgtttccgcatatgagtgtggagcagaacatcgccttcgggttgaagcaggaaggcttgcccaaggctgcgatcgccagccgcgtcggcgagatgctcgaactggtgcagcttggcgcgctggccaagcgcaagccgcaccagctctccggcgggcagcagcaacgcgtggccctggcgcgctcgctggccaagcgccccaagctgctgttgctggacgaaccgatgggtgcgctggataaaaaactgcgctcgcagatgcagctggaactggtcaacatcatcgaaacctccggcgtgacctgcgtcatggtcacccacgatcaggaagaggccatgaccatggccacccggatcgcgctgatggaccagggctggatccagcaggtgggcacgcccgatgaaatctacgagcagccggccaaccggtttgcggccgagttcatcggctcggtcaatctgatcgatgcgctcatcgccgacgacgcgcccgagtacgtcaccttgaaaacgccggcgttcgatgcctgcatccgcatcggccacggcatcaccggcttcgaagggcaggcagtggcgttcgcgctgcgcccggaaaagctcgccatcggcaaggacgagccggcccaggcctgcaacaaggcccagggcgtgatcgaagacatcgcctatttcggcagccactcggtctaccacgtgcgcctgcccagcggggtcaagctgatggccaatttcgccaatcgccagcgctgggccagcgaagcgctgacctggggcgacaccgtgtgggtcgggtggggcgaagacgacggcgtggtgctcaccgcatga

SEQ ID NO: 66105 - protein, 345 aa, Xanthomonas campestris pv. vesicatoria str. 85-10
MRSTTSACRFARARSSRCSVVPVAANPRCCAALPGSSGRPRGRIVLDGQPIDALPPYERPINMMFQSYALFPHMSVEQNIAFGLKQEGLPKAAIASRVGEMLELVQLGALAKRKPHQLSGGQQQRVALARSLAKRPKLLLLDEPMGALDKKLRSQMQLELVNIIETSGVTCVMVTHDQEEAMTMATRIALMDQGWIQQVGTPDEIYEQPANRFAAEFIGSVNLIDALIADDAPEYVTLKTPAFDACIRIGHGITGFEGQAVAFALRPEKLAIGKDEPAQACNKAQGVIEDIAYFGSHSVYHVRLPSGVKLMANFANRQRWASEALTWGDTVWVGWGEDDGVVLTA

SEQ ID NO: 66106 - DNA, 1140 bp, Burkholderia sp. 383
  CDS (1)..(1140): transl_table=11
atgatccatacgctccctgccgcaccggttgcggccgacgctcgccgcgatgcgggcgcattcgtgcgcatcgaaaacgtcgtgaagaaattcggcgacagcaccgccgtcgacaacgtgaacctgacgatcgcgaagaacgaactcttcgcgctgctcggcagctcgggctgcggcaagtcgacgttgctgcgcatgctcgccgggctcgagacggccacctccggcaagatcttcgtcgacggcgaagatctcgcatcgctgccgccgtatcgccgcccggtgaacatgatgttccagtcgtacgcgctgttcccgcacatgtcggtcgaatcgaacgtcgcattcggcctgaagcaggaaggcacgccgaagcacgagatcagggagcgcgtggccgatgcgctcgcgctcgtgcagatgagcaagtacgcgcagcgcaagccgcaccagctctccggcggccagcagcagcgcgtcgcgctggcccgctcgctggtcaagcgtccgaagctcttgctgctcgacgagccgatgtccgcgctcgacaagaagatccgccagaagacccagctcgaactcgtgaacatcatcgagcaggtcgacgtgacctgcgtgatggtcacgcacgaccaggaagaggcgatgacgatggccagccgcctcgcagtgatgagcgaaggcaagatcgtgcagatcggtgcgcctggcgaggtgtacgagtttccgaacagccgcttctcggccgaattcatcggctcgacgaacctgttcgaagggcgtgtggtcgaggacgagcccgatcacatcttcgtcgaaagtgacgacctcgaagcgcgcatgcatgtgaaccatggtgtcaccggcccgctcgggatgccggtcggcatctcggtgcgccccgaacgcattcacgtgtcgcgcgagaaacccggttcgaaacacaactgggcgcgcggcgtcgtgaccgacatcgcgtacatgggcagctactcgctgtatcacgtgcgcttgccgagcggcaagacggtggtgtcgaacctgtcgagctcgcacctgatgaccgacaacgcaccggcgtggaacgacgacgtgttcgtgtcgtggtcgccggccagcggcgtcgtgctgacgcagtga

SEQ ID NO: 66107 - protein, 379 aa, Burkholderia sp. 383
MIHTLPAAPVAADARRDAGAFVRIENVVKKFGDSTAVDNVNLTIAKNELFALLGSSGCGKSTLLRMLAGLETATSGKIFVDGEDLASLPPYRRPVNMMFQSYALFPHMSVESNVAFGLKQEGTPKHEIRERVADALALVQMSKYAQRKPHQLSGGQQQRVALARSLVKRPKLLLLDEPMSALDKKIRQKTQLELVNIIEQVDVTCVMVTHDQEEAMTMASRLAVMSEGKIVQIGAPGEVYEFPNSRFSAEFIGSTNLFEGRVVEDEPDHIFVESDDLEARMHVNHGVTGPLGMPVGISVRPERIHVSREKPGSKHNWARGVVTDIAYMGSYSLYHVRLPSGKTVVSNLSSSHLMTDNAPAWNDDVFVSWSPASGVVLTQ

SEQ ID NO: 66108 - DNA, 1161 bp, Burkholderia sp. 383
  CDS (1)..(1161): transl_table=11
atgaatagccagtcgggtgcgccggtcgcgggcgcgccgtcctccgtttcctcctccggcgccgatgcgcgcgccgagacctttgtccagatcgtcgacgtcgtcaagaaattcggcgacaccgaagccgtgcgcagcgtcaacctgaccgtgcgccagggcgagctgttcgcgctgctcggcagttcgggctgcggcaagtcgacgttgttgcggatgctcgcgggcctcgagacggtcacgtcgggcaagatcctgatcgacggcgaggacctcgcgcagatgccgccgtacaagcggcctgtgaacatgatgttccagtcgtatgcgctgttcccgcacatgtcggtcgagtcgaacgtcgcgttcggcctcaagcaggaaggcacgccgaaggccgagctgaaggagcgtgtcgcatccgcgctcgaactcgtgcagatgagcaagtacgcgaagcgcaagccgcatcagttgtccggcggccagcagcagcgtgtcgcgctcgcgcgctcgctggtcaagcggccgaagctgctgctgctcgatgagccgatgtccgcgctcgacaagcagatccgccagcgcacgcagatcgagctcgtcaacatcctgaacaaggtcggcgtcacctgcatcatggtcacgcacgaccaggaagaagcgatgacgatggccaatcgtctcgcggtgatgagcgaagggcagatcgtgcagatcggctcgccgaacgaagtgtacgaatatccgaacagccgcttctcggccgaattcatcggctcgacgaacctgttcgacggcgtcaccgtcgaggacgaacccgaccacgtgtacatcgagtcgccggagctgccgagccggctgtacgtcagccacgggatctcgggcccgctcgggatgccggtcacggtgtcggtgcgccccgaacggatcgcgctcacgcgcaagccgcccgaaggcgcgttcaactgggcgcgcggccggatcagcaacgtcgcatatatgggcggctactcgctgtatcacgtgaagctcgatgcgggcaagacggtgatcgcgaacgtatcgagccttgcgatttcggagctcgacacgccggcgctcggcgacgagatctacgtgcgctggagcgcgaccgcgggcgtggtgctgacgtcatga

SEQ ID NO: 66109 - protein, 386 aa, Burkholderia sp. 383
MNSQSGAPVAGAPSSVSSSGADARAETFVQIVDVVKKFGDTEAVRSVNLTVRQGELFALLGSSGCGKSTLLRMLAGLETVTSGKILIDGEDLAQMPPYKRPVNMMFQSYALFPHMSVESNVAFGLKQEGTPKAELKERVASALELVQMSKYAKRKPHQLSGGQQQRVALARSLVKRPKLLLLDEPMSALDKQIRQRTQIELVNILNKVGVTCIMVTHDQEEAMTMANRLAVMSEGQIVQIGSPNEVYEYPNSRFSAEFIGSTNLFDGVTVEDEPDHVYIESPELPSRLYVSHGISGPLGMPVTVSVRPERIALTRKPPEGAFNWARGRISNVAYMGGYSLYHVKLDAGKTVIANVSSLAISELDTPALGDEIYVRWSATAGVVLTS

SEQ ID NO: 66110 - DNA, 1155 bp, Burkholderia sp. 383
  CDS (1)..(1155): transl_table=11
atgcaatcgataccctcttccgctgctgcacgacagacccaaccggcccccgcggcccgtacgcaaaacgacgctttcgtgcgcatcgaaaacgtcgtgaagaaattcggcgacagcaccgccgtcgacaacgtgaacctgacgatcgcgaagaacgagctgttcgcgctcctcggcagctcgggctgcggcaagtcgacgttgctgcgcatgctcgccggtctcgagacggccacctccggcaagatcttcgtcgacggcgaagatctcgcgtcgctgccgccgtatcgccgcccggtgaacatgatgttccagtcgtacgcgctgttcccgcacatgacggtcgaatcgaatgtcgcattcggcttgaagcaggaaggcacgccgaagaatgagatcaaggagcgcgtggccgatgcgctcgcactcgtgcagatgagcaagtacgcgcagcgcaagccgcaccagctctccggcggccagcagcagcgcgtcgcgttggcccgctcgctggtgaaacgcccgaagctcctgctgctcgacgagccgatgtccgcgctcgacaagaagatccgccagaagacccagctcgaactcgtgaacatcatcgagaaggtcgacgtgacctgcgtgatggtcacgcacgaccaggaggaggcgatgacgatggcgagccgcctcgcggtgatgagcgaaggcaagatcgtgcagatcggcgcgccgggcgaagtctacgaattcccgaacagccgcttctcggccgaattcatcggctcgaccaacctgttcgaagggcgtgtggtcgaggacgagccggatcacatcttcgtcgaaagcgacgacctcgaagcgcgcatgtacgtgagccacggcatcacgggcccgctcggcatgccggtcggcatctcggtgcgtccggaacgcattcacgtgtcgcgcgagaaaccggggtcgaagcataactgggcgcgcggcgtcgtgaccgacatcgcgtacatgggcagctactcgctgtatcacgtgcgcttgccgagcggcaagacggtggtgtcgaacctgtcgagctcgcacctgatgaccgacaacgcaccggcgtggaacgacgacgtgttcgtgtcgtggtcgccggccagcggcgtcgtgctgacgcagtga

SEQ ID NO: 66111 - protein, 384 aa, Burkholderia sp. 383
MQSIPSSAAARQTQPAPAARTQNDAFVRIENVVKKFGDSTAVDNVNLTIAKNELFALLGSSGCGKSTLLRMLAGLETATSGKIFVDGEDLASLPPYRRPVNMMFQSYALFPHMTVESNVAFGLKQEGTPKNEIKERVADALALVQMSKYAQRKPHQLSGGQQQRVALARSLVKRPKLLLLDEPMSALDKKIRQKTQLELVNIIEKVDVTCVMVTHDQEEAMTMASRLAVMSEGKIVQIGAPGEVYEFPNSRFSAEFIGSTNLFEGRVVEDEPDHIFVESDDLEARMYVSHGITGPLGMPVGISVRPERIHVSREKPGSKHNWARGVVTDIAYMGSYSLYHVRLPSGKTVVSNLSSSHLMTDNAPAWNDDVFVSWSPASGVVLTQ

SEQ ID NO: 66112 - DNA, 1092 bp, Burkholderia sp. 383
  CDS (1)..(1092): transl_table=11
atggcaccttatctgagcgcagaacgcatcgagaagcggtacaacgacacgcaggtcctgaccgacatcaacctgagcgtgatgaagggcgaaatgatctgcttcctggggccgtccggctgcgggaagaccacgctgctgcggatcatcgcggggctcgagacgcagaacgccggccacatcatgcaggacggccgcgacatctcgcggctgccgccgcaactgcgcgactacgggatcgtgttccagtcgtacgcgctgttccccaacctcacggtgtacgacaacgtcgcgtacgggctcgtgaaccgcaagatgaagcgcgacgcgatccacgagcgcgtgcacacgctgctcgcgctggtcggcctgcccgacagccatcgcaagcatccgggccagttgtccggcggccagcagcagcgcatcgcactggcacgcgcgctcgccacctcccccggcctgctgctgctcgacgagccgctgtcggcgctcgacgcgcgggtgcgcgtgcggttgcgccaggagattcgcgcgctgcagcagcggctcggcgtgacgacgatcatggtcacgcacgaccaggaagaagcgctgtcgatggccgaccgcatcgtcgtgatgaaccacggcgtgatcgagcagatcggcacgccgctcgaaatctaccggcagccggcgtcgccgttcgtcgcggacttcatcggccgcgtgaacacgattcccgccgaagtcgcgcaggacggcacgctgcgcgcgggcgcggtcggcctcgactgccgtcatggcacggcacgccccgcgcaaggcgcggcggtgtcggtgtacgtgcggccggaagacctgcgcatccgcgtaccgggcgagacggccgacaacgtgctggccggccgcgtcgagaagctcgaattcctcggtgcgttctgccgcgtgagcttccggatcgacgggctcgacggccaggagatcgtcgccgacctgtcgtatcacgacgtcgaccgcaccggcgtgcaggccggcgcgcgcatcgacctcgcgctcgatcgcgagcatgtccgcgtgttcccgagcgcgaaggagcgactgcaatga

SEQ ID NO: 66113 - protein, 363 aa, Burkholderia sp. 383
MAPYLSAERIEKRYNDTQVLTDINLSVMKGEMICFLGPSGCGKTTLLRIIAGLETQNAGHIMQDGRDISRLPPQLRDYGIVFQSYALFPNLTVYDNVAYGLVNRKMKRDAIHERVHTLLALVGLPDSHRKHPGQLSGGQQQRIALARALATSPGLLLLDEPLSALDARVRVRLRQEIRALQQRLGVTTIMVTHDQEEALSMADRIVVMNHGVIEQIGTPLEIYRQPASPFVADFIGRVNTIPAEVAQDGTLRAGAVGLDCRHGTARPAQGAAVSVYVRPEDLRIRVPGETADNVLAGRVEKLEFLGAFCRVSFRIDGLDGQEIVADLSYHDVDRTGVQAGARIDLALDREHVRVFPSAKERLQ

SEQ ID NO: 66114 - DNA, 1107 bp, Burkholderia sp. 383
  CDS (1)..(1107): transl_table=11
atgaagtccgatgatgtgatcgtcagctttcgcggcgtgcggaagacctacgacggcgaaacgctggtcgtcaaatcgctcgacctcgatatccaccgcggggaattcctgacgctgctcgggccgtcgggctcgggcaagaccacctgcctgatgatgctggccggcttcgaattcccgaccggcggcgagatccgcctcgacggcgaactgctgaacaacgtgccgccgcacaagcgcaacatcggcatggtgttccagaactacgcgctgtttccgcacctgacggtcgagcagaacgtcgcgtatccgctgaccgtgcgcaagctgccggccggcgagcgcgcggaacgcgtcgcgcatgcgctgaagatggtacagatggagcgcttcgcgaaacgctacccggcccagttgtcgggcggccagcagcagcgcatcgcgctggcgcgcgcgctcgtgttcgagccgaagctggtgctgatggacgagccgctcggcgcgctcgacaagcaactgcgcgaacacatgcagtacgaactgaaggcgctgcacgaaaagctcggcgtaactttcgtgtacgtgacgcacgaccagggcgaggcgctgacgatgtccgatcgcgtcgccgtgttcgacaagggcatcgtgcagcagctcgacaccgtcgaccgcctgtacgaatcgccctgcaacgaattcgtcgcgaacttcatcggcgacagcaaccggctgcgcggcaccatcgcgcgcgtcgacggcgaattctgcgaattccggctcgacgacggcacgaagctcgtcggccgccgcatcggcgatgcggccgagggggcgccggctgtcgcgtgcatccgccccgaacgcatgagcctcgccgcgcacggcgcgaacgggcacgcgaacggctcggccgccaaccggttgagcggcgaggcgcgcagcctcatctatttcggcgatcacgtgcgcatgcgctgtgcgctgcccggccaggacgaatgcttcgtgaaggtgccgctcggcaccggcgcgatcgatgcgttctcgcccggcgcaccggtcgcgctcgcatttgcacccgaacacctgcgcgtgttcgcttga

SEQ ID NO: 66115 - protein, 368 aa, Burkholderia sp. 383
MKSDDVIVSFRGVRKTYDGETLVVKSLDLDIHRGEFLTLLGPSGSGKTTCLMMLAGFEFPTGGEIRLDGELLNNVPPHKRNIGMVFQNYALFPHLTVEQNVAYPLTVRKLPAGERAERVAHALKMVQMERFAKRYPAQLSGGQQQRIALARALVFEPKLVLMDEPLGALDKQLREHMQYELKALHEKLGVTFVYVTHDQGEALTMSDRVAVFDKGIVQQLDTVDRLYESPCNEFVANFIGDSNRLRGTIARVDGEFCEFRLDDGTKLVGRRIGDAAEGAPAVACIRPERMSLAAHGANGHANGSAANRLSGEARSLIYFGDHVRMRCALPGQDECFVKVPLGTGAIDAFSPGAPVALAFAPEHLRVFA

SEQ ID NO: 66116 - DNA, 1155 bp, Burkholderia sp. 383
  CDS (1)..(1155): transl_table=11
atgaaacgggattcattcagtacacctgatgcgatgcatcgaccgccgacgaccatgctcaagccgaacgacacgttcgtgcgcatcgaaaacgtcgtgaagaaattcggcgacagcaccgccgtcgacaacgtgaacctgacgatcgcaaagaacgagctgttcgcgctgctcggcagctccggctgcggcaagtcgacgttgctgcgcatgctcgccgggctcgagacggctacgtccggcaagatcttcgtcgacggcgaagatctcgcgtcgctgccgccgtaccgccgcccggtgaacatgatgttccagtcgtacgcgctgttcccgcacatgacggtcgaatcgaacgtcgcattcggcctgaagcaggaaggcacgccgaagaatgagatcaaggagcgcgtggccgatgcgctcgcactcgtgcagatgagcaagtacgcgcagcgcaagccgcaccagctctccggcggccagcagcagcgcgtcgcgttggcccgctcgctggtgaaacgcccgaagctgctgctgcttgacgagccgatgtccgcgctcgacaagaagatccgccagaagacccagctcgaactcgtgaacatcatcgagaaggtcgacgtgacctgcgtgatggtcacgcacgaccaggaagaggcgatgacgatggccagccgcctcgcggtgatgagcgaaggcaagatcgtgcagatcggtgcgccgggcgaagtctacgaattcccgaacagccgcttctcggccgaattcatcggctcgaccaacctgttcgaagggcgtgtggtcgaggacgagcccgatcacatcttcgtcgaaagcgacgacctcgaagcgcgcatgtacgtgagccacggtatcacgggcccgctcgggatgccggtcggcatctcggtgcgcccggaacgcattcacgtgtcgcgcgaaaaaccgggttcgaaacacaactgggcgcgcggcgtcgtgaccgacatcgcgtacatgggcagctactcgctgtatcacgtgcgcttgccgagcggcaagacggtggtgtcgaacctgtcgagctcgcacctgatgaccgacaacgcaccggcgtggaacgacgacgtgttcgtgtcgtggtcgccggccagcggcgtcgtgctgacgcagtga

SEQ ID NO: 66117 - protein, 384 aa, Burkholderia sp. 383
MKRDSFSTPDAMHRPPTTMLKPNDTFVRIENVVKKFGDSTAVDNVNLTIAKNELFALLGSSGCGKSTLLRMLAGLETATSGKIFVDGEDLASLPPYRRPVNMMFQSYALFPHMTVESNVAFGLKQEGTPKNEIKERVADALALVQMSKYAQRKPHQLSGGQQQRVALARSLVKRPKLLLLDEPMSALDKKIRQKTQLELVNIIEKVDVTCVMVTHDQEEAMTMASRLAVMSEGKIVQIGAPGEVYEFPNSRFSAEFIGSTNLFEGRVVEDEPDHIFVESDDLEARMYVSHGITGPLGMPVGISVRPERIHVSREKPGSKHNWARGVVTDIAYMGSYSLYHVRLPSGKTVVSNLSSSHLMTDNAPAWNDDVFVSWSPASGVVLTQ

SEQ ID NO: 66118 - DNA, 1122 bp, Desulfovibrio desulfuricans G20
  CDS (1)..(1122): transl_table=11
atggctgaacaggattacatattcgagctgcgcggagtatcaaaatacttcgacgacacctgtgcgctcgaaaatatagatctgcagatcagaaacggcgagttccttacgctgctgggcccttcgggctgcggaaaaacaaccattctgcgtcttctttccggattcgaaacgccctcatcgggcgatgtcatcctgagcggccgtgtggtgaacgacgttccgcccgagcagcgtcaggtaaacaccgtgtttcagaattatgcgctttttccgcatatgacggtgcgtgataacgtgggcttcgggctgaaaatgcagaaacgtccgaaggatgaaatagccagacgtgtgcgcgaagcactgaagatggtgcatctggagcagttcggcgaccgcaagcccgcgcggctttccggcgggcagcagcaacgtgtggccattgcccgcgcagtggtgaacaacccctatgtgctgctgctggacgaacccttcagcgcccttgattttaagctgcgcaaaaaaatgcagctggaaatcaagcatctgcagcgtcagctgggcatcacctttgtctttgtgacacacgatcaggaagaggcgtttgccatgtccgaccgtgtggtggtgatgaatgacggccgcattgaacagataggctcgccgcaggaaatatacgaagaaccggccaacctgtatgtggcccgttttgtgggcgacataaacatactggacggtaccataaccgcccgccgcaacggcgtgctgtatgacgccacgctggaaggcgtgccttttcccgtgcagaccggaaagcagtttgaaaccggcgaccgcgtcaaggttctgctgcgtcccgaagacatccgcctgcacatgatgcacgacctgccggatggtgaatactttaccggcgccattgaagaaaccgtgtacaaaggcgccaccgttgatattgtggtgcggctggacagccccagcgaaggacagcccggcaaacagctgctggttgcagaattcttcaacgaggatgacgaagaaatcaactacactccgggcgaacgcgtggccgtcacctgggtaaacggctgggaggtagtgctgggagatgatggggagtaa

SEQ ID NO: 66119 - protein, 373 aa, Desulfovibrio desulfuricans G20
MAEQDYIFELRGVSKYFDDTCALENIDLQIRNGEFLTLLGPSGCGKTTILRLLSGFETPSSGDVILSGRVVNDVPPEQRQVNTVFQNYALFPHMTVRDNVGFGLKMQKRPKDEIARRVREALKMVHLEQFGDRKPARLSGGQQQRVAIARAVVNNPYVLLLDEPFSALDFKLRKKMQLEIKHLQRQLGITFVFVTHDQEEAFAMSDRVVVMNDGRIEQIGSPQEIYEEPANLYVARFVGDINILDGTITARRNGVLYDATLEGVPFPVQTGKQFETGDRVKVLLRPEDIRLHMMHDLPDGEYFTGAIEETVYKGATVDIVVRLDSPSEGQPGKQLLVAEFFNEDDEEINYTPGERVAVTWVNGWEVVLGDDGE

SEQ ID NO: 66120 - DNA, 1137 bp, Shigella boydii Sb227
  CDS (1)..(1137): transl_table=11
atgggacagagtaaaaaattgaataaacaaccgagttcgctttcaccgctggtgcaattggcgggaattcgcaaatgctttgatggtaaagaggtcattccccagctggatctgactatcaacaatggcgagttcctcacgctgcttggcccttctggctgcggtaaaacaaccgttcttcgcctgattgcaggtctggaaactgttgattccggacgcatcatgctggataacgaggacatcacccacgttccggcggaaaaccgctatgtgaacactgttttccaaagctacgcacttttcccccacatgaccgtgttcgaaaatgtggcctttgggttgcgcatgcaaaaaacccccgctgctgaaattacgccccgcgtgatggaagccctgcggatggtgcaactggaaaccttcgctcaacgtaaaccgcatcagctctctggtggtcaacagcaacgcgtcgccattgctcgcgcggtggttaacaagcctcgtctgttgttgctggatgagtcgctctcagcgctggattacaaactgcgtaagcaaatgcagaacgagctgaaagcgttacagcgtaagcttggcattacattcgtcttcgtgactcacgaccaggaagaagcactcaccatgtcagacaggattgtggtgatgcgcgagggtcgcattgagcaagacggcacgccgcgtgaaatctacgaagagccgaaaaacctgtttgttgccggcttcattggcgaaattaatatgtttaacgccacggtgatcgagcgactcgacgagcagcgcgtacgcgccaacgttgaaggccgcgaatgtaatatctacgttaacttcgccgttgaaccggggcaaaaactgcatgttctgctgcgcccggaagacttacgtgttgaagagattaacgacgacaaccacgctgaagggctgattggttacgttcgtgagcgtaactacaaaggcatgacgctggagtcggttgttgaactggaaaatggcaagatggtgatggtcagcgaattcttcaatgaagacgatcctgactttgaccactctctcgaccaaaaaatggccattaattgggtagaaagctgggaggtcgtactggctgatgaagaacacaagtaa

SEQ ID NO: 66121 - protein, 378 aa, Shigella boydii Sb227
MGQSKKLNKQPSSLSPLVQLAGIRKCFDGKEVIPQLDLTINNGEFLTLLGPSGCGKTTVLRLIAGLETVDSGRIMLDNEDITHVPAENRYVNTVFQSYALFPHMTVFENVAFGLRMQKTPAAEITPRVMEALRMVQLETFAQRKPHQLSGGQQQRVAIARAVVNKPRLLLLDESLSALDYKLRKQMQNELKALQRKLGITFVFVTHDQEEALTMSDRIVVMREGRIEQDGTPREIYEEPKNLFVAGFIGEINMFNATVIERLDEQRVRANVEGRECNIYVNFAVEPGQKLHVLLRPEDLRVEEINDDNHAEGLIGYVRERNYKGMTLESVVELENGKMVMVSEFFNEDDPDFDHSLDQKMAINWVESWEVVLADEEHK

SEQ ID NO: 66122 - DNA, 1074 bp, Rhodobacter sphaeroides 2.4.1
  CDS (1)..(1074)
atgatcgagttccgcgacgtccacaaatattacggcgactatcacgcgctgcgcggcatctcggccacgatccgggcgggcgagttcttctcgctgctcgggccctcgggctgcggcaagaccacgctcctgcgcaccatcgcggggttcgaggagatctcgtcgggggtggtgctgatcgacggcaaggacaccaggggggtgcccgccaacaagcggcccaccaacatggtgttccagagctatgcgatcttcccgcatctgacggtggccgagaacgtgggcttcggcctgcgccgcgcgaacctctcgaaggaggagacgacgcgacgtgtggccgaggcgctggagatggtggggctgcgcggctacggcgcgcgggcggcccatgcgctctcgggcgggcagcggcagcgggtggcgctggcgcgcgcgctgatcctgaagcccaaggtgctgctcctggacgagccgctctcggcgctcgacaagaagatgcgcgagcagatgcaggtcgagctcatcaagctgcagcggcaggtgggcatcaccttcatcctcgtgacgcacgatcaggaagaggcgctggtcatgtccgaccggatcgccgtcatgttcgagggcgagatcgcgcagctggccgatcccgagacgctctatcggcggccaacctcgcgcaaggtggccgatttcatcgggacgatgaacttcctgccggcgcggatcctgagcgagacccagcaggggatcgaggtcgaggcgcaggggctcgggcggatgctgctcgatccgatgcaggcgccgggcgcggcctcgggcaccggcgtcaccgtgggctttcgacccgagacggcgacgatcctcttcgaggggcagaaggccgaccgcgaggccatggggaccatcgaggaggtcgtctactacggcgacatgacctattacgacatccgcctagacggcaccgaggcgcccatccggctctccatgcgcaacgtcttcggccgcgcggtgctggagatcggcgcgcgggcccgcgtcgcctggagccccggggcgctggtcctgttccgctga

SEQ ID NO: 66123 - protein, 357 aa, Rhodobacter sphaeroides 2.4.1
MIEFRDVHKYYGDYHALRGISATIRAGEFFSLLGPSGCGKTTLLRTIAGFEEISSGVVLIDGKDTRGVPANKRPTNMVFQSYAIFPHLTVAENVGFGLRRANLSKEETTRRVAEALEMVGLRGYGARAAHALSGGQRQRVALARALILKPKVLLLDEPLSALDKKMREQMQVELIKLQRQVGITFILVTHDQEEALVMSDRIAVMFEGEIAQLADPETLYRRPTSRKVADFIGTMNFLPARILSETQQGIEVEAQGLGRMLLDPMQAPGAASGTGVTVGFRPETATILFEGQKADREAMGTIEEVVYYGDMTYYDIRLDGTEAPIRLSMRNVFGRAVLEIGARARVAWSPGALVLFR

SEQ ID NO: 66124 - DNA, 1116 bp, Rubrivivax gelatinosus PM1
  CDS (1)..(1116)
atggcgaacgacaacggcggcgcaaaggccgccagcggctacctgcagatccaggacgtggtgaaggacttcggcggcggtgccgtcgcggtcaaccacgtcagcatcgacatcgcccagggcgaaatctttgcgctgctgggctcgtcgggctgcggcaagaccacgctgctgcggatgctggcgggcttcgagacgccgacgtccgggcgcatcgtgctcaacgggcaggacctggccggcatgccgccctacgagcggccgatcaacatgatgttccagtcgtatgcgctgttcccgcacctcacggtgtgggacaacatcgcgttcggcctgcgtcgcgacggcatgccccgggatgaggtcgcgcagcgggtcgacgcgatgctcaagctggtccagctcggcaagtacggcaagcgcaagccgcaccagctctcgggtggtcagcagcagcgtgtcgcgctggcgcgcagcctggccaagcggcccaagctgctgctgctcgacgagccgctcggcgcgctcgacaagaagctgcgcgaggaaacgcagatcgagctggtcaacatcatcgaggaggtcggcgtgacctgcgtgatggtgacgcacgaccaggaagaagccatgaccatggcctcgcgcatcgcgatcatgagcgagggcaaggtgctgcaggtcggtgcgccggccgacgtctacgagacgccggccacgcgcttcgtggccgacttcatcggcaacgtgaacctgatggaagggacactgagcgaggaccaccccgatcacgttgtgatctcctgcaaggactgcagccacctcgtcggtcacggcatcaccggcaccgagggcatgacggtcagcgtcgcggtgcgacccgagaaaatcggcctcggccccgacgagccaccgggcccgcacaaccgcgcgcgcggcacgatcaaggacctgtcctacttcggcagcttcaccgtctaccacctccagctcgacagcggcgccgtgctgaagatcagccagagcaacgtcgagcggcatcgcgacgtcgagctgacctggggcgacaccgcctgggcctcgtggtcgccgtcgtcgcaagtggtgctgacgcaatga

SEQ ID NO: 66125 - protein, 371 aa, Rubrivivax gelatinosus PM1
MANDNGGAKAASGYLQIQDVVKDFGGGAVAVNHVSIDIAQGEIFALLGSSGCGKTTLLRMLAGFETPTSGRIVLNGQDLAGMPPYERPINMMFQSYALFPHLTVWDNIAFGLRRDGMPRDEVAQRVDAMLKLVQLGKYGKRKPHQLSGGQQQRVALARSLAKRPKLLLLDEPLGALDKKLREETQIELVNIIEEVGVTCVMVTHDQEEAMTMASRIAIMSEGKVLQVGAPADVYETPATRFVADFIGNVNLMEGTLSEDHPDHVVISCKDCSHLVGHGITGTEGMTVSVAVRPEKIGLGPDEPPGPHNRARGTIKDLSYFGSFTVYHLQLDSGAVLKISQSNVERHRDVELTWGDTAWASWSPSSQVVLTQ

SEQ ID NO: 66126 - DNA, 1122 bp, Microbulbifer degradans 2-40
  CDS (1)..(1122)
atgactaagaacccgacagcaatagaagacgctggcgatgagcctatcgtacagctacaaaacctcaccaaaacatttggcgctaattacgcagtagatgatattagcctcaccatttacaagggcgaatttttctcgttgcttggcgcatccggttgcggtaaatcgaccctactgcgcatgctcgcgggttttgaacaacccacaagtggacaaatttttatcgacggccaagaaatatctaaagttccggcttataaacgccctattaatatgatgtttcaaaactacgcactgtttccacatatgaacgtagcggacaacattggctttgggctaaagcaagaaggcatgccgcaaaatttgcgcaatgaacgcatcgccgaaatgatgagccttgtgcaaatagaaaaatttgcaaagcgtaaaccacaccaacttagtggcgggcaacgccagcgggttgcacttgcgcgcgcactggcaaaacaccctaaaattttattgttagatgaaccattgggcgcactagacaaaaaattgcgcgaaaaaacgcaatttgaattaatgaacattcaaaaccggttgggcacaacatttatcgtggtaacccacgatcaagaagaagcgatgactatgtcttcgcgtatagcgcttatgcgcgaaggtcgcattgaacaagttgacgccccccgccgcatgtacgagttccccactacgcgttatgcagctgactttattgggctaattaatttatttgagggcaaggtcgttacccaaacaggcgacgaagtaactattagctcagaaaccaccggcggcgatatagtggtgcaccatagccaaccactactaccgggcatggatgtgtgcattgctttgcgcccagaaaaactggtactgcacgcgcaacacgaaaatattcccaaccgcattgaaggtgttattcgcgaaattgcatacctaggcgatgtatctatttaccatgtagagcttgcctctgggtatatcgcgcgttttacccaatcgaatattttagcactagccgagcaaccgttaacatgggggcaaacggtaagtttgggctggcacaaccacagctgcggagtactcacccagtga

SEQ ID NO: 66127 - protein, 373 aa, Microbulbifer degradans 2-40
MTKNPTAIEDAGDEPIVQLQNLTKTFGANYAVDDISLTIYKGEFFSLLGASGCGKSTLLRMLAGFEQPTSGQIFIDGQEISKVPAYKRPINMMFQNYALFPHMNVADNIGFGLKQEGMPQNLRNERIAEMMSLVQIEKFAKRKPHQLSGGQRQRVALARALAKHPKILLLDEPLGALDKKLREKTQFELMNIQNRLGTTFIVVTHDQEEAMTMSSRIALMREGRIEQVDAPRRMYEFPTTRYAADFIGLINLFEGKVVTQTGDEVTISSETTGGDIVVHHSQPLLPGMDVCIALRPEKLVLHAQHENIPNRIEGVIREIAYLGDVSIYHVELASGYIARFTQSNILALAEQPLTWGQTVSLGWHNHSCGVLTQ

SEQ ID NO: 66128 - DNA, 1152 bp, Azotobacter vinelandii AvOP
  CDS (1)..(1152): transl_table=11
atggcgactgtcgccggtgttaacacgaatgctctcgccgccgatcagccggcgaaggaggtgctggtcaggatcgaccgggtgaccaagaagttcgacgccatggtggcggtggacggcatttccctgtccatccacaagggcgagatcttcgccctgctcggcggctccggctgcggcaagtcgaccctgctgcgcatgctcgccggtttcgagcggccgaccgaggggcgcatccatctggaagggcaggacatcaccgagctgccgccctacgagcggccgatcaacatgatgttccagtcctacgcgctgttcccgcacatgagcgtggagcagaacatcgccttcggcctcaagcaggaccgcctgcccagggccgagatcgacgagcgcgtggcggaaatgctcaggctggtgcagatgaccgagtacgcccggcgcaagccccaccagctctccggtggtcagcgccagcgcgtggcgctggcccgttcgctggcgaagcggccgaagttgctgctgctcgacgaaccgatgggcgcgctggacaagaagctgcgctcgcagatgcaactggaactggtgcagatcatcgagcgggtcggcgtgacctgcgtgatggtcacccacgatcaggaggaggcgatgaccatggccgcgcgcatcgccatcatgcatcaggggcggatcgtccaggtcggcagcccgatggacatctacgagagtccggccaaccggttggtctgcgagttcatcggcaacgtcaacctgttcgacggcgaactggtggacgacagccccgaccatgcggtcgtcgcctcgccgcaactggagcggcccatctacatcggccacggcatttccacccgcgccgaggaaaagcgcgtcacctacgccctgcgcccggaaaaggtgctgctcggcgcggacaagcccgagctgcagcacgaggggcacaactggtcgcaggggcgggtgaaggacatcgcctacctgggcgggcattccatgtactacgtcgagctgccctcgggacaggtggtgcaggccttcatggccaatgccgagcgccacggccagcggccgacctggggtgaccaggtgtacgtcagttggctcgacgacagcggggtggtgctgcacgcatga

SEQ ID NO: 66129 - protein, 383 aa, Azotobacter vinelandii AvOP
MATVAGVNTNALAADQPAKEVLVRIDRVTKKFDAMVAVDGISLSIHKGEIFALLGGSGCGKSTLLRMLAGFERPTEGRIHLEGQDITELPPYERPINMMFQSYALFPHMSVEQNIAFGLKQDRLPRAEIDERVAEMLRLVQMTEYARRKPHQLSGGQRQRVALARSLAKRPKLLLLDEPMGALDKKLRSQMQLELVQIIERVGVTCVMVTHDQEEAMTMAARIAIMHQGRIVQVGSPMDIYESPANRLVCEFIGNVNLFDGELVDDSPDHAVVASPQLERPIYIGHGISTRAEEKRVTYALRPEKVLLGADKPELQHEGHNWSQGRVKDIAYLGGHSMYYVELPSGQVVQAFMANAERHGQRPTWGDQVYVSWLDDSGVVLHA

SEQ ID NO: 66130 - DNA, 1161 bp, Burkholderia vietnamiensis G4
  CDS (1)..(1161): transl_table=11
atgaatagccagtcgggcgcgccggtcgcgggtgcgccgtccttcgttccttcttccggcgccgcgtcgcgcgcggagaactttgtccagatcgtcgacgtcgtcaagaagttcggcgaaaccgaagtggtccgcaatgtgaacctcacggtgcgccagggcgagctgttcgcgctgctgggcagctcgggttccggcaagtcgacgctgctgcggatgctcgccggcctcgagacggtcacgtcgggcaagatcctgatcgacggcgaagacctcgcgcaaatgccgccgtacaagcggcccgtgaacatgatgttccagtcgtatgcgctgttcccgcacatgtcggtcgaggcgaacgtcgcgtacggcctgaagcaggaaggcacgccgaaggccgagctgaaggagcgtgtggccgccgcgctcgagctcgtgcagatgagcaagtacgcgaagcgcaagccgcatcagttgtcgggcggccagcagcagcgcgtcgcgctcgcacgctcgctggtcaagcgtccgaaggtgctgctgctcgacgagccgatgtcggcgctcgacaagcagatccgccagcgtacgcagatcgagctcgtcaacatcctgcagaaggtcggcgtcacctgcatcatggtcacgcacgaccaggaagaggcgatgacgatggccaaccggctcgcggtgatgagcgaagggcagatcgtgcagatcggctcgccgagcgaggtctacgaatatccgaacagccgcttctcggccgagttcatcggctcgacgaacctgttcgagggcatcaccgtcgaggacgaacccgactacgtgtacatcgaatcgcccgagctgccgagccggctgtacgtgagccacggcatcaccggcccgctcgggatgccggtcacggtgtcggtgcgccccgagcgcatcgcgctgacccgcaagccgcccgaaggcgcgttcaactgggcgcacggccggatcgccaacgtcgcgtacatgggcggctattcgctgtatcacgtgaagctcgacgcgggcaagacggtgatcgcgaacgtgtcgagcctcgcgatcagcgagctcgaaacgcccgcgctcggcgacgagatctacgtgcgctggagcgcgaccgccggcgtggtgctgacgtcatga

SEQ ID NO: 66131 - protein, 386 aa, Burkholderia vietnamiensis G4
MNSQSGAPVAGAPSFVPSSGAASRAENFVQIVDVVKKFGETEVVRNVNLTVRQGELFALLGSSGSGKSTLLRMLAGLETVTSGKILIDGEDLAQMPPYKRPVNMMFQSYALFPHMSVEANVAYGLKQEGTPKAELKERVAAALELVQMSKYAKRKPHQLSGGQQQRVALARSLVKRPKVLLLDEPMSALDKQIRQRTQIELVNILQKVGVTCIMVTHDQEEAMTMANRLAVMSEGQIVQIGSPSEVYEYPNSRFSAEFIGSTNLFEGITVEDEPDYVYIESPELPSRLYVSHGITGPLGMPVTVSVRPERIALTRKPPEGAFNWAHGRIANVAYMGGYSLYHVKLDAGKTVIANVSSLAISELETPALGDEIYVRWSATAGVVLTS

SEQ ID NO: 66132 - DNA, 1191 bp, Burkholderia vietnamiensis G4
  CDS (1)..(1191): transl_table=11
atgcctgcaatccgtgaagaacgaatggtgaatcccatgcaatcgataccctcttccgctgctgcacgccaggcccagccggccgccgtggcccgttcgaagaacgacgcgttcgtgcgcatcgaaaacgtcgtgaagaagttcggcgacagcacggccgtcgacaacgtgaacctgaccatcgcgaagaacgagctgttcgcgctgctcggcagctcgggctgcggcaagtcgacgttgctgcgcatgctggccggcctcgagacggccacctccggcaagatcttcgtcgacggcgaagacctcgcgtcgctgccgccgtaccgccggccggtgaacatgatgttccagtcgtacgcgctgtttccgcacatgtcggtcgagtcgaacgtcgcgttcgggctcaagcaggaaggcacgccgaagaacgagatcaaggagcgcgtggccgacgcgctcgcgctcgtgcagatgagcaagtacgcgaagcgcaagccgcatcagctgtcgggcggccagcagcagcgcgtcgcgctcgcgcgctcgctggtcaagcggccgaagctgctgctgctcgacgagccgatgtcggcgctcgacaagaagatccgccagaagacccagctcgaactggtgaacatcatcgagaaggtcgacgtgacctgcgtgatggtcacgcacgaccaggaggaagcgatgacgatggcgagccggctcgcggtgatgagcgaaggcaagatcgtgcagatcggcacgcccggcgaagtctacgaatacccgaacagccgcttctcggccgaattcatcggctcgacgaacctgttcgaggggcgcgtggtcgaggacgaacccgatcacatcttcgtcgagagcgacgacctcgaggcgcgcatgtacgtgaaccacggcgtgaccggcccgctcgggatgccggtcggcatctcggtgcgcccggagcgcgtgaacgtgtcgcgcgagaagcccggctcgcatcacaactgggcgcgcggcgtggtgaccgacatcgcgtacatgggcagctactcgctgtatcacgtgcggctgccgagcggcaagacggtcgtgtcgaacctgtcgagctcgaacctgatgcgcgacgatgcgccgtcgtggaacgacgacgtgttcgtgtcgtggtcgccggcgagcggcgtcgtgctgacgcaatga

SEQ ID NO: 66133 - protein, 396 aa, Burkholderia vietnamiensis G4
MPAIREERMVNPMQSIPSSAAARQAQPAAVARSKNDAFVRIENVVKKFGDSTAVDNVNLTIAKNELFALLGSSGCGKSTLLRMLAGLETATSGKIFVDGEDLASLPPYRRPVNMMFQSYALFPHMSVESNVAFGLKQEGTPKNEIKERVADALALVQMSKYAKRKPHQLSGGQQQRVALARSLVKRPKLLLLDEPMSALDKKIRQKTQLELVNIIEKVDVTCVMVTHDQEEAMTMASRLAVMSEGKIVQIGTPGEVYEYPNSRFSAEFIGSTNLFEGRVVEDEPDHIFVESDDLEARMYVNHGVTGPLGMPVGISVRPERVNVSREKPGSHHNWARGVVTDIAYMGSYSLYHVRLPSGKTVVSNLSSSNLMRDDAPSWNDDVFVSWSPASGVVLTQ

SEQ ID NO: 66134 - DNA, 1155 bp, Burkholderia cenocepacia AU 1054
  CDS (1)..(1155): transl_table=11
atgcaatcgataccctcttccgctgctgcacgccagacccaaccggccgccgcgccccgtacgcaaaacgacgcattcgtgcgcatcgaaaacgtcgtgaagaaattcggcgacagcacggccgtcgacaacgtgaacctgacgatcgccaagaacgagctgttcgcgctgctcggcagctcgggctgcggcaagtccacgctgctgcgcatgctcgccgggctggaaacggccacctccggcaagatcttcgtcgacggcgaggatctcgcgtcgctgccgccgtaccgccgcccggtcaacatgatgttccagtcgtacgcgctgttcccgcacatgacggtcgaatcgaacgtcgcgttcggcctgaagcaggaaggcacgccgaaaaacgagatcaaggagcgcgtggccgacgcgctcgcgctcgtgcagatgagcaagtatgcgaagcgcaagccgcaccagctgtccggcggccagcagcagcgcgtcgcgctggcccgctcgctggtgaagcgcccaaagctgctgctgctcgacgagccgatgtccgcgctcgacaagaagattcgccagaagacccagctcgaactcgtgaacatcatcgagaaggtcgacgtgacctgcgtgatggtcacgcacgaccaggaagaggcgatgacgatggcgagccgcctcgcggtgatgagcgagggcaagatcgtgcagatcggctcgcccggcgaagtctacgaatacccgaacagccgcttctccgccgaattcatcggctcgaccaacctgttcgaggggcgcgtggtcgaggacgagcccgatcacatcttcgtcgaaagcgacgacctcgagacgcgcatgtacgtgagccacggcgtgaccggcccgctcgggatgccggtcggcatctcggtgcgcccggagcgcatccacgtatcgcgcgagaagccgggctcgaagcacaactgggcgcgcggcgtcgtcaccgacatcgcgtacatgggcagctattcgctgtaccacgtgcgtctgccgagcggcaagacggtggtgtcgaacctgtcaagctcgcacctgatgaacgacggcgcaccggcgtggaacgacgacgtgttcgtgtcgtggtcgccggccagcggcgtcgtgctgacgcagtga

SEQ ID NO: 66135 - protein, 384 aa, Burkholderia cenocepacia AU 1054
MQSIPSSAAARQTQPAAAPRTQNDAFVRIENVVKKFGDSTAVDNVNLTIAKNELFALLGSSGCGKSTLLRMLAGLETATSGKIFVDGEDLASLPPYRRPVNMMFQSYALFPHMTVESNVAFGLKQEGTPKNEIKERVADALALVQMSKYAKRKPHQLSGGQQQRVALARSLVKRPKLLLLDEPMSALDKKIRQKTQLELVNIIEKVDVTCVMVTHDQEEAMTMASRLAVMSEGKIVQIGSPGEVYEYPNSRFSAEFIGSTNLFEGRVVEDEPDHIFVESDDLETRMYVSHGVTGPLGMPVGISVRPERIHVSREKPGSKHNWARGVVTDIAYMGSYSLYHVRLPSGKTVVSNLSSSHLMNDGAPAWNDDVFVSWSPASGVVLTQ

SEQ ID NO: 66136 - DNA, 1140 bp, Mesorhizobium sp. BNC1
  CDS (1)..(1140): transl_table=11
atggcatcgctgggcagcattcgcaggagctttgcgccctgggcggaccccagtgcaaagccttatattcgcttcgagaatgtgagcaagcgcttcggcgacttcgtcgccgtggatgacctctcgctgacaatttatgagcgcgaattcttcgcgcttctaggcgcttccggctgcggtaagaccacgcttctgcgaatgctggccggtttcgagcagccgacttccgggcgcatcctgctcgacggacaggatctgctcagggtgccgccttaccgccgtcccgtgaatatgatgttccagtcatatgcgctgttcccgcatatgacggtcgaggccaatatcgccttcgggctcaagcaggacgggatgcccaaggcagaaatcgccgggcgcgtggcgcagatgctgaagctcgtgaagctcgagccatttgcgaaacgcaagccgcaccagctttccggcggccagcgtcagcgcgtggcgctggcgcgctccattgcgaaaaggccgaaggtcctgctgctggatgaaccgctgggagcgctggataagaagctccgcgaggagacccagttcgaactgatggatcttcagcacgacctgggcctcaccttcctggtcgtcacgcatgatcaggaagaggcgatgacgatggccgatcggatcgccatcatggataagggccgagtgttacaggtggcaacccccgcggaagtctatgaagcgccggcgtctcgcttcgttgcggattttgtcggttccatcaacatgttcgagggaagattggtgaaggagaacgccggcatcgcccacatccgcgatgcgagcggcgcggaattctgggtgggaggttcgacgcgcgccgcgcccggcgatacggtctggcttgcgatccgcccggaaaagatgcgcgtttcgcgcgaacgcccgccggaggcagaaaacgcgttcaacggtgagatctgggacatcgcctatcttggcgatatgacgatctacaatgtgaggctggatgatggccggattgtcaaggcgagcatgatcaacagcatgcgccggcttgaggatgcgctcacctggcacgaccgggcctggatctccttctcggccgatgccgtcgtgctgctgacggagtag

SEQ ID NO: 66137 - protein, 379 aa, Mesorhizobium sp. BNC1
MASLGSIRRSFAPWADPSAKPYIRFENVSKRFGDFVAVDDLSLTIYEREFFALLGASGCGKTTLLRMLAGFEQPTSGRILLDGQDLLRVPPYRRPVNMMFQSYALFPHMTVEANIAFGLKQDGMPKAEIAGRVAQMLKLVKLEPFAKRKPHQLSGGQRQRVALARSIAKRPKVLLLDEPLGALDKKLREETQFELMDLQHDLGLTFLVVTHDQEEAMTMADRIAIMDKGRVLQVATPAEVYEAPASRFVADFVGSINMFEGRLVKENAGIAHIRDASGAEFWVGGSTRAAPGDTVWLAIRPEKMRVSRERPPEAENAFNGEIWDIAYLGDMTIYNVRLDDGRIVKASMINSMRRLEDALTWHDRAWISFSADAVVLLTE

SEQ ID NO: 66138 - DNA, 1197 bp, Silicibacter sp. TM1040
  CDS (1)..(1197): transl_table=11
atgcacgccccgcccacctcacctacacaagatgacgggccggtaccaaccgcccgcatgggggaaaacttggcaataccggtattcgaaccctggaccgacccacaggctaagccactgattcagttccagaatgtcaccaaacgctttggcgatttcaccgcaatcgacgacctgacaatcgacatctacgagcgtgagttctttgcgcttctggggccgtctggctgtggcaagaccacgatgatgcgaatgttggccgggtttgaaacaccgacagagggaaagatctttctggccgggcaggatatcgcccccgtcccccccaaccagcgcgcggtcaacatgatgtttcagtcctatgcgctgtttccgcatctcagcgtttgggagaatatcgcctttggactcaagcgcgaaggcctgccccgcaatgagatcaacgcacgcgtcgacgagatgctgcgcctgacgcgactcgaaaaatttgcacgtcgcaagcctcatcagatctcgggaggtcagcggcagcgggttgctctggcccgcagtctggcaaaggcacccaaactgctgcttctggatgagcccctcggggcgctcgacaagaaactgcgcgaagaaacgcagttcgagttgatggacatccaggaaaagaccggcaccacatttgtcatcgtgacccacgaccaggaagaagcgatgaccgtcgcaagccgtgtggccgtgatggacaatggcaaggtgatgcaggtcgcaacccccgccgacatctacgaagccccgaattcagtctatgttgctgattttattggcgacgtgaaccttattgagggcaaggcaactgccacgggcgaagatagctacgctctgcattggcgtgagggcgcagccccgctcactgtaaaatcgcccaacaagatctctgacggccagaaagcacatctggccatccgccccgagaaagtgaccatcagttcagaaaagcctgaggccgccgacaatgttgttcagggcaaggtcctcgacattgcatatctcggcaacctttcgacatatcacgtcgagctacccaccggggatgtcatcaaggctcaaacggccaatacgcgccggatttcccgtcgcgcctacacatgggaagacaccgtctggctgtcctggacagccaccggcggtgtcttgttgggggaataa

SEQ ID NO: 66139 - protein, 398 aa, Silicibacter sp. TM1040
MHAPPTSPTQDDGPVPTARMGENLAIPVFEPWTDPQAKPLIQFQNVTKRFGDFTAIDDLTIDIYEREFFALLGPSGCGKTTMMRMLAGFETPTEGKIFLAGQDIAPVPPNQRAVNMMFQSYALFPHLSVWENIAFGLKREGLPRNEINARVDEMLRLTRLEKFARRKPHQISGGQRQRVALARSLAKAPKLLLLDEPLGALDKKLREETQFELMDIQEKTGTTFVIVTHDQEEAMTVASRVAVMDNGKVMQVATPADIYEAPNSVYVADFIGDVNLIEGKATATGEDSYALHWREGAAPLTVKSPNKISDGQKAHLAIRPEKVTISSEKPEAADNVVQGKVLDIAYLGNLSTYHVELPTGDVIKAQTANTRRISRRAYTWEDTVWLSWTATGGVLLGE

SEQ ID NO: 66140 - DNA, 1173 bp, Shewanella denitrificans OS-217
  CDS (1)..(1173): transl_table=11
atgtcaagcacctcgggcactgcccaacacacggcgccgcagccactaacaacacagccactagcaccacagcaagccgccgaaccacaagtgctgctaaagatagatggcgtgagtaagttgtttgatggcgtgcgtgccgtagacaaagtgtcactgactatcaataaaggcgaaatatttgcgttgcttggtggctcaggttctggcaagtcgaccctacttcgcatgcttgcaggctttgagcgccccagtgaaggccgaatttacttggatggcgtagacattaccgacatgccgccttatgagcggccaatcaatatgatgttccagtcctatgcgttatttccgcacatgacggttgagcaaaatattgccttcggcttgaagcaagataaattacctaaggatgaaatcactcagcgagtggcagagatgctcaagctggtgcacatggaaaaatacgctaagcgtaagccgcagcaattgtcaggtggccagcgtcagcgggtggccttggcgcgctcccttgccaaacggcctaagctgttgttattggatgagcccatgggggccttggataaaaaactgcgtactgaaatgcagctcgaagtggtcgaaattctcgagcgtgtcggcgtgacttgcgtcatggtgacccatgatcaagaagaagccatgaccatggcagggcgtatctccatcatgagtgaaggctggatagcccaaactggctcacccatggacatttacgagagccccaatagccgcatgatcgccgaatttatcggtacggttaacttgtttgaaggtgatatcgtcgaagatgaagcggcccatgtgatcatcgcctctaagaccttgtcgcagcagttttatgtggactatggcgtctcgaccagcgtggaagacaagcacgtttggctggcgctgcgtccagagaaaaccattatttgccgtgagcagccagagggtgaatacaactgggccaagggtgtggtgcatgacatcgcctatcttgggggcatttctgtgtactacatcaagcttgaagatggtcaaatcgtgcagtcgagcatggccaaccgtgaacgtcgaagcgatcgcccgacttgggaagaccaagtcttcatcagctgggaggccagcagcggcatggtattaagatcatga

SEQ ID NO: 66141 - protein, 390 aa, Shewanella denitrificans OS-217
MSSTSGTAQHTAPQPLTTQPLAPQQAAEPQVLLKIDGVSKLFDGVRAVDKVSLTINKGEIFALLGGSGSGKSTLLRMLAGFERPSEGRIYLDGVDITDMPPYERPINMMFQSYALFPHMTVEQNIAFGLKQDKLPKDEITQRVAEMLKLVHMEKYAKRKPQQLSGGQRQRVALARSLAKRPKLLLLDEPMGALDKKLRTEMQLEVVEILERVGVTCVMVTHDQEEAMTMAGRISIMSEGWIAQTGSPMDIYESPNSRMIAEFIGTVNLFEGDIVEDEAAHVIIASKTLSQQFYVDYGVSTSVEDKHVWLALRPEKTIICREQPEGEYNWAKGVVHDIAYLGGISVYYIKLEDGQIVQSSMANRERRSDRPTWEDQVFISWEASSGMVLRS

SEQ ID NO: 66142 - DNA, 1137 bp, Shewanella frigidimarina NCIMB 400
  CDS (1)..(1137): transl_table=11
atggtaaacacctcgagcgtcactaataaaccaaccacaaagacgcaagataaagtgctgctcaaaattgagcgtgtcagcaaacttttcgatgatgtgcgcgcagtagacgacgtctcgttaaccattaaccgtggtgaaatatttgcactactgggtggttcaggttcaggtaaatcaaccttgttacgcatgctcgcgggttttgaaaagccaacagaagggcgtatttttcttgatggtgtcgacattactgatatgccaccgtacgaacgccctattaatatgatgttccaatcgtatgctttatttccgcacatgacggttgaacagaatatcgcttttggattgaaacaagacaaaatgccgaaggctgatattgctgtgcgggttaaagaaatgcttaaactggtgcacatggacaaatacggtaaacgtaaaccgcatcagttatcaggtggtcaacgtcagcgtgtcgccttagctcgttcgttagcaaagcggcctaaattattattacttgatgagccaatgggcgcattagataaaaagctgcgtactcaaatgcagttagaagtggtcgatattttagaagccgtaggtgttacctgcgtgatggtaacccatgaccaagaagaagccatgaccatggccggacgtatttcgattatgcatgaaggttggattgcccaaacaggcagcccaatggacatttatgagtcgccagcgagtcgcatggttgcagagtttattggtacggttaatttatttgaaggtgaaattattgaagatgaagttgaccacgcgattattaaatcgccgactttatcgcagcagttttacattggtcacggtatttcaaccagtctagaaaacaaaaatgtattcttggccctacgaccagaaaaaaccattattacccgccaaaagcctgaaagtgaatataactgggctcacggcgtagtgcatgacattgcctatcttggtggtttgtcggtgtattacattaagttaaaaaacaaccaaattgttcaatgctcaatgattaaccgtgaacgccgcgccgatcacccaacgtgggaagacgaggtttacatcagttgggaagacaccagcggggttgtattaaactcatga

SEQ ID NO: 66143 - protein, 378 aa, Shewanella frigidimarina NCIMB 400
MVNTSSVTNKPTTKTQDKVLLKIERVSKLFDDVRAVDDVSLTINRGEIFALLGGSGSGKSTLLRMLAGFEKPTEGRIFLDGVDITDMPPYERPINMMFQSYALFPHMTVEQNIAFGLKQDKMPKADIAVRVKEMLKLVHMDKYGKRKPHQLSGGQRQRVALARSLAKRPKLLLLDEPMGALDKKLRTQMQLEVVDILEAVGVTCVMVTHDQEEAMTMAGRISIMHEGWIAQTGSPMDIYESPASRMVAEFIGTVNLFEGEIIEDEVDHAIIKSPTLSQQFYIGHGISTSLENKNVFLALRPEKTIITRQKPESEYNWAHGVVHDIAYLGGLSVYYIKLKNNQIVQCSMINRERRADHPTWEDEVYISWEDTSGVVLNS

SEQ ID NO: 66144 - DNA, 1161 bp, Burkholderia ambifaria AMMD
  CDS (1)..(1161): transl_table=11
atgaatagccagtcgggtgcgccggttgcgggcgcgccgtccttcgttccttcgtccggcgcgactacgcgcgccgagacctttgtccagatcgtcgacgccgtcaagaaattcggcgagaccgaagtggtgcgcaacgtgaacctgacggtgcgccagggcgagctgttcgcgctgctcggcagctcgggttccggcaagtcgacgctgctgcgcatgctcgcgggcctcgagacggtcacctcgggcaagatcctgatcgacggcgaggacctcgcgcagatgccgccgtacaagcggcccgtgaacatgatgttccagtcgtatgcgctgttcccgcacatgtcggtcgaggcgaacgtcgcctacggcctgaagcaggaaggcacgccgaaggccgagctgaaggagcgcgtcgccgcggcgctcgagctcgtgcagatgagcaagtacgcgaagcgcaagccgcaccagctgtcgggcggccagcagcagcgcgtcgcgctcgcgcgttcgctcgtcaagcgcccgaaggtgctgctgctcgacgagccgatgtcggcgctcgacaagcagatccgccagcgcacgcagatcgagctcgtcaatatcctgaagaaggtcggcgtcacctgcatcatggtcacgcacgaccaggaagaggcgatgacgatggcgaaccggctcgccgtgatgagcgaagggcagatcgtgcagatcggctcgccgaacgaagtctacgaatatccgaacagccgcttctcggccgagttcatcggctcgacgaacctgttcgacggcgtcacggtcgaggacgaacccgactacgtgtatatcgaatccccggagctgccgagccggctgtacgtgagccacgggatcacgggcccgctcgggatgccggtcacggtgtcggtgcgccccgagcgcatcgcgctcacgcgcaagccgcccgaaggcgcgttcaactgggcgcgcggcaggatcaccaacgtcgcgtacatgggcggctattcgctgtatcacgtgaagctcgacgcgggcaagacggtgatcgcgaacgtgtcgagcctcgcgatcaccgagctcgacacgccgtcgctcggcgacgagatctacgtgcgctggagcgcgaccgccggcgtggtgctgacgtcatga

SEQ ID NO: 66145 - protein, 386 aa, Burkholderia ambifaria AMMD
MNSQSGAPVAGAPSFVPSSGATTRAETFVQIVDAVKKFGETEVVRNVNLTVRQGELFALLGSSGSGKSTLLRMLAGLETVTSGKILIDGEDLAQMPPYKRPVNMMFQSYALFPHMSVEANVAYGLKQEGTPKAELKERVAAALELVQMSKYAKRKPHQLSGGQQQRVALARSLVKRPKVLLLDEPMSALDKQIRQRTQIELVNILKKVGVTCIMVTHDQEEAMTMANRLAVMSEGQIVQIGSPNEVYEYPNSRFSAEFIGSTNLFDGVTVEDEPDYVYIESPELPSRLYVSHGITGPLGMPVTVSVRPERIALTRKPPEGAFNWARGRITNVAYMGGYSLYHVKLDAGKTVIANVSSLAITELDTPSLGDEIYVRWSATAGVVLTS

SEQ ID NO: 66146 - DNA, 1137 bp, Shewanella putrefaciens CN-32
  CDS (1)..(1137): transl_table=11
atggcaagcacctcgggcgtcaccaataaacccacaacaaagacgcaagaacatgtactgctcaagattgagcgggtcagtaaattattcgacgatgtacgtgcagttgatgatgtgtcattgacgatcaataaaggtgaaattttcgccttacttggtggttctggatctgggaaatcgactttactgcgtatgctcgcaggctttgaaaaaccgacatcgggccgcatttatcttgatggtgaagatatcaccgacttaccgccctacgaacgtcctatcaatatgatgtttcaatcctatgctttatttccccatatgacggtggcgcaaaatattgcttttggtttgaagcaagacaagctacctaaagctgaaattgagcagcgcgtgcaagagatgcttaaacttgtgcacatggaacaatatggtaagcgtaaacctcaccagttatctggcggtcagcgtcagcgtgttgcgctggcacgctcgcttgctaagcgtcctaaattattgctgcttgatgaacctatgggcgcattggataaaaaactgcgtacccagatgcaactcgaagtggttgaaattcttgagcgtgttggtgtgacttgcgtaatggtgactcacgatcaagaagaagcgatgaccatggccggacggattgccattatgagtgatggctggattgctcaaacaggctcaccgatggacatttacgaaagcccgaacagtcgtatgattgccgagtttattggttcagtgaatttgtttggtggtgaaattgaagtggatgaagttgaccatttgatcattaaacccaatgaattagctcaatctttttatgtcggctacggagtaacgaccagccttgaagataagcatgtatggttagcggtacgccctgaaaagacgataattagccgtgagcaacccgaaggtgaatataattgggcgaaaggtattgtgcatgatatcgcttacttaggtggtatatcagtgtattacattcgcttagagaatggccaaattgtacagtgtagtatgactaaccgtgaacgccgcgccgatcatgctacttgggatgatgaagtgtttatcagttgggaggacaccagtggcgtggtgttgagatcatga

SEQ ID NO: 66147 - protein, 378 aa, Shewanella putrefaciens CN-32
MASTSGVTNKPTTKTQEHVLLKIERVSKLFDDVRAVDDVSLTINKGEIFALLGGSGSGKSTLLRMLAGFEKPTSGRIYLDGEDITDLPPYERPINMMFQSYALFPHMTVAQNIAFGLKQDKLPKAEIEQRVQEMLKLVHMEQYGKRKPHQLSGGQRQRVALARSLAKRPKLLLLDEPMGALDKKLRTQMQLEVVEILERVGVTCVMVTHDQEEAMTMAGRIAIMSDGWIAQTGSPMDIYESPNSRMIAEFIGSVNLFGGEIEVDEVDHLIIKPNELAQSFYVGYGVTTSLEDKHVWLAVRPEKTIISREQPEGEYNWAKGIVHDIAYLGGISVYYIRLENGQIVQCSMTNRERRADHATWDDEVFISWEDTSGVVLRS

SEQ ID NO: 66148 - DNA, 1119 bp, Marinobacter aquaeolei VT8
  CDS (1)..(1119): transl_table=11
gtggccgtaaccaacaacacctccgcgcaagcggaggtgctcctcagcatcaaaggcatttccaagagcttcgacagcaccttggcggtcgacgacgtcagcctggacatccacaagggcgagatctttgcccttctgggtggctccggctctggcaaatccaccctgctacgcatgctggcgggcttcgagaccccggattccggccgcattgtgctggatggtcaggacatcaccgccctgccgccgtacctgcgacccaccaacatgatgttccagtcctatgccctgttcccgcacatgaccgtggagcagaacattgctatgggtctgaaacaggacaagctgccaaagaacgaaatcaccgaccgtgtggccgccatgctcaagctggtgaagatggagccctacgccaggcgcaagccgcagcagctctcaggtggccagcagcagcgtgtggccctggcccgctcgctggcaaagcgaccaaagttgctgctgctggacgagcccatgggcgcactggacaaaaaactgcgcaccgaaatgcagctggaactggtggatattctggagaaggtgggcgtgacctgcctgatggtcacccacgaccaggaagaagccatgaccatggccagccggatagccattatgtcccacggccggatcgctcaggtgggttcgcccattgatatctacgaaagcccgaacagccgcatgacggcggagtttatcggctccgtgaatatctttgaggcgaacattctggaagacaattccgacagcctgtctctggccagcgagctgctggacgcaccggtgtttattgaccgcggtgtaaccacgccggcggaaaccacggaaaccctgatcgccctgcgcccggagaagatctacctgacgaccgagaagcccgaaggcgatagcaactggagctgcggcacggtggacaacattgcttacctgggggacatcacgtcttactacgtgaagctcgccagcggcaagcgggtgcaggccaccatggccaacgtggagcgccggggcgagcggcccacctggggtgaccgggtgtatgtgtcctgggaagcttccagtcctatcctgctctggaactga

SEQ ID NO: 66149 - protein, 372 aa, Marinobacter aquaeolei VT8
MAVTNNTSAQAEVLLSIKGISKSFDSTLAVDDVSLDIHKGEIFALLGGSGSGKSTLLRMLAGFETPDSGRIVLDGQDITALPPYLRPTNMMFQSYALFPHMTVEQNIAMGLKQDKLPKNEITDRVAAMLKLVKMEPYARRKPQQLSGGQQQRVALARSLAKRPKLLLLDEPMGALDKKLRTEMQLELVDILEKVGVTCLMVTHDQEEAMTMASRIAIMSHGRIAQVGSPIDIYESPNSRMTAEFIGSVNIFEANILEDNSDSLSLASELLDAPVFIDRGVTTPAETTETLIALRPEKIYLTTEKPEGDSNWSCGTVDNIAYLGDITSYYVKLASGKRVQATMANVERRGERPTWGDRVYVSWEASSPILLWN

SEQ ID NO: 66150 - DNA, 1119 bp, Actinobacillus actinomycetemcomitans
  CDS (1)..(1119): transl_table=11
gtggaaaatacagttcaaaacaagccaattatcgagcttcgttccattactaaatcctacggttccaacaccattattaaagacttcaatttaaccattaataacggtgaatttttgacaattctcggcccctccggctgcggcaaaacaacggtattgcgtttgcttgcaggcttggaagaattagattcgggcaacatcattttagacggtgaagacatcaccaacgtgccggcagagaaacgccacgttaacaccgtattccaaagctacgcactttttccgcacatgaccatctttgaaaacgtcgctttcggtttgcgtatgcaaaaagtgccggaggcggaaattaaaccgcgcgtgttagaagccctacgcatggtgcaattagaagaaatggcggatcgtaagccgacccagctttccggtggccagcaacaacgtattgccattgcccgggcggttgtaaataaacctaaagtgttattactcgacgaatccctctccgcgttggactacaaattgcgtaaacaaatgcaatacgaactgaaagtgttgcagcgccagttaggtatcacatttatttttgtaacccacgatcaggaagaagcgattaccatgtccgaccgtattgtgttgttacgtaaaggtaaaatcgcacaagacggttcgccgcgtgaaatttacgaagaacctgcaaacctgttcgtcgcacgttttatcggcgaaattaatgtgtttgatgccactgtgattgaacgtaaatcggaaaatgtggtgttggcgaacgtggaaggtcgcgtttgtgatatttatacggacattccggtgaaaaaagatcagcagcttcaagtgttgcttcgtcccgaagatattgtaattaaagaacttgacgagcatgaacattccaaagccattatcggtcatattatcgaccgcacttataaaggcatgaccttagaatccaccgtggaatttgaacaaaacggcaaacgcgggctggtcagcgaattctttaacgaagatgatcctcacatggatcacagtattggtcaacgtgtaggcattacatggcacgaaggttgggaggttgtactcaacgatgaagataatcaataa

SEQ ID NO: 66151 - protein, 372 aa, Actinobacillus actinomycetemcomitans
MENTVQNKPIIELRSITKSYGSNTIIKDFNLTINNGEFLTILGPSGCGKTTVLRLLAGLEELDSGNIILDGEDITNVPAEKRHVNTVFQSYALFPHMTIFENVAFGLRMQKVPEAEIKPRVLEALRMVQLEEMADRKPTQLSGGQQQRIAIARAVVNKPKVLLLDESLSALDYKLRKQMQYELKVLQRQLGITFIFVTHDQEEAITMSDRIVLLRKGKIAQDGSPREIYEEPANLFVARFIGEINVFDATVIERKSENVVLANVEGRVCDIYTDIPVKKDQQLQVLLRPEDIVIKELDEHEHSKAIIGHIIDRTYKGMTLESTVEFEQNGKRGLVSEFFNEDDPHMDHSIGQRVGITWHEGWEVVLNDEDNQ

SEQ ID NO: 66152 - DNA, 1128 bp, Rhizobium sp
  CDS (1)..(1128): transl_table=11
atgaaccccgagccgcgcatcaacggcgatctcgtacgcttcgaaggcgtggagaaaacatatgacggtgtgaccatcgtcgtcgagcgattggacttggcgatccgccgcggggagttcttgacgatgctgggaccttccggttcagggaaaactacgtcccttatgatgctggctggcttcgaaatgcctaccgcgggcaggatcattctagacggcaagccgatcgaacggctgccgcctcaccaacgcaacatcggcgtcgtttttcagaactacgccctgtttcccaatatgacagtcgcggagaacgtcgcgtttccgcttcagatgaggaaggtcgaaaaagccgaccagaaggcgagggtcgaggccgcgctcgacatggttcagatggccaagttcgccggccgcaggccggcgcagctttccggaggccaacagcagcgcatcgcgctggctcgcgcgctcgtcttcgagccgtccctcgtgctcatggacgagccgctcggagccttggacaagcagctccgcgagcacatgcagatcgagatcaagcacctccacgagcggctcgggatcacgatcgtctacgtcactcacgatcaaagcgaggcgttgacgatgtccgaccgcatcgcggtgttcgacaagggacggatccagcagttgggcaagcccgccgacgtctacgaacgtcctgccaacccattcgtggcccagttcattggcgacaacaacgcgcttcacggcaccatcctcgacgtctcgggtccgcattgcacggtccagatcgacggtgatcgccagacgataaaggcggcagtgggcgcaccgcttgcagccggcgagaaaacgaccctgtcaatccgtccggaaaggataaggatcggccacacctccgacagggcgaacaacatcaaagccagtgtcagagagctcatctatctcggcgaccatgtccgggtgagggtggcggcgctcggttccgaagaaatcatcatcaagatcccgaatggccacggtgtcccggcagacgtgtcgcccggcgcaaacgtgctcatcggctggaatttcgacgactgccccgcgctcactcgcgagcacgcggcgacggcgaaagcatga

SEQ ID NO: 66153 - protein, 375 aa, Rhizobium sp
MNPEPRINGDLVRFEGVEKTYDGVTIVVERLDLAIRRGEFLTMLGPSGSGKTTSLMMLAGFEMPTAGRIILDGKPIERLPPHQRNIGVVFQNYALFPNMTVAENVAFPLQMRKVEKADQKARVEAALDMVQMAKFAGRRPAQLSGGQQQRIALARALVFEPSLVLMDEPLGALDKQLREHMQIEIKHLHERLGITIVYVTHDQSEALTMSDRIAVFDKGRIQQLGKPADVYERPANPFVAQFIGDNNALHGTILDVSGPHCTVQIDGDRQTIKAAVGAPLAAGEKTTLSIRPERIRIGHTSDRANNIKASVRELIYLGDHVRVRVAALGSEEIIIKIPNGHGVPADVSPGANVLIGWNFDDCPALTREHAATAKA

SEQ ID NO: 66154 - DNA, 1083 bp, Rhizobium sp
  CDS (1)..(1083): transl_table=11
atgagcaaacccttcctgcaaatccgcggcatccgcaaggaatacgggcctgtcaccgccgttcacgacgtcaatctcgacgtggcgcagggggagttcctgaccttcctcgggccctccggctcgggaaagagcacgacgctctatattctcgccggcttcgaggatccgacccgcggcgacatcatgctgaacggccagtcgctgctgtcgacgccgtcgcacaagcgcaatatcggcatggtgttccagcgctatacgcttttcccgcatctctccgtcggcgagaacatcgccttcccgctgaaggtcaggcggcttccgaaggccgagatcgatgccaaggtgcgcgacatgctgaagctcgtgcggctcgaaggcttcgaggaccgcaagccggcgcagatgtccggtggccagcagcagcgcgttgcgctggcccgcgcgctcgcctacgacccgccggtcctgctgatggacgagccgctttcggcgctcgacaagaagctcagagaggaaatccagcacgagatccgccgcatccaccagcagaccgaggtgacgatcctctatgtcacccatgaccaggaggaggcgctgcggctttccgaccggattgccgtcttttcgaagggggtgatcgaccagatcggcacggggccggaactctatgccaacccggcgacccgtttcgtcgccgagttcatcggcgacagcgatttcctgccctgcgacctggtgacggcggcaaacggcagggcggacatcgcgctcgccggcacgacggtcatcccgaacgttccgatgcacggcaaggcggtcgcaggcggcaaggcggcgctgatgctgcggccggaacgcttgcggctgatgcgatcggcgccggggggcgcgacagcgcttcccgtcacggtcagcgacatcaccttcctcggcaacaacatccatgtcgcgactgagaccgcaaagggcgacgcgctggcggtccgccttcccttcggccatgaggcgatttccagcctcaaccgcggcgacagcgtctggctcggcttcgacccggcctcggcacacgtcttctgctga

SEQ ID NO: 66155 - protein, 360 aa, Rhizobium sp
MSKPFLQIRGIRKEYGPVTAVHDVNLDVAQGEFLTFLGPSGSGKSTTLYILAGFEDPTRGDIMLNGQSLLSTPSHKRNIGMVFQRYTLFPHLSVGENIAFPLKVRRLPKAEIDAKVRDMLKLVRLEGFEDRKPAQMSGGQQQRVALARALAYDPPVLLMDEPLSALDKKLREEIQHEIRRIHQQTEVTILYVTHDQEEALRLSDRIAVFSKGVIDQIGTGPELYANPATRFVAEFIGDSDFLPCDLVTAANGRADIALAGTTVIPNVPMHGKAVAGGKAALMLRPERLRLMRSAPGGATALPVTVSDITFLGNNIHVATETAKGDALAVRLPFGHEAISSLNRGDSVWLGFDPASAHVFC

SEQ ID NO: 66156 - DNA, 1188 bp, Rhizobium loti
  CDS (1)..(1188): transl_table=11
atgcccagaggtgaaccgctgcggttagagcgactttgtaaacagtacggcagcgtgcgaggggttaatgacttgtcggttcaaatcgaggccggcgaatttgtctcatttctcggaccaagtggttccggcaagacgacaacgttgatgatggtcgcggggttcgaaacgcccacctccggccaaatctttgtcggcgcccgaccaataaccgggctacccgtgcctagacgcaacatcggagttgtattccagaattatgcgctatttccacatctatccgttttcgagaacgtggcatttgcgctcaagatgcgcagagtatccggctctgaacttcgagccggtgtcgccgaagcgctcgatcttgttcaactgagcggctatgaagcgcggatgccgcacgagttatccggcggccaacagcagcgagttgccttggctcgcgcacttgtgtttcgcccaggcgtagtcctcatggacgaaccgcttggtgcgcttgacaaacagcttcgcgagcatatgcagcttgagctgaagcgccttcagaagtcccttggaataactgtggtcttcgtcacacacgatcaaagtgaagcgctcacgatgtctgatcgaatcgtggtgatgaataagggcaacgtcgagcaaatcgggacgcctgaagaaatatatgagactccgcaaacgcgcttcgttgcaggtttcatcggcgagtccaatttccttcgcactcatattgttgaaagtagaaaagacggccctctccttgacctggccggcctgcaaattcgagcgatgtggcagggatccgatagcctgcagggggctgtgaccctcatgatccgacccgacaagatcatccctctcgaccccggcgttcgcactgataatgaattcgaaggtgtggtcgaagaggccgtctaccagggaaatgtcattaagtatcgtattcggttacgtgcaaagattccagtgtttctcactttagcagcaccgagccacgcccgatctcagcgattccatgtcgaccaacaagttagaattggctgggacgcgcgggatggacgacttctttctgatgagggggaacaatcaatccccggcaaacccaataatcgcgtcgcggtgtcagctttcgcgggcgttactgcaactgcagatcgtatggcaatcgtatctttataa

SEQ ID NO: 66157 - protein, 395 aa, Rhizobium loti
MPRGEPLRLERLCKQYGSVRGVNDLSVQIEAGEFVSFLGPSGSGKTTTLMMVAGFETPTSGQIFVGARPITGLPVPRRNIGVVFQNYALFPHLSVFENVAFALKMRRVSGSELRAGVAEALDLVQLSGYEARMPHELSGGQQQRVALARALVFRPGVVLMDEPLGALDKQLREHMQLELKRLQKSLGITVVFVTHDQSEALTMSDRIVVMNKGNVEQIGTPEEIYETPQTRFVAGFIGESNFLRTHIVESRKDGPLLDLAGLQIRAMWQGSDSLQGAVTLMIRPDKIIPLDPGVRTDNEFEGVVEEAVYQGNVIKYRIRLRAKIPVFLTLAAPSHARSQRFHVDQQVRIGWDARDGRLLSDEGEQSIPGKPNNRVAVSAFAGVTATADRMAIVSL

SEQ ID NO: 66158 - DNA, 1143 bp, Pseudomonas fluorescens
  CDS (1)..(1143): transl_table=11
atggcagttgcctccggcgcctataagaaagccctcgagggcgaccagacacccaagcaggtgttggtcaaaatcgaccgggtcacgaagaagttcgacgagacgattgccgtggacgatgtgtccctggaaatcaagaaaggcgagatcttcgccttgctcggcggttcgggatcgggcaaatccaccttgctgcgcatgctggccggtttcgagcggcccaccgaagggcggatttacctcgacggtgtggacatcaccgacatgccgccctacgagcggccgatcaacatgatgttccagtcctacgccttgttcccccacatgaccgtggcgcagaacattgccttcggcttgcagcaggacaagatcccgaaagccgaggtcgatgcccgcgtggctgaaatgctcaagctggtgcagatgagccagtacgccaagcgcaagccacaccagctctccggcggccagcgccagcgcgtggccctggcccgttccctggccaagcggccgaagctgttgttgctcgacgagccgatgggggccctggacaagaagctgcgctcgcaaatgcaacttgagctggtggagatcatcgagcgggttggcgtgacttgcgtcatggtgacccacgatcaggaagaggccatgaccatggccgagcgcatcgcgatcatgcacctgggctggatcgcccagatcggcagcccgatcgacatctacgaaaccccgaccagccggctggtctgcgagttcatcggcaacgtcaacatcttcgagactgaagtggtggacgacgccgaaggccacgcggtgctgacctgcaaggacctggaccgcaacatctacgtgggccacggcatcagcacctcggtgcaggacaagtcggtgacctacgccatccgcccggaaaaactgctggtcaccgccgaacaaccgacctgcgagaacaactggtccagcggcaaggtccatgacatcgcgtacctgggtggccactcggtgttctacgtcgcgttgccgagcggcaagctggtgcagtccttcgtcgccaacgccgaacgccgcggccagcgtccgacttggggcgaccaggtattcgtctggtgggaagacgacagcggcgtggtgcttcgctcatga

SEQ ID NO: 66159 - protein, 380 aa, Pseudomonas fluorescens
MAVASGAYKKALEGDQTPKQVLVKIDRVTKKFDETIAVDDVSLEIKKGEIFALLGGSGSGKSTLLRMLAGFERPTEGRIYLDGVDITDMPPYERPINMMFQSYALFPHMTVAQNIAFGLQQDKIPKAEVDARVAEMLKLVQMSQYAKRKPHQLSGGQRQRVALARSLAKRPKLLLLDEPMGALDKKLRSQMQLELVEIIERVGVTCVMVTHDQEEAMTMAERIAIMHLGWIAQIGSPIDIYETPTSRLVCEFIGNVNIFETEVVDDAEGHAVLTCKDLDRNIYVGHGISTSVQDKSVTYAIRPEKLLVTAEQPTCENNWSSGKVHDIAYLGGHSVFYVALPSGKLVQSFVANAERRGQRPTWGDQVFVWWEDDSGVVLRS

SEQ ID NO: 66160 - DNA, 1119 bp, Photobacterium profundum
  CDS (1)..(1119): transl_table=11
ttgaacgcttcaacaacatctaagaaaccagtcattcagcttaaagggttaaacaagagcttcgatggtaagcaaattattgctggtttggatctaaatgttaatgatggtgaatttttaaccatcttaggtccatcaggttgtggtaaaaccacagtacttcgtcttattgctggttttgaaaactctgacgctggtcaggttattattgccaataaggatgttactcaggttccagctgaacaacgccatgtcaatacggtgtttcaaagctatgcactgttcccccatatgacagtatttgagaatgttgcgtttggtttacgcatgcaaaaagtaagcgagagtgaaatagagcctcgtgttatggatgcattgcgcatggtacagcttgataagtttgcacctcgtaagcctcatcagttgtctggtggacagcaacagcgagttgcaatagcgcgtgccgttgtaaacaaaccaaaagtattattattagatgaatcactctctgctcttgattacaaattacgtaaacaaatgcagctcgagctaaaacaactgcaaagaaaattaggcattacgtttattttcgttacgcacgatcaagaagaagcattgtcgatgtctgatcgtattattgttatgcgtgacggtaatattgaacaagatggctctccacgtgaaatatatgaagaacccactaacttgtttgttgcgcgcttcattggtgaaatcaacgtttttgatgctaccgtaaaagaacgtttagacgaaaaacgtattatggcagaggttgaaggtcgtacagcacagattcactgtgagcttgcagtcaaaaccggcgacaaactgaaagtactgctacgccctgaagatattcgccttgaagagatcaacaacgatgaacatgctaaaggtattatcggttacgtgcgtgaacgtacctataaagggatgacactcgattcagtcatagaattagaatcaggcatgtcagtaatggtaagtgagttctttaacgaagatgatccagacgttgaccactcactcaatcaaaaagttgctgtaacttgggtagaaagctgggaagtggtattagctgatgaacaagaagcttaa

SEQ ID NO: 66161 - protein, 372 aa, Photobacterium profundum
MNASTTSKKPVIQLKGLNKSFDGKQIIAGLDLNVNDGEFLTILGPSGCGKTTVLRLIAGFENSDAGQVIIANKDVTQVPAEQRHVNTVFQSYALFPHMTVFENVAFGLRMQKVSESEIEPRVMDALRMVQLDKFAPRKPHQLSGGQQQRVAIARAVVNKPKVLLLDESLSALDYKLRKQMQLELKQLQRKLGITFIFVTHDQEEALSMSDRIIVMRDGNIEQDGSPREIYEEPTNLFVARFIGEINVFDATVKERLDEKRIMAEVEGRTAQIHCELAVKTGDKLKVLLRPEDIRLEEINNDEHAKGIIGYVRERTYKGMTLDSVIELESGMSVMVSEFFNEDDPDVDHSLNQKVAVTWVESWEVVLADEQEA

SEQ ID NO: 66162 - DNA, 1137 bp, Escherichia coli O157
  CDS (1)..(1137): transl_table=11
atgggacagagtaaaaaattgaataaacaaccgagttcgctttcaccgctggtgcaattggcgggaattcgcaaatgctttgatggtaaagaggtcattccccagctggatctgactatcaacaatggcgagttcctcacgctgcttggcccttctggctgcggtaaaacaaccgttcttcgcctgattgcaggtctggaaactgttgattccggacgcatcatgttggataacgaggacatcacccacgttccggcggaaaaccgctatgtgaacactgttttccaaagctacgcacttttcccccacatgaccgtgttcgaaaatgtggcctttgggttgcgcatgcaaaaaacccccgctgctgaaattacgccccgcgtgatggaagccctgcggatggtgcagctggaaaccttcgctcaacgtaaaccgcatcagctctctggtggtcaacagcaacgcgtcgccattgctcgcgcggtggttaacaagcctcgtctgttgttgctggatgagtcgctctcagcgctggattacaaactgcgtaagcaaatgcagaacgagctgaaagcgttacagcgtaagcttggcattacattcgtcttcgtgactcacgatcaggaagaagcactcaccatgtcagacaggattgtggtgatgcgcgatggtcgcattgagcaagacggcacgccgcgtgaaatctacgaagagccgaaaaacctgtttgttgccgggttcattggcgaaatcaatatgtttaacgccactgtcatcgaacgtctcgacgagcagcgcgtacgcgccaacgttgaaggccgcgaatgtaatatctacgttaacttcgccgttgaaccggggcaaaaactgcatgttctgctgcgcccggaagacttacgtgttgaagagattaacgacgacaaccacgctgaagggctgattggttacgttcgcgagcgtaactacaaaggcatgacgctggagtcggttgttgaactggaaaatggcaagatggtgatggtcagcgaattcttcaatgaagacgatcctgactttgaccactctctcgaccaaaaaatggccattaattgggtagaaagctgggaggtcgtactggctgatgaagaacacaagtaa

SEQ ID NO: 66163 - protein, 378 aa, Escherichia coli O157
MGQSKKLNKQPSSLSPLVQLAGIRKCFDGKEVIPQLDLTINNGEFLTLLGPSGCGKTTVLRLIAGLETVDSGRIMLDNEDITHVPAENRYVNTVFQSYALFPHMTVFENVAFGLRMQKTPAAEITPRVMEALRMVQLETFAQRKPHQLSGGQQQRVAIARAVVNKPRLLLLDESLSALDYKLRKQMQNELKALQRKLGITFVFVTHDQEEALTMSDRIVVMRDGRIEQDGTPREIYEEPKNLFVAGFIGEINMFNATVIERLDEQRVRANVEGRECNIYVNFAVEPGQKLHVLLRPEDLRVEEINDDNHAEGLIGYVRERNYKGMTLESVVELENGKMVMVSEFFNEDDPDFDHSLDQKMAINWVESWEVVLADEEHK

SEQ ID NO: 66164 - DNA, 1137 bp, Salmonella typhimurium
  CDS (1)..(1137): transl_table=11
atgggacagagtaagaaattgaataatcaaccgcgttcgctttcaccgctggtgcttttgtcgggaattagcaaaagtttcgatggcaaagaggtcatttcgcaactggatttgaccattaacaatggcgaattcctcacgctgcttggcccttccggctgcggtaaaacaaccgttcttcgcctgattgccggcctggaaaccgttgatgccgggcatatcatgttggataaccaggatatcacccacgttcccgccgaaaatcgttatgtaaataccgtatttcaaagctacgctttatttccgcatatgacggtgtttgaaaatgtcgcgtttggcttacggatgcaaaaaacgccagccgccgagatagcgcctcgcgtgaccgatgcgctgcgtatggtgcagcttgaagagtttgcacaacgtaaaccgcaccagctttccggcggacagcagcagcgtgtggctatcgctcgcgcggtggtgaataaacctcgcctgttattactggatgaatcgctttccgcgctggactataaattgcgcaaacaaatgcagaacgagcttaaagcattacagcgtaaactcggtatcacgtttgtttttgtcactcacgatcaggaagaagcgctcaccatgtccgatcgtatcgtggtaatgcgtaatggcgtgattgagcaagacggcacgccgcgtgaaatctatgaagagccaaaaaacctgtttgtcgccggttttatcggcgaaattaaccgctttgacgcaaccgtcattgaacggcttgatgaacagcgcgtccgcgccagcgtagaaggtcgggagtgcaatatatacgtcaatttcgctgtcgaaccaggccaaaaactgaacgtcctgctgcgaccggaagatctacgcgtcgaagagatcaacgatgataaccacatcgaagggcttatcggctacgtgcgcgagcgcaattataaaggtatgacgctggagtcggtggttgaactggaaaatggcaaaatggtgatggtcagcgaattcttcaacgaagacgatcctgacttcgaccattcacttgaccaaaaaatggccattagttgggtagaaagctgggaggtcgtactggctgatgaagaacacaagtaa

SEQ ID NO: 66165 - protein, 378 aa, Salmonella typhimurium
MGQSKKLNNQPRSLSPLVLLSGISKSFDGKEVISQLDLTINNGEFLTLLGPSGCGKTTVLRLIAGLETVDAGHIMLDNQDITHVPAENRYVNTVFQSYALFPHMTVFENVAFGLRMQKTPAAEIAPRVTDALRMVQLEEFAQRKPHQLSGGQQQRVAIARAVVNKPRLLLLDESLSALDYKLRKQMQNELKALQRKLGITFVFVTHDQEEALTMSDRIVVMRNGVIEQDGTPREIYEEPKNLFVAGFIGEINRFDATVIERLDEQRVRASVEGRECNIYVNFAVEPGQKLNVLLRPEDLRVEEINDDNHIEGLIGYVRERNYKGMTLESVVELENGKMVMVSEFFNEDDPDFDHSLDQKMAISWVESWEVVLADEEHK

SEQ ID NO: 66166 - DNA, 20 bp, Artificial sequence
  Primer sequence
atgccggaggggcgcaccac

SEQ ID NO: 66167 - DNA, 23 bp, Artificial sequence
  Primer sequence
ttaaaccgtcagcaccacacagc

SEQ ID NO: 66168 - protein, 336 aa, Artificial sequence
  Consensus
  Variant (2)..(11): Xaa in position 2 to 11 is any amino acid
  Variant (12)..(18): Xaa in position 12 to 18 is any or no amino acid
  Variant (20)..(23): Xaa in position 20 to 23 is any amino acid
  Variant (26)..(29): Xaa in position 26 to 29 is any amino acid
  Variant (32)..(32): Xaa in position 32 is any amino acid
  Variant (35)..(35): Xaa in position 35 is any amino acid
  Variant (38)..(38): Xaa in position 38 is any amino acid
  Variant (40)..(40): Xaa in position 40 is any amino acid
  Variant (42)..(44): Xaa in position 42 to 44 is any amino acid
  Variant (47)..(52): Xaa in position 47 to 52 is any amino acid
  Variant (54)..(54): Xaa in position 54 is any amino acid
  Variant (56)..(58): Xaa in position 56 to 58 is any amino acid
  Variant (60)..(65): Xaa in position 60 to 65 is any amino acid
  Variant (66)..(68): Xaa in position 66 to 68 is any or no amino acid
  Variant (70)..(72): Xaa in position 70 to 72 is any amino acid
  Variant (74)..(78): Xaa in position 74 to 78 is any amino acid
  Variant (81)..(81): Xaa in position 81 is any amino acid
  Variant (88)..(89): Xaa in position 88 to 89 is any amino acid
  Variant (91)..(92): Xaa in position 91 to 92 is any amino acid
  Variant (94)..(94): Xaa in position 94 is any amino acid
  Variant (97)..(97): Xaa in position 97 is any amino acid
  Variant (99)..(109): Xaa in position 99 to 109 is any amino acid
  Variant (110)..(115): Xaa in position 110 to 115 is any or no amino acid
  Variant (117)..(119): Xaa in position 117 to 119 is any amino acid
  Variant (121)..(122): Xaa in position 121 to 122 is any amino acid
  Variant (124)..(130): Xaa in position 124 to 130 is any amino acid
  Variant (131)..(132): Xaa in position 131 to 132 is any or no amino acid
  Variant (134)..(134): Xaa in position 134 is any amino acid
  Variant (136)..(137): Xaa in position 136 to 137 is any amino acid
  Variant (143)..(143): Xaa in position 143 is any amino acid
  Variant (148)..(148): Xaa in position 148 is any amino acid
  Variant (151)..(155): Xaa in position 151 to 155 is any amino acid
  Variant (157)..(158): Xaa in position 157 to 158 is any amino acid
  Variant (161)..(161): Xaa in position 161 is any amino acid
  Variant (165)..(166): Xaa in position 165 to 166 is any amino acid
  Variant (170)..(171): Xaa in position 170 to 171 is any amino acid
  Variant (174)..(178): Xaa in position 174 to 178 is any amino acid
  Variant (180)..(187): Xaa in position 180 to 187 is any amino acid
  Variant (189)..(189): Xaa in position 189 is any amino acid
  Variant (191)..(193): Xaa in position 191 to 193 is any amino acid
  Variant (199)..(199): Xaa in position 199 is any amino acid
  Variant (202)..(206): Xaa in position 202 to 206 is any amino acid
  Variant (208)..(213): Xaa in position 208 to 213 is any amino acid
  Variant (215)..(217): Xaa in position 215 to 217 is any amino acid
  Variant (219)..(221): Xaa in position 219 to 221 is any amino acid
  Variant (223)..(225): Xaa in position 223 to 225 is any amino acid
  Variant (227)..(228): Xaa in position 227 to 228 is any amino acid
  Variant (230)..(232): Xaa in position 230 to 232 is any amino acid
  Variant (234)..(234): Xaa in position 234 is any amino acid
  Variant (236)..(236): Xaa in position 236 is any amino acid
  Variant (238)..(238): Xaa in position 238 is any amino acid
  Variant (240)..(241): Xaa in position 240 to 241 is any amino acid
  Variant (242)..(243): Xaa in position 242 to 243 is any or no amino acid
  Variant (245)..(255): Xaa in position 245 to 255 is any amino acid
  Variant (256)..(293): Xaa in position 256 to 293 is any or no amino acid
  Variant (297)..(314): Xaa in position 297 to 314 is any amino acid
  Variant (315)..(335): Xaa in position 315 to 335 is any or no amino acid
KXXXXXXXXXXXXXXXXXLXXXXGEXXXXLGXSGXGKXTXLXXXAGXXXXXXGXIXXXGXXXXXXXXXPXXXRXXXXXFQXYALFPHXXVXXNXAFXLXXXXXXXXXXXXXXXXXVXXXLXXVXXXXXXXXXRXPXXLSGGQXQRVAXARXXXXXPXXLLXDEPXXALDXXLRXXXXXEXXXXXXXXGXTXXXVTHDQXEAXXXXXRXXXXXXGXXXQXXXPXXXYXXPXXXFXAXFXGXXXXNXXXXXXXXXXXXXXXXXXXXXXXXXXXXXXXXXXXXXXXXXXXXXXXXXRPEXXXXXXXXXXXXXXXXXXXXXXXXXXXXXXXXXXXXXXXG

SEQ ID NO: 66169 - protein, 34 aa, Artificial sequence
  Consensus
  Variant (2)..(2): Xaa in position 2 is Phe, Ile or Leu
  Variant (3)..(3): Xaa in position 3 is Phe, Ile, Leu, Met or Val
  Variant (4)..(4): Xaa in position 4 is Ala, Cys, Ser, Thr or Val
  Variant (5)..(5): Xaa in position 5 is Phe, Ile, Leu or Met
  Variant (8)..(8): Xaa in position 8 is Ala, Gly, Pro or Ser
  Variant (11)..(11): Xaa in position 11 is Cys or Ser
  Variant (14)..(14): Xaa in position 14 is Ser or Thr
  Variant (16)..(16): Xaa in position 16 is any or no amino acid
  Variant (18)..(20): Xaa in position 18 to 20 is any amino acid
  Variant (21)..(21): Xaa in position 21 is any or no amino acid
  Variant (24)..(24): Xaa in position 24 is Phe, Leu or Met
  Variant (25)..(29): Xaa in position 25 to 29 is any amino acid
  Variant (31)..(31): Xaa in position 31 is any amino acid
  Variant (32)..(32): Xaa in position 32 is Phe, Ile, Leu or Val
  Variant (33)..(33): Xaa in position 33 is any amino acid
  Variant (34)..(34): Xaa in position 34 is Phe, Ile, Leu, Met or Val
EXXXXLGXSGXGKXTXLXXXXAGXXXXXXGXXXX

SEQ ID NO: 66170 - protein, 30 aa, Artificial sequence
  Consensus
  Variant (2)..(3): Xaa in position 2 to 3 is any amino acid
  Variant (4)..(4): Xaa in position 4 is any or no amino acid
  Variant (6)..(9): Xaa in position 6 to 9 is any amino acid
  Variant (10)..(10): Xaa in position 10 is Leu, Met or Val
  Variant (13)..(13): Xaa in position 13 is any amino acid
  Variant (19)..(19): Xaa in position 19 is any amino acid
  Variant (20)..(20): Xaa in position 20 is Leu or Met
  Variant (21)..(21): Xaa in position 21 is Asp, Asn, Ser or Thr
  Variant (22)..(22): Xaa in position 22 is Ala, Ile, Leu or Val
  Variant (23)..(24): Xaa in position 23 to 24 is any amino acid
  Variant (26)..(26): Xaa in position 26 is Ile, Leu or Val
  Variant (27)..(28): Xaa in position 27 to 28 is any amino acid
  Variant (29)..(29): Xaa in position 29 is Ala, Gly or Pro
PXXXRXXXXXFQXYALFPXXXXXXNXXXXL

SEQ ID NO: 66171 - protein, 37 aa, Artificial sequence
  Consensus
  Variant (5)..(6): Xaa in position 5 to 6 is any or no amino acid
  Variant (8)..(9): Xaa in position 8 to 9 is any or no amino acid
  Variant (12)..(12): Xaa in position 12 is Ile, Leu or Val
  Variant (15)..(15): Xaa in position 15 is Ala or Ser
  Variant (16)..(16): Xaa in position 16 is Ile, Leu, Met or Val
  Variant (17)..(17): Xaa in position 17 is Ala, Ile or Val
  Variant (18)..(19): Xaa in position 18 to 19 is any amino acid
  Variant (21)..(22): Xaa in position 21 to 22 is any amino acid
  Variant (23)..(23): Xaa in position 23 is Phe, Ile, Leu, Met or Val
  Variant (25)..(25): Xaa in position 25 is any amino acid
  Variant (29)..(29): Xaa in position 29 is Phe, Leu or Met
  Variant (30)..(30): Xaa in position 30 is Ala, Gly or Ser
  Variant (31)..(31): Xaa in position 31 is Ala, Asn or Ser
  Variant (34)..(35): Xaa in position 34 to 35 is any amino acid
  Variant (36)..(36): Xaa in position 36 is Ile, Leu, Met or Val
SGGQXXRXXVAXARXXXXXPXXXLXDEPXXXLDXXXR

SEQ ID NO: 66172 - protein, 52 aa, Artificial sequence
  Consensus
  Variant (2)..(2): Xaa in position 2 is any amino acid
  Variant (4)..(4): Xaa in position 4 is any amino acid
  Variant (5)..(5): Xaa in position 5 is Ile, Leu or Val
  Variant (6)..(6): Xaa in position 6 is any amino acid
  Variant (12)..(12): Xaa in position 12 is any amino acid
  Variant (15)..(15): Xaa in position 15 is Phe, Ile, Leu or Met
  Variant (16)..(16): Xaa in position 16 is any amino acid
  Variant (17)..(17): Xaa in position 17 is Ile, Leu, Met or Val
  Variant (18)..(18): Xaa in position 18 is Ala, Cys, Gly or Ser
  Variant (19)..(22): Xaa in position 19 to 22 is any amino acid
  Variant (23)..(23): Xaa in position 23 is Ile, Leu or Val
  Variant (24)..(24): Xaa in position 24 is Phe, Leu, Met or Val
  Variant (25)..(26): Xaa in position 25 to 26 is any amino acid
  Variant (28)..(30): Xaa in position 28 to 30 is any amino acid
  Variant (32)..(32): Xaa in position 32 is any amino acid
  Variant (33)..(33): Xaa in position 33 is Ala, Asp, Glu, Gly or Ser
  Variant (34)..(34): Xaa in position 34 is any amino acid
  Variant (35)..(35): Xaa in position 35 is Ala, Gly, Pro or Val
  Variant (36)..(38): Xaa in position 36 to 38 is any amino acid
  Variant (40)..(41): Xaa in position 40 to 41 is any amino acid
  Variant (43)..(47): Xaa in position 43 to 47 is any amino acid
  Variant (48)..(48): Xaa in position 48 is Ala, Cys, Gly or Ser
  Variant (49)..(49): Xaa in position 49 is any amino acid
  Variant (51)..(51): Xaa in position 51 is Ile, Leu, Met or Val
GXTXXXVTHDQXEAXXXXXXXXXXXXGXXXQXXXXXXXYXXPXXXXXXXFXG

SEQ ID NO: 66173 - DNA, 1629 bp, Escherichia coli; identical to SEQ ID NO: 27642
  CDS (467)..(1513)

SEQ ID NO: 66174 - protein, 348 aa, Escherichia coli [sequence omitted]

SEQ ID NO: 66175 - DNA, 1053 bp, Vibrio cholerae O1 biovar eltor str. N16961; identical to SEQ ID NO: 27644
  CDS (1)..(1053): transl_table=11

SEQ ID NO: 66176 - protein, 350 aa, Vibrio cholerae O1 biovar eltor str. N16961; identical to SEQ ID NO: 27645

SEQ ID NO: 66177 - DNA, 1008 bp, Campylobacter jejuni subsp. jejuni NCTC 11168; identical to SEQ ID NO: 27646
  CDS (1)..(1008): transl_table=11

SEQ ID NO: 66178 - protein, 335 aa, Campylobacter jejuni subsp. jejuni NCTC 11168; identical to SEQ ID NO: 27647

SEQ ID NO: 66179 - DNA, 1047 bp, Salmonella typhimurium LT2; identical to SEQ ID NO: 27648
  CDS (1)..(1047): transl_table=11

SEQ ID NO: 66180 - protein, 348 aa, Salmonella typhimurium LT2; identical to SEQ ID NO: 27649

SEQ ID NO: 66181 - DNA, 1182 bp, Agrobacterium tumefaciens str. C58; identical to SEQ ID NO: 27650
  CDS (1)..(1182): transl_table=11

SEQ ID NO: 66182 - protein, 393 aa, Agrobacterium tumefaciens str. C58; identical to SEQ ID NO: 27651

SEQ ID NO: 66183 - DNA, 1077 bp, Plasmodium falciparum 3D7; identical to SEQ ID NO: 27652
  CDS (1)..(1077)

SEQ ID NO: 66184 - protein, 358 aa, Plasmodium falciparum 3D7; identical to SEQ ID NO: 27653

SEQ ID NO: 66185 - DNA, 1032 bp, Shewanella oneidensis MR-1; identical to SEQ ID NO: 27654
  CDS (1)..(1032): transl_table=11

SEQ ID NO: 66186 - protein, 343 aa, Shewanella oneidensis MR-1; identical to SEQ ID NO: 27655

SEQ ID NO: 66187 - DNA, 1044 bp, Vibrio vulnificus CMCP6; identical to SEQ ID NO: 27656
  CDS (1)..(1044): transl_table=11

SEQ ID NO: 66188 - protein, 347 aa, Vibrio vulnificus CMCP6; identical to SEQ ID NO: 27657

SEQ ID NO: 66189 - DNA, 1056 bp, Coxiella burnetii RSA 493; identical to SEQ ID NO: 27658
  CDS (1)..(1056): transl_table=11

SEQ ID NO: 66190 - protein, 351 aa, Coxiella burnetii RSA 493; identical to SEQ ID NO: 27659

SEQ ID NO: 66191 - DNA, 1050 bp, Nitrosomonas europaea ATCC 19718; identical to SEQ ID NO: 27660
  CDS (1)..(1050): transl_table=11

SEQ ID NO: 66192 - protein, 349 aa, Nitrosomonas europaea ATCC 19718; identical to SEQ ID NO: 27661

SEQ ID NO: 66193 - DNA, 1032 bp, Helicobacter hepaticus ATCC 51449; identical to SEQ ID NO: 27662
  CDS (1)..(1032): transl_table=11

SEQ ID NO: 66194 - protein, 343 aa, Helicobacter hepaticus ATCC 51449; identical to SEQ ID NO: 27663

SEQ ID NO: 66195 - DNA, 1050 bp, Wigglesworthia glossinidia endosymbiont of Glossina brevipalpis; identical to SEQ ID NO: 27664
  CDS (1)..(1050): transl_table=11

SEQ ID NO: 66196 - protein, 349 aa, Wigglesworthia glossinidia endosymbiont of Glossina brevipalpis; identical to SEQ ID NO: 27665

SEQ ID NO: 66197 - DNA, 1080 bp, Prochlorococcus marinus subsp. marinus str. CCMP1375; identical to SEQ ID NO: 27666
  CDS (1)..(1080): transl_table=11

SEQ ID NO: 66198 - protein, 359 aa, Prochlorococcus marinus subsp. marinus str. CCMP1375; identical to SEQ ID NO: 27667

SEQ ID NO: 66199 - DNA, 1080 bp, Bordetella pertussis Tohama I; identical to SEQ ID NO: 27668
  CDS (1)..(1080): transl_table=11

SEQ ID NO: 66200 - protein, 359 aa, Bordetella pertussis Tohama I; identical to SEQ ID NO: 27669

SEQ ID NO: 66201 - DNA, 1080 bp, Bordetella bronchiseptica RB50; identical to SEQ ID NO: 27670
  CDS (1)..(1080)

SEQ ID NO: 66202 - protein, 359 aa, Bordetella bronchiseptica RB50; identical to SEQ ID NO: 27671

SEQ ID NO: 66203 - DNA, 1050 bp, Prochlorococcus marinus subsp. pastoris str. CCMP1986; identical to SEQ ID NO: 27672
  CDS (1)..(1050): transl_table=11

SEQ ID NO: 66204 - protein, 349 aa, Prochlorococcus marinus subsp. pastoris str. CCMP1986; identical to SEQ ID NO: 27673

SEQ ID NO: 66205 - DNA, 1065 bp, Prochlorococcus marinus str. MIT 9313; identical to SEQ ID NO: 27674
  CDS (1)..(1065): transl_table=11

SEQ ID NO: 66206 - protein, 354 aa, Prochlorococcus marinus str. MIT 9313; identical to SEQ ID NO: 27675

SEQ ID NO: 66207 - DNA, 1032 bp, Synechococcus sp. WH 8102; identical to SEQ ID NO: 27676
  CDS (1)..(1032): transl_table=11

SEQ ID NO: 66208 - protein, 343 aa, Synechococcus sp. WH 8102; identical to SEQ ID NO: 27677

SEQ ID NO: 66209 - DNA, 1086 bp, Chromobacterium violaceum ATCC 12472; identical to SEQ ID NO: 27678
  CDS (1)..(1086): transl_table=11

SEQ ID NO: 66210 - protein, 361 aa, Chromobacterium violaceum ATCC 12472; identical to SEQ ID NO: 27679

SEQ ID NO: 66211 - DNA, 1014 bp, Wolinella succinogenes DSM 1740; identical to SEQ ID NO: 27680
  CDS (1)..(1014): transl_table=11

SEQ ID NO: 66212 - protein, 337 aa, Wolinella succinogenes DSM 1740; identical to SEQ ID NO: 27681

SEQ ID NO: 66213 - DNA, 1080 bp, Oryza sativa (japonica cultivar-group); identical to SEQ ID NO: 27682
  CDS (1)..(1080)

SEQ ID NO: 66214 - protein, 359 aa, Oryza sativa (japonica cultivar-group); identical to SEQ ID NO: 27683

SEQ ID NO: 66215 - DNA, 1044 bp, Vibrio vulnificus YJ016; identical to SEQ ID NO: 27684
  CDS (1)..(1044): transl_table=11

SEQ ID NO: 66216 - protein, 347 aa, Vibrio vulnificus YJ016; identical to SEQ ID NO: 27685

SEQ ID NO: 66217 - DNA, 1086 bp, Eremothecium gossypii; identical to SEQ ID NO: 27686
  CDS (1)..(1086)

SEQ ID NO: 66218 - protein, 361 aa, Eremothecium gossypii; identical to SEQ ID NO: 27687

SEQ ID NO: 66219 - DNA, 1074 bp, Neurospora crassa; identical to SEQ ID NO: 27688
  CDS (1)..(1074)

SEQ ID NO: 66220 - protein, 357 aa, Neurospora crassa; identical to SEQ ID NO: 27689

SEQ ID NO: 66221 - DNA, 957 bp, Gibberella zeae PH-1; identical to SEQ ID NO: 27690
  CDS (1)..(957)

SEQ ID NO: 66222 - protein, 318 aa, Gibberella zeae PH-1; identical to SEQ ID NO: 27691

SEQ ID NO: 66223 - DNA, 1185 bp, Ustilago maydis 521; identical to SEQ ID NO: 27692
  CDS (1)..(1185)

SEQ ID NO: 66224 - protein, 394 aa, Ustilago maydis 521; identical to SEQ ID NO: 27693

SEQ ID NO: 66225 - DNA, 1077 bp, Candida glabrata CBS138; identical to SEQ ID NO: 27694
  CDS (1)..(1077)

SEQ ID NO: 66226 - protein, 358 aa, Candida glabrata CBS138; identical to SEQ ID NO: 27695

SEQ ID NO: 66227 - DNA, 1095 bp, Kluyveromyces lactis NRRL Y-1140; identical to SEQ ID NO: 27696
  CDS (1)..(1095)

SEQ ID NO: 66228 - protein, 364 aa, Kluyveromyces lactis NRRL Y-1140; identical to SEQ ID NO: 27697

SEQ ID NO: 66229 - DNA, 1083 bp, Debaryomyces hansenii CBS767; identical to SEQ ID NO: 27698
  CDS (1)..(1083)

SEQ ID NO: 66230 - protein, 360 aa, Debaryomyces hansenii CBS767; identical to SEQ ID NO: 27699

SEQ ID NO: 66231 - DNA, 1038 bp, Yarrowia lipolytica CLIB99; identical to SEQ ID NO: 27700
  CDS (1)..(1038)

SEQ ID NO: 66232 - protein, 345 aa, Yarrowia lipolytica CLIB99; identical to SEQ ID NO: 27701

SEQ ID NO: 66233 - DNA, 1062 bp, Cryptococcus neoformans var. neoformans JEC21; identical to SEQ ID NO: 27702
  CDS (1)..(1062)

SEQ ID NO: 66234 - protein, 353 aa, Cryptococcus neoformans var. neoformans JEC21; identical to SEQ ID NO: 27703

SEQ ID NO: 66235 - DNA, 1083 bp, Plasmodium berghei; identical to SEQ ID NO: 27704
  CDS (1)..(1083)

SEQ ID NO: 66236 - protein, 360 aa, Plasmodium berghei; identical to SEQ ID NO: 27705

SEQ ID NO: 66237 - DNA, 1077 bp, Candida albicans SC5314; identical to SEQ ID NO: 27706
  CDS (1)..(1077): transl_table=12

SEQ ID NO: 66238 - protein, 358 aa, Candida albicans SC5314; identical to SEQ ID NO: 27707

SEQ ID NO: 66239 - DNA, 1035 bp, Acinetobacter sp. ADP1; identical to SEQ ID NO: 27708
  CDS (1)..(1035): transl_table=11

SEQ ID NO: 66240 - protein, 344 aa, Acinetobacter sp. ADP1; identical to SEQ ID NO: 27709

SEQ ID NO: 66241 - DNA, 1044 bp, Erwinia carotovora subsp. atroseptica SCRI1043; identical to SEQ ID NO: 27710
  CDS (1)..(1044)

SEQ ID NO: 66242 - protein, 347 aa, Erwinia carotovora subsp. atroseptica SCRI1043; identical to SEQ ID NO: 27711

SEQ ID NO: 66243 - DNA, 1080 bp, Legionella pneumophila subsp. pneumophila str. Philadelphia 1; identical to SEQ ID NO: 27712
  CDS (1)..(1080): transl_table=11

SEQ ID NO: 66244 - protein, 359 aa, Legionella pneumophila subsp. pneumophila str. Philadelphia 1; identical to SEQ ID NO: 27713

SEQ ID NO: 66245 - DNA, 1059 bp, Burkholderia mallei ATCC 23344; identical to SEQ ID NO: 27714
  CDS (1)..(1059): transl_table=11

SEQ ID NO: 66246 - protein, 352 aa, Burkholderia mallei ATCC 23344; identical to SEQ ID NO: 27715

SEQ ID NO: 66247 - DNA, 1044 bp, Methylococcus capsulatus str. Bath; identical to SEQ ID NO: 27716
  CDS (1)..(1044): transl_table=11

SEQ ID NO: 66248 - protein, 347 aa, Methylococcus capsulatus str. Bath; identical to SEQ ID NO: 27717

SEQ ID NO: 66249 - DNA, 1038 bp, Legionella pneumophila str. Paris; identical to SEQ ID NO: 27718
  CDS (1)..(1038): transl_table=11

SEQ ID NO: 66250 - protein, 345 aa, Legionella pneumophila str. Paris; identical to SEQ ID NO: 27719

SEQ ID NO: 66251 - DNA, 1038 bp, Legionella pneumophila str. Lens; identical to SEQ ID NO: 27720
  CDS (1)..(1038): transl_table=11

SEQ ID NO: 66252 - protein, 345 aa, Legionella pneumophila str. Lens; identical to SEQ ID NO: 27721

SEQ ID NO: 66253 - DNA, 1029 bp, Photobacterium profundum SS9; identical to SEQ ID NO: 27722
  CDS (1)..(1029): transl_table=11

SEQ ID NO: 66254 - protein, 342 aa, Photobacterium profundum SS9; identical to SEQ ID NO: 27723

SEQ ID NO: 66255 - DNA, 1047 bp, Salmonella enterica subsp. enterica serovar Paratyphi A str. ATCC; identical to SEQ ID NO: 27724
  CDS (1)..(1047): transl_table=11

SEQ ID NO: 66256 - protein, 348 aa, Salmonella enterica subsp. enterica serovar Paratyphi A str. ATCC; identical to SEQ ID NO: 27725

SEQ ID NO: 66257 - DNA, 1035 bp, Idiomarina loihiensis L2TR; identical to SEQ ID NO: 27726
  CDS (1)..(1035): transl_table=11

SEQ ID NO: 66258 - protein, 344 aa, Idiomarina loihiensis L2TR; identical to SEQ ID NO: 27727

SEQ ID NO: 66259 - DNA, 1035 bp, Azoarcus sp. EbN1; identical to SEQ ID NO: 27728
  CDS (1)..(1035): transl_table=11

SEQ ID NO: 66260 - protein, 344 aa, Azoarcus sp. EbN1; identical to SEQ ID NO: 27729

SEQ ID NO: 66261 - DNA, 1041 bp, Silicibacter pomeroyi DSS-3; identical to SEQ ID NO: 27730
  CDS (1)..(1041): transl_table=11

SEQ ID NO: 66262 - protein, 346 aa, Silicibacter pomeroyi DSS-3; identical to SEQ ID NO: 27731

SEQ ID NO: 66263 - DNA, 996 bp, Campylobacter jejuni RM1221; identical to SEQ ID NO: 27732
  CDS (1)..(996): transl_table=11

SEQ ID NO: 66264 - protein, 331 aa, Campylobacter jejuni RM1221; identical to SEQ ID NO: 27733

SEQ ID NO: 66265 - DNA, 1029 bp, Vibrio fischeri ES114; identical to SEQ ID NO: 27734
  CDS (1)..(1029): transl_table=11

SEQ ID NO: 66266 - protein, 342 aa, Vibrio fischeri ES114; identical to SEQ ID NO: 27735

SEQ ID NO: 66267 - DNA, 1047 bp, Salmonella enterica subsp. enterica serovar Choleraesuis str; identical to SEQ ID NO: 27736
  CDS (1)..(1047): transl_table=11

SEQ ID NO: 66268 - protein, 348 aa, Salmonella enterica subsp. enterica serovar Choleraesuis str; identical to SEQ ID NO: 27737

SEQ ID NO: 66269 - DNA, 1044 bp, Pseudomonas syringae pv. syringae B728a; identical to SEQ ID NO: 27738
  CDS (1)..(1044)

SEQ ID NO: 66270 - protein, 347 aa, Pseudomonas syringae pv. syringae B728a; identical to SEQ ID NO: 27739

SEQ ID NO: 66271 - DNA, 1041 bp, Rhodobacter sphaeroides 2.4.1; identical to SEQ ID NO: 27740
  CDS (1)..(1041)

SEQ ID NO: 66272 - protein, 346 aa, Rhodobacter sphaeroides 2.4.1; identical to SEQ ID NO: 27741

SEQ ID NO: 66273 - DNA, 1047 bp, Pseudomonas aeruginosa UCBPP-PA14; identical to SEQ ID NO: 27742
  CDS (1)..(1047)

SEQ ID NO: 66274 - protein, 348 aa, Pseudomonas aeruginosa UCBPP-PA14; identical to SEQ ID NO: 27743

SEQ ID NO: 66275 - DNA, 1077 bp, Psychrobacter sp. 273-4; identical to SEQ ID NO: 27744
  CDS (1)..(1077)

SEQ ID NO: 66276 - protein, 358 aa, Psychrobacter sp. 273-4; identical to SEQ ID NO: 27745

SEQ ID NO: 66277 - DNA, 1032 bp, Dechloromonas aromatica RCB; identical to SEQ ID NO: 27746
  CDS (1)..(1032)

SEQ ID NO: 66278 - protein, 343 aa, Dechloromonas aromatica RCB; identical to SEQ ID NO: 27747

SEQ ID NO: 66279 - DNA, 1035 bp, Ralstonia eutropha JMP134; identical to SEQ ID NO: 27748
  CDS (1)..(1035)

SEQ ID NO: 66280 - protein, 344 aa, Ralstonia eutropha JMP134; identical to SEQ ID NO: 27749

SEQ ID NO: 66281 - DNA, 1065 bp, Burkholderia cepacia R18194; identical to SEQ ID NO: 27750
  CDS (1)..(1065)

SEQ ID NO: 66282 - protein, 354 aa, Burkholderia cepacia R18194; identical to SEQ ID NO: 27751

SEQ ID NO: 66283 - DNA, 1047 bp, Rubrivivax gelatinosus PM1; identical to SEQ ID NO: 27752
  CDS (1)..(1047)

SEQ ID NO: 66284 - protein, 348 aa, Rubrivivax gelatinosus PM1; identical to SEQ ID NO: 27753

SEQ ID NO: 66285 - DNA, 1062 bp, Burkholderia fungorum LB400; identical to SEQ ID NO: 27754
  CDS (1)..(1062)

SEQ ID NO: 66286 - protein, 353 aa, Burkholderia fungorum LB400; identical to SEQ ID NO: 27755

SEQ ID NO: 66287 - DNA, 1041 bp, Novosphingobium aromaticivorans DSM 12444; identical to SEQ ID NO: 27756
  CDS (1)..(1041)

SEQ ID NO: 66288 - protein, 346 aa, Novosphingobium aromaticivorans DSM 12444; identical to SEQ ID NO: 27757

SEQ ID NO: 66289 - DNA, 1080 bp, Microbulbifer degradans 2-40; identical to SEQ ID NO: 27758
  CDS (1)..(1080)

SEQ ID NO: 66290 - protein, 359 aa, Microbulbifer degradans 2-40; identical to SEQ ID NO: 27759

SEQ ID NO: 66291 - DNA, 1035 bp, Thiobacillus denitrificans ATCC 25259; identical to SEQ ID NO: 27760
  CDS (1)..(1035)

SEQ ID NO: 66292 - protein, 344 aa, Thiobacillus denitrificans ATCC 25259; identical to SEQ ID NO: 27761

SEQ ID NO: 66293 - DNA, 996 bp, Chloroflexus aurantiacus; identical to SEQ ID NO: 27762
  CDS (1)..(996)

SEQ ID NO: 66294 - protein, 331 aa, Chloroflexus aurantiacus; identical to SEQ ID NO: 27763

SEQ ID NO: 66295 - DNA, 1005 bp, Campylobacter coli RM2228; identical to SEQ ID NO: 27764
  CDS (1)..(1005): transl_table=11

SEQ ID NO: 66296 - protein, 334 aa, Campylobacter coli RM2228; identical to SEQ ID NO: 27765

SEQ ID NO: 66297 - DNA, 993 bp, Campylobacter lari RM2100; identical to SEQ ID NO: 27766
  CDS (1)..(993): transl_table=11

SEQ ID NO: 66298 - protein, 330 aa, Campylobacter lari RM2100; identical to SEQ ID NO: 27767

SEQ ID NO: 66299 - DNA, 1002 bp, Campylobacter upsaliensis RM3195; identical to SEQ ID NO: 27768
  CDS (1)..(1002): transl_table=11

SEQ ID NO: 66300 - protein, 333 aa, Campylobacter upsaliensis RM3195; identical to SEQ ID NO: 27769

SEQ ID NO: 66301 - DNA, 1065 bp, Erythrobacter litoralis HTCC2594; identical to SEQ ID NO: 27770
  CDS (1)..(1065): transl_table=11

SEQ ID NO: 66302 - protein, 354 aa, Erythrobacter litoralis HTCC2594; identical to SEQ ID NO: 27771

SEQ ID NO: 66303 - DNA, 1080 bp, Azotobacter vinelandii AvOP; identical to SEQ ID NO: 27772
  CDS (1)..(1080): transl_table=11

SEQ ID NO: 66304 - protein, 359 aa, Azotobacter vinelandii AvOP; identical to SEQ ID NO: 27773

SEQ ID NO: 66305 - DNA, 1095 bp, Burkholderia vietnamiensis G4; identical to SEQ ID NO: 27774
  CDS (1)..(1095): transl_table=11

SEQ ID NO: 66306 - protein, 364 aa, Burkholderia vietnamiensis G4; identical to SEQ ID NO: 27775

SEQ ID NO: 66307 - DNA, 1095 bp, Burkholderia cenocepacia AU 1054; identical to SEQ ID NO: 27776
  CDS (1)..(1095): transl_table=11

SEQ ID NO: 66308 - protein, 364 aa, Burkholderia cenocepacia AU 1054; identical to SEQ ID NO: 27777

SEQ ID NO: 66309 - DNA, 1056 bp, Chromohalobacter salexigens DSM 3043; identical to SEQ ID NO: 27778
  CDS (1)..(1056): transl_table=11

SEQ ID NO: 66310 - protein, 351 aa, Chromohalobacter salexigens DSM 3043; identical to SEQ ID NO: 27779

SEQ ID NO: 66311 - DNA, 1059 bp, Burkholderia pseudomallei 668; identical to SEQ ID NO: 27780
  CDS (1)..(1059)

SEQ ID NO: 66312 - protein, 352 aa, Burkholderia pseudomallei 668; identical to SEQ ID NO: 27781

SEQ ID NO: 66313 - DNA, 1068 bp, Polaromonas sp. JS666; identical to SEQ ID NO: 27782
  CDS (1)..(1068): transl_table=11

SEQ ID NO: 66314 - protein, 355 aa, Polaromonas sp. JS666; identical to SEQ ID NO: 27783

SEQ ID NO: 66315 - DNA, 1341 bp, Jannaschia sp. CCS1; identical to SEQ ID NO: 27784
  CDS (1)..(1341): transl_table=11

SEQ ID NO: 66316 - protein, 446 aa, Jannaschia sp. CCS1; identical to SEQ ID NO: 27785

SEQ ID NO: 66317 - DNA, 1038 bp, Methylobacillus flagellatus KT; identical to SEQ ID NO: 27786
  CDS (1)..(1038): transl_table=11

SEQ ID NO: 66318 - protein, 345 aa, Methylobacillus flagellatus KT; identical to SEQ ID NO: 27787

SEQ ID NO: 66319 - DNA, 1023 bp, Sphingopyxis alaskensis RB2256; identical to SEQ ID NO: 27788
  CDS (1)..(1023): transl_table=11

SEQ ID NO: 66320 - protein, 340 aa, Sphingopyxis alaskensis RB2256; identical to SEQ ID NO: 27789

SEQ ID NO: 66321 - DNA, 1032 bp, Shewanella baltica OS155; identical to SEQ ID NO: 27790
  CDS (1)..(1032): transl_table=11

SEQ ID NO: 66322 - protein, 343 aa, Shewanella baltica OS155; identical to SEQ ID NO: 27791

SEQ ID NO: 66323 - DNA, 1029 bp, Shewanella amazonensis SB2B; identical to SEQ ID NO: 27792
  CDS (1)..(1029): transl_table=11

SEQ ID NO: 66324 - protein, 342 aa, Shewanella amazonensis SB2B; identical to SEQ ID NO: 27793

SEQ ID NO: 66325 - DNA, 1035 bp, Ralstonia metallidurans CH34; identical to SEQ ID NO: 27794
  CDS (1)..(1035): transl_table=11

SEQ ID NO: 66326 - protein, 344 aa, Ralstonia metallidurans CH34; identical to SEQ ID NO: 27795

SEQ ID NO: 66327 - DNA, 1041 bp, Mesorhizobium sp. BNC1; identical to SEQ ID NO: 27796
  CDS (1)..(1041): transl_table=11

SEQ ID NO: 66328 - protein, 346 aa, Mesorhizobium sp. BNC1; identical to SEQ ID NO: 27797

SEQ ID NO: 66329 - DNA, 1041 bp, Silicibacter sp. TM1040; identical to SEQ ID NO: 27798
  CDS (1)..(1041): transl_table=11

SEQ ID NO: 66330 - protein, 346 aa, Silicibacter sp. TM1040; identical to SEQ ID NO: 27799

SEQ ID NO: 66331 - DNA, 1044 bp, Paracoccus denitrificans PD1222; identical to SEQ ID NO: 27800
  CDS (1)..(1044): transl_table=11

SEQ ID NO: 66332 - protein, 347 aa, Paracoccus denitrificans PD1222; identical to SEQ ID NO: 27801

SEQ ID NO: 66333 - DNA, 1035 bp, Shewanella denitrificans OS-217; identical to SEQ ID NO: 27802
  CDS (1)..(1035): transl_table=11

SEQ ID NO: 66334 - protein, 344 aa, Shewanella denitrificans OS-217; identical to SEQ ID NO: 27803

SEQ ID NO: 66335 - DNA, 1038 bp, Shewanella frigidimarina NCIMB 400; identical to SEQ ID NO: 27804
  CDS (1)..(1038): transl_table=11

SEQ ID NO: 66336 - protein, 345 aa, Shewanella frigidimarina NCIMB 400; identical to SEQ ID NO: 27805

SEQ ID NO: 66337 - DNA, 1047 bp, Pseudomonas fluorescens; identical to SEQ ID NO: 27806
  CDS (1)..(1047): transl_table=11

SEQ ID NO: 66338 - protein, 348 aa, Pseudomonas fluorescens; identical to SEQ ID NO: 27807

SEQ ID NO: 66339 - DNA, 888 bp, Theileria parva; identical to SEQ ID NO: 27808
  CDS (1)..(888)

SEQ ID NO: 66340 - protein, 295 aa, Theileria parva; identical to SEQ ID NO: 27809

SEQ ID NO: 66341 - DNA, 1053 bp, Theileria annulata; identical to SEQ ID NO: 27810
  CDS (1)..(1053)

SEQ ID NO: 66342 - protein, 350 aa, Theileria annulata; identical to SEQ ID NO: 27811

SEQ ID NO: 66343 - DNA, 1005 bp, Aspergillus fumigatus Af293; identical to SEQ ID NO: 27812
  CDS (1)..(1005)

SEQ ID NO: 66344 - protein, 334 aa, Aspergillus fumigatus Af293; identical to SEQ ID NO: 27813

SEQ ID NO: 66345 - DNA, 1086 bp, Plasmodium chabaudi; identical to SEQ ID NO: 27814
  CDS (1)..(1086)

SEQ ID NO: 66346 - protein, 361 aa, Plasmodium chabaudi; identical to SEQ ID NO: 27815

SEQ ID NO: 66347 - DNA, 1086 bp, Plasmodium yoelii yoelii; identical to SEQ ID NO: 27816
  CDS (1)..(1086)

SEQ ID NO: 66348 - protein, 361 aa, Plasmodium yoelii yoelii; identical to SEQ ID NO: 27817

SEQ ID NO: 66349 - DNA, 1212 bp, Toxoplasma gondii; identical to SEQ ID NO: 27818
  CDS (1)..(1212)

SEQ ID NO: 66350 - protein, 403 aa, Toxoplasma gondii; identical to SEQ ID NO: 27819

SEQ ID NO: 66351 - DNA, 1038 bp, Beta vulgaris; identical to SEQ ID NO: 27820
  CDS (1)..(1038)

SEQ ID NO: 66352 - protein, 345 aa, Beta vulgaris; identical to SEQ ID NO: 27821

SEQ ID NO: 66353 - DNA, 1038 bp, Agrobacterium tumefaciens; identical to SEQ ID NO: 27822
  CDS (1)..(1038)

SEQ ID NO: 66354 - protein, 345 aa, Agrobacterium tumefaciens; identical to SEQ ID NO: 27823

SEQ ID NO: 66355 - DNA, 1269 bp, Aquifex aeolicus; identical to SEQ ID NO: 27824
  CDS (1)..(1269): transl_table=11

SEQ ID NO: 66356 - protein, 422 aa, Aquifex aeolicus; identical to SEQ ID NO: 27825

SEQ ID NO: 66357 - DNA, 1134 bp, Arabidopsis thaliana; identical to SEQ ID NO: 27826
  CDS (1)..(1134)

SEQ ID NO: 66358 - protein, 377 aa, Arabidopsis thaliana; identical to SEQ ID NO: 27827

SEQ ID NO: 66359 - DNA, 1053 bp, Buchnera aphidicola; identical to SEQ ID NO: 27828
  CDS (1)..(1053): transl_table=11

SEQ ID NO: 66360 - protein, 350 aa, Buchnera aphidicola; identical to SEQ ID NO: 27829

SEQ ID NO: 66361 - DNA, 1050 bp, Buchnera aphidicola; identical to SEQ ID NO: 27830
  CDS (1)..(1050): transl_table=11

SEQ ID NO: 66362 - protein, 349 aa, Buchnera aphidicola; identical to SEQ ID NO: 27831

SEQ ID NO: 66363 - DNA, 1020 bp, Helicobacter pylori J99; identical to SEQ ID NO: 27832
  CDS (1)..(1020): transl_table=11

SEQ ID NO: 66364 - protein, 339 aa, Helicobacter pylori J99; identical to SEQ ID NO: 27833

SEQ ID NO: 66365 - DNA, 1020 bp, Helicobacter pylori; identical to SEQ ID NO: 27834
  CDS (1)..(1020): transl_table=11

SEQ ID NO: 66366 - protein, 339 aa, Helicobacter pylori; identical to SEQ ID NO: 27835

SEQ ID NO: 66367 - DNA, 1281 bp, Listeria innocua; identical to SEQ ID NO: 27836
  CDS (1)..(1281): transl_table=11

SEQ ID NO: 66368 - protein, 426 aa, Listeria innocua; identical to SEQ ID NO: 27837

SEQ ID NO: 66369 - DNA, 1281 bp, Listeria monocytogenes; identical to SEQ ID NO: 27838
  CDS (1)..(1281): transl_table=11

SEQ ID NO: 66370 - protein, 426 aa, Listeria monocytogenes; identical to SEQ ID NO: 27839

SEQ ID NO: 66371 - DNA, 1281 bp, Listeria monocytogenes; identical to SEQ ID NO: 27840
  CDS (1)..(1281): transl_table=11

SEQ ID NO: 66372 - protein, 426 aa, Listeria monocytogenes; identical to SEQ ID NO: 27841

SEQ ID NO: 66373 - DNA, 1035 bp, Neisseria meningitidis; identical to SEQ ID NO: 27842
  CDS (1)..(1035): transl_table=11

SEQ ID NO: 66374 - protein, 344 aa, Neisseria meningitidis; identical to SEQ ID NO: 27843

SEQ ID NO: 66375 - DNA, 1047 bp, Pseudomonas aeruginosa; identical to SEQ ID NO: 27844
  CDS (1)..(1047): transl_table=11

SEQ ID NO: 66376 - protein, 348 aa, Pseudomonas aeruginosa; identical to SEQ ID NO: 27845

SEQ ID NO: 66377 - DNA, 1047 bp, Pseudomonas putida; identical to SEQ ID NO: 27846
  CDS (1)..(1047): transl_table=11

SEQ ID NO: 66378 - protein, 348 aa, Pseudomonas putida; identical to SEQ ID NO: 27847

SEQ ID NO: 66379 - DNA, 1035 bp, Ralstonia solanacearum; identical to SEQ ID NO: 27848
  CDS (1)..(1035): transl_table=11

SEQ ID NO: 66380 - protein, 344 aa, Ralstonia solanacearum; identical to SEQ ID NO: 27849

SEQ ID NO: 66381 - DNA, 1044 bp, Rhizobium meliloti; identical to SEQ ID NO: 27850
  CDS (1)..(1044): transl_table=11

SEQ ID NO: 66382 - protein, 347 aa, Rhizobium meliloti; identical to SEQ ID NO: 27851

SEQ ID NO: 66383 - DNA, 1047 bp, Salmonella typhimurium; identical to SEQ ID NO: 27648
  CDS (1)..(1047)

SEQ ID NO: 66384 - protein, 348 aa, Salmonella typhimurium; identical to SEQ ID NO: 27649

SEQ ID NO: 66385 - DNA, 1014 bp, Schizosaccharomyces pombe; identical to SEQ ID NO: 27854
  CDS (1)..(1014)

SEQ ID NO: 66386 - protein, 337 aa, Schizosaccharomyces pombe; identical to SEQ ID NO: 27855

SEQ ID NO: 66387 - DNA, 1278 bp, Staphylococcus epidermidis; identical to SEQ ID NO: 27856
  CDS (1)..(1278): transl_table=11

SEQ ID NO: 66388 - protein, 425 aa, Staphylococcus epidermidis; identical to SEQ ID NO: 27857

SEQ ID NO: 66389 - DNA, 1278 bp, Staphylococcus epidermidis; identical to SEQ ID NO: 27858
  CDS (1)..(1278): transl_table=11

SEQ ID NO: 66390 - protein, 425 aa, Staphylococcus epidermidis; identical to SEQ ID NO: 27859

SEQ ID NO: 66391 - DNA, 1029 bp, Synechocystis sp; identical to SEQ ID NO: 27860
  CDS (1)..(1029): transl_table=11

SEQ ID NO: 66392 - protein, 342 aa, Synechocystis sp; identical to SEQ ID NO: 27861

SEQ ID NO: 66393 - DNA, 1176 bp, Ustilago maydis; identical to SEQ ID NO: 27862
  CDS (1)..(1176)

SEQ ID NO: 66394 - protein, 391 aa, Ustilago maydis; identical to SEQ ID NO: 27863

SEQ ID NO: 66395 - DNA, 1029 bp, Vibrio cholerae; identical to SEQ ID NO: 27864
  CDS (1)..(1029)

SEQ ID NO: 66396 - protein, 342 aa, Vibrio cholerae; identical to SEQ ID NO: 27865

SEQ ID NO: 66397 - DNA, 1029 bp, Vibrio parahaemolyticus; identical to SEQ ID NO: 27866
  CDS (1)..(1029): transl_table=11

SEQ ID NO: 66398 - protein, 342 aa, Vibrio parahaemolyticus; identical to SEQ ID NO: 27867

SEQ ID NO: 66399 - DNA, 1029 bp, Vibrio vulnificus; identical to SEQ ID NO: 27868
  CDS (1)..(1029)

SEQ ID NO: 66400 - protein, 342 aa, Vibrio vulnificus; identical to SEQ ID NO: 27869

SEQ ID NO: 66401 - DNA, 1029 bp, Vibrio vulnificus; identical to SEQ ID NO: 27870
  CDS (1)..(1029)

SEQ ID NO: 66402 - protein, 342 aa, Vibrio vulnificus; identical to SEQ ID NO: 27871

SEQ ID NO: 66403 - DNA, 1095 bp, Saccharomyces cerevisiae; identical to SEQ ID NO: 27872
  CDS (1)..(1095)

SEQ ID NO: 66404 - protein, 364 aa, Saccharomyces cerevisiae; identical to SEQ ID NO: 27873

SEQ ID NO: 66405 - DNA, 1047 bp, Yersinia pestis; identical to SEQ ID NO: 27874
  CDS (1)..(1047): transl_table=11

SEQ ID NO: 66406 - protein, 348 aa, Yersinia pestis; identical to SEQ ID NO: 27875

SEQ ID NO: 66407 - DNA, 23 bp, Artificial sequence
  Primer sequence
atgactgcaccatcccaggtatt

SEQ ID NO: 66408 - DNA, 24 bp, Artificial sequence
  Primer sequence
ttattgtttaacggaccagcgtac

SEQ ID NO: 66409 - protein, 478 aa, Artificial sequence; identical to SEQ ID NO: 27878
  Consensus
  Variant (2)..(2): Xaa in position 2 is any amino acid
  Variant (4)..(5): Xaa in position 4 to 5 is any amino acid
  Variant (7)..(7): Xaa in position 7 is any amino acid
  Variant (9)..(9): Xaa in position 9 is any amino acid
  Variant (15)..(16): Xaa in position 15 to 16 is any or no amino acid
  Variant (19)..(20): Xaa in position 19 to 20 is any amino acid
  Variant (22)..(33): Xaa in position 22 to 33 is any amino acid
  Variant (34)..(41): Xaa in position 34 to 41 is any or no amino acid
  Variant (49)..(49): Xaa in position 49 is any or no amino acid
  Variant (51)..(51): Xaa in position 51 is any or no amino acid
  Variant (54)..(58): Xaa in position 54 to 58 is any amino acid
  Variant (59)..(61): Xaa in position 59 to 61 is any or no amino acid
  Variant (64)..(64): Xaa in position 64 is any amino acid
  Variant (65)..(65): Xaa in position 65 is any or no amino acid
  Variant (67)..(84): Xaa in position 67 to 84 is any or no amino acid
  Variant (88)..(89): Xaa in position 88 to 89 is any or no amino acid
  Variant (92)..(92): Xaa in position 92 is any amino acid
  Variant (93)..(98): Xaa in position 93 to 98 is any or no amino acid
  Variant (101)..(102): Xaa in position 101 to 102 is any amino acid
  Variant (104)..(106): Xaa in position 104 to 106 is any amino acid
  Variant (107)..(108): Xaa in position 107 to 108 is any or no amino acid
  Variant (110)..(110): Xaa in position 110 is any amino acid
  Variant (112)..(112): Xaa in position 112 is any amino acid
  Variant (118)..(119): Xaa in position 118 to 119 is any amino acid
  Variant (124)..(125): Xaa in position 124 to 125 is any amino acid
  Variant (128)..(139): Xaa in position 128 to 139 is any amino acid
  Variant (140)..(145): Xaa in position 140 to 145 is any or no amino acid
  Variant (147)..(150): Xaa in position 147 to 150 is any amino acid
  Variant (152)..(152): Xaa in position 152 is any amino acid
  Variant (154)..(154): Xaa in position 154 is any amino acid
  Variant (159)..(161): Xaa in position 159 to 161 is any amino acid
  Variant (162)..(181): Xaa in position 162 to 181 is any or no amino acid
  Variant (183)..(185): Xaa in position 183 to 185 is any amino acid
  Variant (187)..(188): Xaa in position 187 to 188 is any amino acid
  Variant (191)..(192): Xaa in position 191 to 192 is any amino acid
  Variant (193)..(203): Xaa in position 193 to 203 is any or no amino acid
  Variant (205)..(206): Xaa in position 205 to 206 is any amino acid
  Variant (208)..(211): Xaa in position 208 to 211 is any amino acid
  Variant (213)..(213): Xaa in position 213 is any amino acid
  Variant (218)..(218): Xaa in position 218 is any amino acid
  Variant (224)..(225): Xaa in position 224 to 225 is any amino acid
  Variant (227)..(229): Xaa in position 227 to 229 is any amino acid
  Variant (231)..(235): Xaa in position 231 to 235 is any amino acid
  Variant (236)..(244): Xaa in position 236 to 244 is any or no amino acid
  Variant (246)..(246): Xaa in position 246 is any or no amino acid
  Variant (251)..(252): Xaa in position 251 to 252 is any amino acid
  Variant (255)..(260): Xaa in position 255 to 260 is any amino acid
  Variant (262)..(264): Xaa in position 262 to 264 is any amino acid
  Variant (265)..(265): Xaa in position 265 is any or no amino acid
  Variant (267)..(288): Xaa in position 267 to 288 is any or no amino acid
  Variant (290)..(290): Xaa in position 290 is any or no amino acid
  Variant (293)..(293): Xaa in position 293 is any amino acid
  Variant (296)..(296): Xaa in position 296 is any amino acid
  Variant (298)..(303): Xaa in position 298 to 303 is any amino acid
  Variant (306)..(310): Xaa in position 306 to 310 is any amino acid
  Variant (311)..(311): Xaa in position 311 is any or no amino acid
  Variant (314)..(315): Xaa in position 314 to 315 is any amino acid
  Variant (317)..(317): Xaa in position 317 is any amino acid
  Variant (319)..(319): Xaa in position 319 is any amino acid
  Variant (327)..(330): Xaa in position 327 to 330 is any amino acid
  Variant (332)..(364): Xaa in position 332 to 364 is any or no amino acid
  Variant (367)..(367): Xaa in position 367 is any amino acid
  Variant (369)..(369): Xaa in position 369 is any amino acid
  Variant (371)..(373): Xaa in position 371 to 373 is any amino acid
  Variant (375)..(375): Xaa in position 375 is any amino acid
  Variant (376)..(390): Xaa in position 376 to 390 is any or no amino acid
  Variant (393)..(395): Xaa in position 393 to 395 is any amino acid
  Variant (396)..(396): Xaa in position 396 is any or no amino acid
  Variant (398)..(399): Xaa in position 398 to 399 is any amino acid
  Variant (401)..(402): Xaa in position 401 to 402 is any amino acid
  Variant (404)..(404): Xaa in position 404 is any amino acid
  Variant (406)..(407): Xaa in position 406 to 407 is any amino acid
  Variant (409)..(410): Xaa in position 409 to 410 is any amino acid
  Variant (413)..(413): Xaa in position 413 is any amino acid
  Variant (415)..(420): Xaa in position 415 to 420 is any amino acid
  Variant (421)..(426): Xaa in position 421 to 426 is any or no amino acid
  Variant (428)..(428): Xaa in position 428 is any amino acid
  Variant (430)..(430): Xaa in position 430 is any amino acid
  Variant (432)..(441): Xaa in position 432 to 441 is any amino acid
  Variant (442)..(466): Xaa in position 442 to 466 is any or no amino acid
  Variant (468)..(468): Xaa in position 468 is any amino acid
  Variant (470)..(472): Xaa in position 470 to 472 is any amino acid
  Variant (474)..(475): Xaa in position 474 to 475 is any amino acid
  Variant (477)..(477): Xaa in position 477 is any amino acid

SEQ ID NO: 66410 - protein, 17 aa, Artificial sequence
  Consensus
  Variant (2)..(3): Xaa in position 2 to 3 is any amino acid
  Variant (4)..(5): Xaa in position 4 to 5 is any or no amino acid
  Variant (7)..(7): Xaa in position 7 is any amino acid
  Variant (8)..(9): Xaa in position 8 to 9 is any or no amino acid
  Variant (11)..(11): Xaa in position 11 is any amino acid
  Variant (13)..(13): Xaa in position 13 is any amino acid
  Variant (15)..(15): Xaa in position 15 is Phe, Leu or Val
  Variant (17)..(17): Xaa in position 17 is Asp, Glu or Gln
LXXXXPXXXDXHXHXRX

SEQ ID NO: 66411 - protein, 25 aa, Artificial sequence
  Consensus
  Variant (2)..(3): Xaa in position 2 to 3 is any amino acid
  Variant (4)..(4): Xaa in position 4 is any or no amino acid
  Variant (8)..(10): Xaa in position 8 to 10 is any amino acid
  Variant (12)..(12): Xaa in position 12 is Ala, Ile, Leu or Val
  Variant (13)..(20): Xaa in position 13 to 20 is any amino acid
  Variant (22)..(24): Xaa in position 22 to 24 is any amino acid
  Variant (25)..(25): Xaa in position 25 is Ile or Leu
AXXXMPNXXXPXXXXXXXXXYXXXX

SEQ ID NO: 66412 - protein, 8 aa, Artificial sequence
  Consensus
  Variant (2)..(2): Xaa in position 2 is any or no amino acid
  Variant (4)..(5): Xaa in position 4 to 5 is any or no amino acid
LXLXXHGE

SEQ ID NO: 66413 - protein, 41 aa, Artificial sequence; identical to SEQ ID NO: 27882
  Consensus
  Variant (2)..(2): Xaa in position 2 is any amino acid
  Variant (4)..(4): Xaa in position 4 is Ile, Leu or Val
  Variant (5)..(5): Xaa in position 5 is Ala, Leu, Pro or Val
  Variant (7)..(9): Xaa in position 7 to 9 is any amino acid
  Variant (10)..(10): Xaa in position 10 is Asp or His
  Variant (11)..(12): Xaa in position 11 to 12 is any amino acid
  Variant (13)..(13): Xaa in position 13 is Ala, Ser, Thr or Val
  Variant (15)..(17): Xaa in position 15 to 17 is any amino acid
  Variant (18)..(18): Xaa in position 18 is Ala, Ile or Val
  Variant (19)..(19): Xaa in position 19 is any amino acid
  Variant (20)..(20): Xaa in position 20 is Ala, Asp, Glu, Gly, Asn, Gln, Ser or Thr
  Variant (22)..(24): Xaa in position 22 to 24 is any amino acid
  Variant (25)..(26): Xaa in position 25 to 26 is any or no amino acid
  Variant (28)..(29): Xaa in position 28 to 29 is any or no amino acid
  Variant (31)..(31): Xaa in position 31 is Ser or Thr
  Variant (33)..(33): Xaa in position 33 is Ser or Thr
  Variant (37)..(40): Xaa in position 37 to 40 is any amino acid

SEQ ID NO: 66414 - DNA, 1269 bp, Escherichia coli K12
  CDS (1)..(1269): transl_table=11
atgtttgccctctgtgatgtaaacgcgttttatgccagctgtgagacggtgtttcgccctgatttatggggtaaaccggtggttgtgctatcgaataatgacggttgcgttatcgcccgaaacgctgaggcaaaggcgcttggcgttaaaatgggcgatccctggttcaaacaaaaagatctgtttcgtcgctgtggcgtggtttgctttagcagcaattatgagctttacgcagacatgagcaatcgggtgatgtcgacgctggaagagctatcgccccgcgtcgagatttacagtattgatgaggcattctgcgatctgacaggtgtgcgtaattgtcgcgatctgactgattttggcagagaaattcgcgcaacggtgctacaacgtacccatcttactgttggtgtggggatcgcccagaccaaaacgctggctaagcttgccaatcatgcggcaaaaaaatggcagcggcagacgggtggggtggtggatttatcaaatctggaacgccagcgtaaattaatgtctgctctccccgtggatgacgtctgggggattggacggcggatcagcaaaaaactggacgcgatggggatcaaaaccgttctcgatttggcggatacagatatccggtttatccgtaaacattttaatgtcgtgctcgaaagaacggtgcgtgaactgcgcggcgaaccctgtttgcaactggaagagtttgcaccgacgaagcaggaaattatctgttcccgctcgtttggtgaacgcatcacggattatccgtcgatgcggcaggccatttgtagttacgctgcccgggcggcggaaaaacttcgcagcgagcatcaatattgtcggtttatctccacgtttattaagacgtcaccatttgcgctcaatgaaccttattacggcaatagcgcgtcggtaaaactgctgacgcccactcaggacagcagggatatcattaacgctgctacgcgatctctggatgccatctggcaagcgggccatcgttaccaaaaagcgggcgtgatgctgggggatttcttcagtcagggagtcgcgcagctcaatttattcgatgacaacgcaccgcgccccgggagtgagcaattgatgacggtaatggatacactgaatgctaaagagggcagaggaacactctattttgccgggcaggggatccagcaacaatggcagatgaagcgagccatgctttcaccacgttatacaacgcgaagttctgatttactgagggtcaaataa

SEQ ID NO: 66415 - protein, 422 aa, Escherichia coli K12 [sequence omitted]

SEQ ID NO: 66416 - DNA, 1209 bp, Salmonella typhi
  CDS (1)..(1209): transl_table=11
atggaccccaaacttgccaaatccccgctcatcatcgcgagcaacaacgatgccaccattatcgccatgaacaggctcgccaaaaatacagggctcaaacgcgggatgcctatcttcaaatgccgggatctgattgagcagcatcatattgcggtacggagctccaactttacgttgtacgaagattattccaaccggtttcatgaaacgctggaggggtttgccgaggataccgatcgttacagcgtggatgaaagcttcatgctactgaaaaacatggacaaaatagtagattttgaagagtacggatgcctgatcagacgaacgctgctacacaatctttcgctcacctgcgggattggagtatcgaccacgaaaacgctcgcaaaattatgcacctacgccagtaagcgatgggcagcaactggtggtgtggtcgtccttacagacccattccgaattaaaaaactgctgagtctcatcagtacccgggaaatctggggcattggccgcaaaatcagtgagcggctggctgcgtacgggatcatcacggcctgcgacttttatgacagcgatgtgcggtttttacgaaaggcattcggtgttgaaatggaacgtacctggcgggagctgcatggcgagtcctgtttccggttgcatgaatcccctcctgtcagacaacaaattatcgtctcgcggagctttggccagcgccttaatacattcagcaagatgcatgaggcagtgtcattctttaccggccgtgccgctgaacagcttcgaaacgatggctcctggactcgccaaatcaccgtgtttatccagagcagcccgtttgccagagctgaaacccggtacagcagctgcggtattgagccgcttactgcgacgcaggacacccgcgacctggtcagtgcggcaggcgccatactgacccgaatctacaaacccggcatagattatgcgaaggcgggcgtgatgctttcgtcaatgaccgatggcactgagcagctatccctgttcgatgaacgtcccgccaggcgaggcagtgaagcactgatgaaggtgatggatcggtttaacaaagagcatcgaggctctctgtttctggcttgcgaagggattcatcaggatttccgggggaagcaggccatgctgtccccacggtataccactcgctggaatgagttacttgtcgtcaaagcctga

SEQ ID NO: 66417 - protein, 402 aa, Salmonella typhi
MDPKLAKSPLIIASNNDATIIAMNRLAKNTGLKRGMPIFKCRDLIEQHHIAVRSSNFTLYEDYSNRFHETLEGFAEDTDRYSVDESFMLLKNMDKIVDFEEYGCLIRRTLLHNLSLTCGIGVSTTKTLAKLCTYASKRWAATGGVVVLTDPFRIKKLLSLISTREIWGIGRKISERLAAYGIITACDFYDSDVRFLRKAFGVEMERTWRELHGESCFRLHESPPVRQQIIVSRSFGQRLNTFSKMHEAVSFFTGRAAEQLRNDGSWTRQITVFIQSSPFARAETRYSSCGIEPLTATQDTRDLVSAAGAILTRIYKPGIDYAKAGVMLSSMTDGTEQLSLFDERPARRGSEALMKVMDRFNKEHRGSLFLACEGIHQDFRGKQAMLSPRYTTRWNELLVVKA

SEQ ID NO: 66418 - DNA, 1275 bp, Salmonella enterica subsp. enterica serovar Choleraesuis
  CDS (1)..(1275): transl_table=11
atgttcgctttggctgacgtcaactcgttctatgccagttgcgaaaaggtctttcgccccgatttgcgtgacaggtctgtggtggtcctgagtaacaacgatggttgtgtaattccgcgcagcgctgaagcaaaaaaactgggcataaaaatgggggtgccgtggtttcaactgaggtcggcgaaatttccggagccggttatcgcgttctccagtaattacgccctctacgcatcaatgtcgaacagggtcatggttcaccaggaagagctggcgccacgcgttgagcagtactccattgacgagatgtttctggatattcgcggtatagacagttgcatcgatttcgaggatttcggccgacagctgcgtgagcacgttcgttccggcacagggctgaccatcggcgtcggaatgggaccgaccaaaacgctggctaaaagcgcgcaatgggcatcgaaagaatggtcacagttcggaggcatgcttgccctgacgttacacaatcagaaacgaacggagaaactgctgtcactgcaaccggtggaggaaatctggggtgtgggccgcaggatctcaaagaagctgaacacaatggggatcaccacagcactgcagctggcccgcgcgaatccaacgttcatcaggaaaaactttaatgtggttctggagagaacggtccgggaactcaatggagaaagctgtatttccctggaggaagcaccgccccccaaacagcagatagtctgcagcagaagctttggagaacgagtcacgacttatgaagcgatgcggcaggcagtctgtcagcacgctgaacgtcgcgccgaaaagctgcgtggggaacggcagttctgcaggcatattgccgtgtttgtgaaaacatcgccgttcgccgtaactgagccctactacggtaatctggccagtgaaaaactgctcatccccacgcaggatacacgggacatcattgccgctgccgtcagagctctggacaggatctgggtggatggtcaccgttacgcaaaggcaggctgtatgctgaacgatttcacgccaaccagggtatcgcagcttaatttgtttgatgaagtacagccgcgggaacggagcgagcagctgatgcaagtcctagatgggattaaccatccgggcaaggggaaaatatggttcgccggtcgggggattgcccccgagtggcagatgaaaagggaactactttcgccagcttatacgacacgttgggcagatattcctgcagcgaaattgacttga

SEQ ID NO: 66419 - protein, 424 aa, Salmonella enterica subsp. enterica serovar Choleraesuis
MFALADVNSFYASCEKVFRPDLRDRSVVVLSNNDGCVIPRSAEAKKLGIKMGVPWFQLRSAKFPEPVIAFSSNYALYASMSNRVMVHQEELAPRVEQYSIDEMFLDIRGIDSCIDFEDFGRQLREHVRSGTGLTIGVGMGPTKTLAKSAQWASKEWSQFGGMLALTLHNQKRTEKLLSLQPVEEIWGVGRRISKKLNTMGITTALQLARANPTFIRKNFNVVLERTVRELNGESCISLEEAPPPKQQIVCSRSFGERVTTYEAMRQAVCQHAERRAEKLRGERQFCRHIAVFVKTSPFAVTEPYYGNLASEKLLIPTQDTRDIIAAAVRALDRIWVDGHRYAKAGCMLNDFTPTRVSQLNLFDEVQPRERSEQLMQVLDGINHPGKGKIWFAGRGIAPEWQMKRELLSPAYTTRWADIPAAKLT

SEQ ID NO: 66420 - DNA, 1269 bp, Escherichia coli O157:H7 EDL933
  CDS (1)..(1269): transl_table=11
atgtttgccctctgtgatgtaaacgcgttttatgccagctgtgagacggtgtttcgccctgagttatggggtaaaccggtggttgtgctatcgaataatgacggttgcgttatcgcccgaaacgctgaggcaaaggcgcttggcgttaaaatgggcgatccctggttcaaacaaaaagatctgtttcgtcgctgtggcgtggtttgctttagcagcaattatgagctttacgcagacatgagcaatcgggtgatgtcgacgctggaagaactatcgccccgcgtcgagatttacagtattgatgaggcattctgcgatctgacaggtgtgcgtaattgtcgcgatctgactgactttggcagagaaattcgcgcaacggtgctacaacgtacccatcttactgttggtgtggggatcgcccagaccaaaacgctggctaagcttgccaatcatgcggcaaaaaaatggcagcggcagacgggtggggtggtggatttatcaaatctggawygccagcgtaaattaatgtctgctctccccgtggatgacgtctgggggattggacggcggatcagcaaaaaactggacgcgatggggatcaaaaccgttctcgatttggcggatacagatatccggtttatccgtaaacattttaatgtcgtgctcgaaagaacggtgcgtgaactgcgcggtgaaccctgtttgcaactggaagaatttgcaccgacaaagcaggaaattatctgttcccgctcgtttggtgaacgcatcacggattatacgtcgatgcggcaggccatttgtagttacgctgcccgggcggcggaaaaacttcgcagtgagcatcaatattgtcggtttatctccacatttattaagacgtcaccatttgcgctcaatgaaccttattacggcaatagcgcgtcggtaaaactgctgacgcccactcaggacagcagggatatcattaacgccgctacgcgatctctggatgccatctggcaagcgggccatcgctaccaaaaagcgggcgtgatgctgggggatttcttcagtcagggagtcgcgcagctcaatttattcgatgacaacgctccgcgccccgggagtgagcaattgatggcggtaatggatacactgaatgctaaagagggcagaggaacactctattttgccgggcaggggatccagcaacaatggcagatgaagcgagccatgctttcaccacgttatacaacgcgaagttctgatttactgcgggtcaaataa

SEQ ID NO: 66421 - protein, 422 aa, Escherichia coli O157:H7 EDL933
  misc_feature (170)..(171): Xaa can be any naturally occuring amino acid
MFALCDVNAFYASCETVFRPELWGKPVVVLSNNDGCVIARNAEAKALGVKMGDPWFKQKDLFRRCGVVCFSSNYELYADMSNRVMSTLEELSPRVEIYSIDEAFCDLTGVRNCRDLTDFGREIRATVLQRTHLTVGVGIAQTKTLAKLANHAAKKWQRQTGGVVDLSNLXXQRKLMSALPVDDVWGIGRRISKKLDAMGIKTVLDLADTDIRFIRKHFNVVLERTVRELRGEPCLQLEEFAPTKQEIICSRSFGERITDYTSMRQAICSYAARAAEKLRSEHQYCRFISTFIKTSPFALNEPYYGNSASVKLLTPTQDSRDIINAATRSLDAIWQAGHRYQKAGVMLGDFFSQGVAQLNLFDDNAPRPGSEQLMAVMDTLNAKEGRGTLYFAGQGIQQQWQMKRAMLSPRYTTRSSDLLRVK

SEQ ID NO: 66422 - DNA, 1269 bp, Escherichia coli O157:H7
  CDS (1)..(1269): transl_table=11
atgtttgccctctgtgatgtaaacgcgttttatgccagctgtgagacggtgtttcgccctgagttatggggtaaaccggtggttgtgctatcgaataatgacggttgcgttatcgcccgaaacgctgaggcaaaggcgcttggcgttaaaatgggcgatccctggttcaaacaaaaagatctgtttcgtcgctgtggcgtggtttgctttagcagcaattatgagctttacgcagacatgagcaatcgggtgatgtcgacgctggaagaactatcgccccgcgtcgagatttacagtattgatgaggcattctgcgatctgacaggtgtgcgtaattgtcgcgatctgactgactttggcagagaaattcgcgcaacggtgctacaacgtacccatcttactgttggtgtggggatcgcccagaccaaaacgctggctaagcttgccaatcatgcggcaaaaaaatggcagcggcagacgggtggggtggtggatttatcaaatctggaacgccagcgtaaattaatgtctgctctccccgtggatgacgtctgggggattggacggcggatcagcaaaaaactggacgcgatggggatcaaaaccgttctcgatttggcggatacagatatccggtttatccgtaaacattttaatgtcgtgctcgaaagaacggtgcgtgaactgcgcggtgaaccctgtttgcaactggaagaatttgcaccgacaaagcaggaaattatctgttcccgctcgtttggtgaacgcatcacggattatacgtcgatgcggcaggccatttgtagttacgctgcccgggcggcggaaaaacttcgcagtgagcatcaatattgtcggtttatctccacatttattaagacgtcaccatttgcgctcaatgaaccttattacggcaatagcgcgtcggtaaaactgctgacgcccactcaggacagcagggatatcattaacgccgctacgcgatctctggatgccatctggcaagcgggccatcgctaccaaaaagcgggcgtgatgctgggggatttcttcagtcagggagtcgcgcagctcaatttattcgatgacaacgctccgcgccccgggagtgagcaattgatggcggtaatggatacactgaatgctaaagagggcagaggaacactctattttgccgggcaggggatccagcaacaatggcagatgaagcgagccatgctttcaccacgttatacaacgcgaagttctgatttactgcgggtcaaataa

SEQ ID NO: 66423 - protein, 422 aa, Escherichia coli O157:H7
MFALCDVNAFYASCETVFRPELWGKPVVVLSNNDGCVIARNAEAKALGVKMGDPWFKQKDLFRRCGVVCFSSNYELYADMSNRVMSTLEELSPRVEIYSIDEAFCDLTGVRNCRDLTDFGREIRATVLQRTHLTVGVGIAQTKTLAKLANHAAKKWQRQTGGVVDLSNLERQRKLMSALPVDDVWGIGRRISKKLDAMGIKTVLDLADTDIRFIRKHFNVVLERTVRELRGEPCLQLEEFAPTKQEIICSRSFGERITDYTSMRQAICSYAARAAEKLRSEHQYCRFISTFIKTSPFALNEPYYGNSASVKLLTPTQDSRDIINAATRSLDAIWQAGHRYQKAGVMLGDFFSQGVAQLNLFDDNAPRPGSEQLMAVMDTLNAKEGRGTLYFAGQGIQQQWQMKRAMLSPRYTTRSSDLLRVK

SEQ ID NO: 66424 - DNA, 1275 bp, Salmonella typhimurium LT2
  CDS (1)..(1275): transl_table=11
atgttcgctttggctgacgtcaactcgttctatgccagttgcgaaaaggtctttcgccccgatttgcgtgacaggtctgtggtggtcctgagtaacaacgatggttgtgtaatcgcgcgcagcgctgaagcaaaaaaactgggcataaaaatgggggtgccgtggtttcaactgaggtcggcgaaatttccggagccggttatcgcgttctccagtaattacgccctctacgcatcaatgtcgaacagggtcatggttcacctggaagagctggcgccacgcgttgagcagtactccattgacgagatgtttctggatattcgcggtatagacagttgcatcgatttcgaggatttcggccgacagctgcgtgagcacgttcgttccggcacagggctgaccatcggcgtcggaatgggaccgaccaaaacgctggctaaaagcgcgcaatgggcatcgaaagaatggtcacagttcggaggcgtgcttgccctgacgttacacaatcagaaacgaacggagaaactgctgtcactgcaaccggtggaggaaatctggggtgtgggccgcaggatctcaaagaagctgaacacaatggggatcaccacagcactgcagctggcccgcgcgaatccaacgttcatcaggaaaaactttaatgtggttctggagagaacggtccgggaactcaatggagaaagctgtatttccctggaggaagcaccgccccccaaacagcagatagtctgcagcagaagctttggagaacgagtcacgacttatgaagcgatgcggcaggcagtctgtcagcacgctgaacgtgccgccgaaaagctgcgtggggaacggcagttctgcaggcatattgccgtgtttgtgaaaacatcgccgttcgccgtaactgagccctactacggtaatctggccagtgaaaaactgctcatccccacgcaggatacacgggacatcattgccgctgccgtcagagctctggacaggatctgggtggatggtcaccgttacgcaaaggcaggctgtatgctgaacgatttcacgccaaccggggtatcgcagcttaatttgtttgatgaagtacagccgcgggaacggagcgagcagctgatgcaagtcctggatgggattaaccatccgggcaaggggaaaatatggttcgccggtcgggggattgcccccgagtggcagatgaaaagggaactactttcgccagcttatacgacacgttgggcagatattcctgcagcgaaattgacttga

SEQ ID NO: 66425 - protein, 424 aa, Salmonella typhimurium LT2
MFALADVNSFYASCEKVFRPDLRDRSVVVLSNNDGCVIARSAEAKKLGIKMGVPWFQLRSAKFPEPVIAFSSNYALYASMSNRVMVHLEELAPRVEQYSIDEMFLDIRGIDSCIDFEDFGRQLREHVRSGTGLTIGVGMGPTKTLAKSAQWASKEWSQFGGVLALTLHNQKRTEKLLSLQPVEEIWGVGRRISKKLNTMGITTALQLARANPTFIRKNFNVVLERTVRELNGESCISLEEAPPPKQQIVCSRSFGERVTTYEAMRQAVCQHAERAAEKLRGERQFCRHIAVFVKTSPFAVTEPYYGNLASEKLLIPTQDTRDIIAAAVRALDRIWVDGHRYAKAGCMLNDFTPTGVSQLNLFDEVQPRERSEQLMQVLDGINHPGKGKIWFAGRGIAPEWQMKRELLSPAYTTRWADIPAAKLT

SEQ ID NO: 66426 - DNA, 1209 bp, Pseudomonas putida
  CDS (1)..(1209): transl_table=11
atgtgttctaaagaccctcgaccgatttttgggttggtggatgtcaactcgttctactgcagctgcgaacgcatcttccggcctgagttgaggcaccgccctgtcgtcgttctttcgaattcggatggttgcattgtggcccgtacgaacgaagcaaaagccctcggcttgaagatgggcgacccctacttcaaggtgcggaatttcctggagcaaaacggcgtagcggtgttcagcagcaactacaccttgtacggggaattgagccaccgcgtaggtgtggccatcgcctccctggtccctgagtgggagcagtattccatcgatgaactgttcgtgaacctcgatggcctgcccgaaccgatcatcgatgttggccgtgcgatacaagcccgcgtgctgcagtggacagcgcttccggttggtgtcggcataggtcacacgaaaacattggcaaaggcagcgcagcacgcatcgaaggtatggcgggagaagacaggaggggtggtcgacctccgcaagccggatgcagtcgaatggctgctccggcgaatgccggtcgatgaggtatggggcatcggcagtcgcatgcgtgacaacctggcccgcgacgggatcaccacggcatgggagctgtcgcaagcggatgcgcgggcaatgggccgcaaatacagcgtcgtactggaacgtacgatacgggagctgcagggtgaatcctgcatggacctggagcagacggtagcgccaaagcaaacgatctgctctagcaaaatgttcggccagcgtgttcacacgctccagggcctgcaagaagcattggcgacgtacattcaccgcgcagcggagaagctgcgcctgcagcgctcgctgtgcggtgccatgcgcatcggcattcagacctcgtttcacggggatggtccgaaatacgccaacgccgccacgtgcatacctgcctatccaacagacgacgtacgccagctgaccaaatacgccctgcaggctgcagagcagatctaccggccaggcttcgcgtacagcaaagccgaggtgctgctgttggatctgcgcaagcgcggggagtacacgcaagatttgttcagcccgagccagcctgagcgctccgacgcgctcatggccacgatggacaagatcaaccggcgatgggggcatgactgcctgcgaactgcagcgggtgccactgacccctga

SEQ ID NO: 66427 - protein, 402 aa, Pseudomonas putida
MCSKDPRPIFGLVDVNSFYCSCERIFRPELRHRPVVVLSNSDGCIVARTNEAKALGLKMGDPYFKVRNFLEQNGVAVFSSNYTLYGELSHRVGVAIASLVPEWEQYSIDELFVNLDGLPEPIIDVGRAIQARVLQWTALPVGVGIGHTKTLAKAAQHASKVWREKTGGVVDLRKPDAVEWLLRRMPVDEVWGIGSRMRDNLARDGITTAWELSQADARAMGRKYSVVLERTIRELQGESCMDLEQTVAPKQTICSSKMFGQRVHTLQGLQEALATYIHRAAEKLRLQRSLCGAMRIGIQTSFHGDGPKYANAATCIPAYPTDDVRQLTKYALQAAEQIYRPGFAYSKAEVLLLDLRKRGEYTQDLFSPSQPERSDALMATMDKINRRWGHDCLRTAAGATDP

SEQ ID NO: 66428 - DNA, 1260 bp, Salmonella enterica subsp. enterica serovar Typhi str. CT18
  CDS (1)..(1260): transl_table=11
atgtacatgcacgttgatatcaatggagcctacgcggcatttgaatgcgccatggaccccaaacttgccaaatccccgctcatcatcgcgagcaacaacgatgccaccattatcgccatgaacaggctcgccaaaaatacagggctcaaacgcgggatgcctatcttcaaatgccgggatctgattgagcagcatcatattgcggtacggagctccaactttacgttgtacgaagattattccaaccggtttcatgaaacgctggaggggtttgccgaggataccgatcgttacagcgtggatgaaagcttcatgctactgaaaaacatggacaaaatagtagattttgaagagtacggatgcctgatcagacgaacgctgctacacaatctttcgctcacctgcgggattggagtatcgaccacgaaaacgctcgcaaaattatgcacctacgccagtaagcgatgggcagcaactggtggtgtggtcgtccttacagacccattccgaattaaaaaactgctgagtctcatcagtacccgggaaatctggggcattggccgcaaaatcagtgagcggctgactgcgtacgggatcatcacggcctgcgacttttatgacagcgatgtgcggtttttacgaaaggcattcggtgttgaaatggaacgtacctggcgggagctgcatggcgagtcctgtttccggttgcatgaatcccctcctgtcagacaacaaattatcgtctcgcggagctttggccagcgccttaatacattcagcaagatgcatgaggcagtgtcattctttaccggccgtgccgctgaacagcttcgaaacgatggctcctggactcgccaaatcaccgtgtttatccagagcagcccgtttgccagagctgaagcccggtacagcagctgcggtattgagccgcttactgcgacgcaggacacccgcgacctggtcagtgcggcaggcgccatactgacccgaatctacaaacccggcatagattatgcgaaggcgggcgtgatgctttcgtcaatgaccgatggcactgagcagctatccctgttcgatgaacgtcccgccaggcgaggcagtgaagcactgatgaaggtgatggatcggtttaacaaagagcatcgaggctctctgtttctggcttgcgaagggattcatcaggatttccgggggaagcaggccatgctgtccccacggtataccactcgctggaatgagttacttgtcgtcaaagcctga

SEQ ID NO: 66429 - protein, 419 aa, Salmonella enterica subsp. enterica serovar Typhi str. CT18
MYMHVDINGAYAAFECAMDPKLAKSPLIIASNNDATIIAMNRLAKNTGLKRGMPIFKCRDLIEQHHIAVRSSNFTLYEDYSNRFHETLEGFAEDTDRYSVDESFMLLKNMDKIVDFEEYGCLIRRTLLHNLSLTCGIGVSTTKTLAKLCTYASKRWAATGGVVVLTDPFRIKKLLSLISTREIWGIGRKISERLTAYGIITACDFYDSDVRFLRKAFGVEMERTWRELHGESCFRLHESPPVRQQIIVSRSFGQRLNTFSKMHEAVSFFTGRAAEQLRNDGSWTRQITVFIQSSPFARAEARYSSCGIEPLTATQDTRDLVSAAGAILTRIYKPGIDYAKAGVMLSSMTDGTEQLSLFDERPARRGSEALMKVMDRFNKEHRGSLFLACEGIHQDFRGKQAMLSPRYTTRWNELLVVKA

SEQ ID NO: 66430 - DNA, 1287 bp, Xanthomonas campestris pv. campestris str. ATCC 33913
  CDS (1)..(1287): transl_table=11
atgttcgcgctgatcgacggcaataacttctacgctagctgcgagcgcgtgttccagcccgagctgcgtggcaggccgttggtcgtgctcagcaacaacgatggctgcgctattgctcgatcggacgaggccaaagccctaggtgtcacgatgggccagccgatccacaaggtgccaccgcagatccgtcgccggctagcgctgcgctccgcaaatttcggtctctacggcgacatcgcttctcgcattggcgtcatcctgcgtcaggccgcgccacgcgtggaggtgtattcgatcgacgagtcgttcctcgacctggccggcatccgcgattgccggcagctggcggtcgacctgcgcgagcgagttcaccaatggacgggcatccccaactgcattggcatcgcgccgaccaagaccttggccaagctggccaaccgggtcgccaaggatgcagcgcgtaagccgggcagctacccagctagtctggccggcgtctgtgacctggctgcgctcagcgccagtgagctcgatgcggtgctgcgagccacggcggttggcgacctctggggcgttggcaggcgctggggcgcgaggctgcaggcacgcggcgtctttacggcagccgatctgcgagacgccgctgcagacgacttgctagcggagttcggtgtggtcatggcgcgcacgcaacgggagttgcagggccatgcatgcctgcagctggaggaagtcgagcccgaccgtcagcagatcatggtcagccggtcgttcgggacctgggtgaccgatccacaagatatggcggaggcgctggcaacttttgccatgcgcgccaccgagaagctgcgcgcacgcgggctgaccacatgcgccattggcatctttgccgagacggattcgttcaagcccggtgtgccgcagcacaacccatcacgcaccgcgccacttgcctcggctacatccgacagccgcgtggtgctcacggttgtgcgccggctgctccagggcttcatgcgcgatggcttcacctacaagaaggccggcgtgtgcctaatggatctcgccgcgcccgaggatctgcagggcgacctcttcaccccggcacgcataggcgacgacaagctgatgagcaccctggatgccatcaaccggcggttcggtcgcggcacggccgggctgggtgcaagcggctggcagaagtcccccgaatgggcatcgcggcaagatctgctatcgggccgcttcaccacatcgctagctgacctccctcgcgcctcctgctag

SEQ ID NO: 66431 - protein, 428 aa, Xanthomonas campestris pv. campestris str. ATCC 33913
MFALIDGNNFYASCERVFQPELRGRPLVVLSNNDGCAIARSDEAKALGVTMGQPIHKVPPQIRRRLALRSANFGLYGDIASRIGVILRQAAPRVEVYSIDESFLDLAGIRDCRQLAVDLRERVHQWTGIPNCIGIAPTKTLAKLANRVAKDAARKPGSYPASLAGVCDLAALSASELDAVLRATAVGDLWGVGRRWGARLQARGVFTAADLRDAAADDLLAEFGVVMARTQRELQGHACLQLEEVEPDRQQIMVSRSFGTWVTDPQDMAEALATFAMRATEKLRARGLTTCAIGIFAETDSFKPGVPQHNPSRTAPLASATSDSRVVLTVVRRLLQGFMRDGFTYKKAGVCLMDLAAPEDLQGDLFTPARIGDDKLMSTLDAINRRFGRGTAGLGASGWQKSPEWASRQDLLSGRFTTSLADLPRASC

SEQ ID NO: 66432 - DNA, 1269 bp, Proteus vulgaris
  CDS (1)..(1269): transl_table=11
gtgatgctgtgtctcgcagatattaattcgttctactgttcgtgtgaggcggcatttaacccacggcttgcaggtttacctatcgttgtgttggcaaataatgatcacattgtcatatcgcgctcaaaagaagcaaaagccctgggcatcaaaatgggggcgctgtactttgagaatatcaacttctttaaatatcataatgttcaggtgtttagttcaaattattcgctttatcaaaacgtgtctgaccgtgttatgtctgtattagctggcttctcaatcggtatggaagtgtattcaattgacgaggcctttctaactgtgccggatagaatacctaactcaagccttgaagattttggtcgcgcgatacagcaagacatattacagatcactcacgtcccggtaggcgtaggctttggccccacaaaaacgctcgcaaaactggctaatcacgcggctaagtcctggtcaaaaacgggcggggtggtggatttgagccaaaaaacgcgacaaagaaaattgatggcgttattaccggtgggtgatgtgtggggagttggaaggcgcatcgccgcgaagttaaaggtcatgggtattcataccattttagacttggccgacgctgatattgcgatgatcagaaaaacctttggggttgttgttgaaaggaccgtgcgggagcttaacggggacgcttgtatcgaattggaggaagtccggaaagttaaggagcagatcatctcgtctaaatcgttcggtaagaaagttgagcggtatgatgatatgcaccaggcggtatgcagctacgctgagcgagctagcatgaagttaagagaagaagaccagctgtgcagtgtggtctccgtgtttgtgagtaccagccactattctcccggctcaatgtacagcaatcgtgccatcgagcgcttggtgtatcccagcgccgatacgcgggatattatcaatgccgcagtcagggcgttgaatgcaatttggcgagacggccaccagtatcacaaagccggaattatgttgtcggacttcaccgattccaagataactcagttcgatttatttaatgaagtacagccattcaaaagaagtgaagagctcatgcgaatgctggatgacatgaaccggtcgggaaaattcaacattggctttgcaggaaagggttgcgatcctacctggcaaatgaggcggggaatgttgtctcctgaatacacaacaaacgtcaacgagatccctattgctaaggtgcgttga

SEQ ID NO: 66433 - protein, 422 aa, Proteus vulgaris
MMLCLADINSFYCSCEAAFNPRLAGLPIVVLANNDHIVISRSKEAKALGIKMGALYFENINFFKYHNVQVFSSNYSLYQNVSDRVMSVLAGFSIGMEVYSIDEAFLTVPDRIPNSSLEDFGRAIQQDILQITHVPVGVGFGPTKTLAKLANHAAKSWSKTGGVVDLSQKTRQRKLMALLPVGDVWGVGRRIAAKLKVMGIHTILDLADADIAMIRKTFGVVVERTVRELNGDACIELEEVRKVKEQIISSKSFGKKVERYDDMHQAVCSYAERASMKLREEDQLCSVVSVFVSTSHYSPGSMYSNRAIERLVYPSADTRDIINAAVRALNAIWRDGHQYHKAGIMLSDFTDSKITQFDLFNEVQPFKRSEELMRMLDDMNRSGKFNIGFAGKGCDPTWQMRRGMLSPEYTTNVNEIPIAKVR

SEQ ID NO: 66434 - DNA, 1269 bp, Shigella flexneri 2a str. 301
  CDS (1)..(1269): transl_table=11
atgtttgccctctgtgatgtaaacgcgttttatgccagctgtgagacggtgtttcgccctgatttatggggtaaaccggtggttgtgctatcgaataatgacggttgcgttatcgcccgaaacgctgaggcaaaggcgctgggcgttaaaatgggcgatccctggttcaaacaaaaagatctgtttcgtcgctgtggtgtggtttgctttagcagcaattatgagctttacgcagacatgagcaatcgggtgatgtcgacgctggaagaactatcgccccgcgtcgagatttacagtattgatgaagcattctgcgatctgacaggtgtgcgtaattgtcgcgatctgactgattttggcagagaaattcgcgcaacggtgctacaacgtacccatcttactgttggtgtggggatcgcccagaccaaaacgttggctaagcttgccaatcatgcggcaaaaaaatggcagcggcagacgggtggggtggtggatttatcaaatctggaacgccagcgtaaattaatgtctgctctccccgtggatgacgtctgggggattggacggcggatcagcaaaaaactggacgcgatggggatcaaaaccgttctcgatttggcggatacagatatccggtttatccgtaaacattttaatgtcatgctcgaaagaacggtgcgtgaactgcgcggcgaaccctgtttgcaactggaagagtttgcaccgacgaagcaggaaattatctgttcccgctcgtttggtgaacgcatcacggattatacgtcgatgcggcaggccatttgtagttacgctgcccgggcggcggaaaaacttcgcagtgagcatcaatattgtcggtttatctccacatttattaagacgtcaccatttgcgctcaatgaaccttattacggcaatagcgcgtcggtaaaactgctgacgcccactcaggacagcagggatatcattaacgctgctacgcgatctctggatgccatctggcaagcgggccatcgctaccaaaaagcgggcgtgatgctgggggatttcttcagtcagggagtcgcgcagctcaatttattcgatgacaacgcaccgcgccccgggagtgagcaattgatggcggtaatggatactctgaatgctaaagagggcagaggaacactctattttgccgggcaggggatccaacaacaatggcagatgaagcgagctatgctttcaccacgttatacaacgcgaagttctgatttactgcgggtcaaataa

SEQ ID NO: 66435 - protein, 422 aa, Shigella flexneri 2a str. 301
MFALCDVNAFYASCETVFRPDLWGKPVVVLSNNDGCVIARNAEAKALGVKMGDPWFKQKDLFRRCGVVCFSSNYELYADMSNRVMSTLEELSPRVEIYSIDEAFCDLTGVRNCRDLTDFGREIRATVLQRTHLTVGVGIAQTKTLAKLANHAAKKWQRQTGGVVDLSNLERQRKLMSALPVDDVWGIGRRISKKLDAMGIKTVLDLADTDIRFIRKHFNVMLERTVRELRGEPCLQLEEFAPTKQEIICSRSFGERITDYTSMRQAICSYAARAAEKLRSEHQYCRFISTFIKTSPFALNEPYYGNSASVKLLTPTQDSRDIINAATRSLDAIWQAGHRYQKAGVMLGDFFSQGVAQLNLFDDNAPRPGSEQLMAVMDTLNAKEGRGTLYFAGQGIQQQWQMKRAMLSPRYTTRSSDLLRVK

SEQ ID NO: 66436 - DNA, 1257 bp, Shewanella oneidensis MR-1
  CDS (1)..(1257): transl_table=11
atgtttgcccttgttgatgccaatagtttttactgcagttgcgagcaggtgtttcggcccgattggcgtggtaaaccggtggtggtgctcagtaataacgatggaatggtcgtcgctgccaatcgccaagcgaaagaagcgggcatccctaaatttgtgccctactttcaaatacgcgatctttgccagaaaaaaggcgtgattgcgctatcgtccaattacgaattgtatgcggatttgtcggccaaaatgatgcaaatcatcgggcgctttgcgcccgaacaatacgtatattcgattgacgaatcctttctctcttttacccgctgctatcccgctatcacgtgtttaaaaacgcaggcacaggcgatccgccgtgctgtgtggaaagaggctcgcttaccggtgtgtgttggcattgggagcaccttaacgctcgccaaaatcgctaaccatgccgctaaaaaaatatctggttatgccggtgtttgcgtgattgagtcagagccgcaacgcctagcgatattgcaacaaatgccagtgggtgaagtgtggggcattgggcggcgcttgtctgccaaattaaccctaatgggcattactacggcggcgcaattggcggctatgccgccagggctggcacgtaaacaatttagtattgaaatcgagcgcactgtgcgcgagttaaacggccaagtgtgcaaacaatgggatgaagcgcgggccgataaacagcaaatattttcaacccgtagcgttggcgagcgaattatcgatattgatgcgctgcagcaagcactgtgtaagcacgctgggatcgctgccgcaaaagctcggcaacaaggctcaagctgtaaaagcatgttggtatttgccagtaattcgccacatgatgagcggcctgtgagttataaagctgtggtgcagtttccttgccctacttcatccactgccgagatcacggctgcagtatcacgagtgttaccacaagttttccgctctggtgtgcgttattacaaaattggcgtggggttaattgaattaatgcctaccaagcatattcagtatgatttgttccatgcccccaccgaaaaccccgcattgatgcaaacttttgataagttaaatcaacgctatggcagtgattgtatatttatggcggctcaaggtattgagcataaatgggccatgcgcagggataaattaaccccgcaatacactactaagtggcttaatttgcccaaagtgcagtgttag

SEQ ID NO: 66437 - protein, 418 aa, Shewanella oneidensis MR-1
MFALVDANSFYCSCEQVFRPDWRGKPVVVLSNNDGMVVAANRQAKEAGIPKFVPYFQIRDLCQKKGVIALSSNYELYADLSAKMMQIIGRFAPEQYVYSIDESFLSFTRCYPAITCLKTQAQAIRRAVWKEARLPVCVGIGSTLTLAKIANHAAKKISGYAGVCVIESEPQRLAILQQMPVGEVWGIGRRLSAKLTLMGITTAAQLAAMPPGLARKQFSIEIERTVRELNGQVCKQWDEARADKQQIFSTRSVGERIIDIDALQQALCKHAGIAAAKARQQGSSCKSMLVFASNSPHDERPVSYKAVVQFPCPTSSTAEITAAVSRVLPQVFRSGVRYYKIGVGLIELMPTKHIQYDLFHAPTENPALMQTFDKLNQRYGSDCIFMAAQGIEHKWAMRRDKLTPQYTTKWLNLPKVQC

SEQ ID NO: 66438 - DNA, 1269 bp, Escherichia coli CFT073
  CDS (1)..(1269): transl_table=11
atgtttgccctctgtgatgtaaacgcgttttatgccagctgtgagacggtgtttcgccctgatttatggggtaaaccggtggttgtgctatcgaataatgacggttgcgttatcgcccgaaacgctgaggcaaaggcgctgggcgttaaaatgggcgatccctggttcaaacaaaaagatctgtttcgtcgctgtggcgtggtttgctttagcagcaattatgagctttacgcagacatgagtaatcgggtgatgtcgacgctggaagaactatcgccccgcgtcgagatttacagtattgatgaggcattctgcgatctgacaggtgtgcataattgtcgcgatctgactgattttggcagagaaattcgcgcaacggtgctacaacgtacccatcttactgttggtgtggggatcgcccagaccaaaacgctggctaagcttgccaattatgcggcaaaaaaatggcagcggcagacgggcggggtggtggatttatcaaatctggaacgccagcgtaaattaatgtctgctctccccgtggatgaagtctgggggattggacggcggatcagcaaaaaactggacgcgatggggatcaaaaccgttctcgatttggcggattcagatatccggtttatccgtaaacattttaatgtcgtgctcgaaagaacggtgcgtggactgcgcggtgaaccctgtttgcaactggaagagtttgcaccgacgaagcaggaaattatctgttcccgctcgtttggtgaacgcatcacggattatccgtcgatgcggcaggccatttgtagttacgctgcccgggcggcggaaaaacttcgcagcgagcatcaatattgtcggtttatctccacgtttattaagacgtcaccatttgcgttcaatgaaccttattacggcaatagcgcatcggtaaaactgctgacgcccactcaggacagcagggatatcattaacgccgctacgcgatctctggatgccatctggcaagcgggccatcgctaccaaaaagcgggcgtgatgctgggggatttcttcagtcagggagtcgcgcagctcaatttattcgatgacaacgcaccgcgccccgggagtgagcaattgatggcggtaatggatacgctgaatgctaaagagggcagaggaacactctattttgccgggcaggggatccagcaacaatggcagatgaagcgtgccatgctttcaccatgttatacaacgcgaagttctgatttactgcgggtcaaataa

SEQ ID NO: 66439 - protein, 422 aa, Escherichia coli CFT073
MFALCDVNAFYASCETVFRPDLWGKPVVVLSNNDGCVIARNAEAKALGVKMGDPWFKQKDLFRRCGVVCFSSNYELYADMSNRVMSTLEELSPRVEIYSIDEAFCDLTGVHNCRDLTDFGREIRATVLQRTHLTVGVGIAQTKTLAKLANYAAKKWQRQTGGVVDLSNLERQRKLMSALPVDEVWGIGRRISKKLDAMGIKTVLDLADSDIRFIRKHFNVVLERTVRGLRGEPCLQLEEFAPTKQEIICSRSFGERITDYPSMRQAICSYAARAAEKLRSEHQYCRFISTFIKTSPFAFNEPYYGNSASVKLLTPTQDSRDIINAATRSLDAIWQAGHRYQKAGVMLGDFFSQGVAQLNLFDDNAPRPGSEQLMAVMDTLNAKEGRGTLYFAGQGIQQQWQMKRAMLSPCYTTRSSDLLRVK

SEQ ID NO: 66440 - DNA, 1257 bp, Vibrio vulnificus CMCP6
  CDS (1)..(1257): transl_table=11
atgtttgccctagttgatgctaattccttttattgtagtgctgagcaaatttttagacccgagtggagaggtaagcccgtaatcgttctgtcgaataatgatggctgtgtcgttgcagctaatcgtcaagctaaagaagcaggtatagcaaagtttaaaccttactttgaagtcaaagcgttgtgtgagttgaaaggtgtaattgctctatcatctaattatgaactttacgcagatttgtcgtccaaaatgatggatgttatcgggcggtttgcgcctgagcaatatatatactccattgatgaatcatttctttcctttcatcgctgctttcctgccattaaagacttacgagaacatggctctttaatccgacgagccgtttggaaagagtgtcgattaccagtatgtataggtatgggaacaacgctaaccctcgccaaaattgccaatcatgcagctaaaaaaattcaaggctgtaagggcgtttgcgttatcgacaatgaacatcagcgtacctctatattaaagcagctagaagttggtgatgtatggggggtgggcaaaaaaatatcaacacgattaaaacatatggggattaactcggcttatgatttgtctcagtatgccccagaacaagcacgtcgagaattttcagtcgaagttgaaagaaccgttcgtgaattaaatggtgtcgcttgcaagggctgggacacagctagagctgataaaaagcagatttactcaactcgtagtgttggaacaagaatcaccgaccttgaactactgaagcaagcactaagtaaacacgccgctatagcagcacataaagcacgaaatcaaaagtcgctgtgtaaagctatgctctgctttgcttccaattcaccattcgatgataaacctcagagcttccgtatagttcatcattttgcttatccaactgctgactcaatgcagttggtcaaaattgctacacaggcagcaacacaattgttcaaacctggtgtacgttattacaaaattggcatcggcttgatcgatctagttaatgggcagcacgaacaattagatctgttaaatcaaactccgagtaatgataagttaatgaaagtgtttgatagtcttaataatcggtatggcactgatacgctttttgttggttcccaaggcatagagcagaaatggagcatgcggagagaaatgcttactccgcaatatacaaccaactggctagatatacctaaagtaaggtgttaa

SEQ ID NO: 66441 - protein, 418 aa, Vibrio vulnificus CMCP6
MFALVDANSFYCSAEQIFRPEWRGKPVIVLSNNDGCVVAANRQAKEAGIAKFKPYFEVKALCELKGVIALSSNYELYADLSSKMMDVIGRFAPEQYIYSIDESFLSFHRCFPAIKDLREHGSLIRRAVWKECRLPVCIGMGTTLTLAKIANHAAKKIQGCKGVCVIDNEHQRTSILKQLEVGDVWGVGKKISTRLKHMGINSAYDLSQYAPEQARREFSVEVERTVRELNGVACKGWDTARADKKQIYSTRSVGTRITDLELLKQALSKHAAIAAHKARNQKSLCKAMLCFASNSPFDDKPQSFRIVHHFAYPTADSMQLVKIATQAATQLFKPGVRYYKIGIGLIDLVNGQHEQLDLLNQTPSNDKLMKVFDSLNNRYGTDTLFVGSQGIEQKWSMRREMLTPQYTTNWLDIPKVRC

SEQ ID NO: 66442 - DNA, 1305 bp, Citrobacter freundii
  CDS (1)..(1305): transl_table=11
atggggtgtggttacgttcactgttatgagtcaccgcccgtgtacgccttaatcgacgtcaattcgatgtactgcagctgcgaagaggcgttccgccctgatttgcgggggcgccctgtggtcgtcctcagcaacaacgacggggcgcttgttgcggtcaatcgcgcggcgaaagcgctgggagtgcgccgcggggaaccctatttccgctgccgtcgcctgctggaacagcataacgtcgccgtattcagttccaactacaccctttacgcctcattctccgccagatttgcaaccgtagtggaaagtctggcgccgcggacgtttgtttactcaattgatgagctctttgcggatgcgtctcacatggagggcgtgatgtcgccgcaggcgtttggccagcttttgcgggctgaagtgctgcgccagacaacgctcacctgtggagtgggcgtcgcgccaacgaagacgctggccaagctgtgcaaccacgccgcaaagacgtggcctgccaccgggggggttgtggcgctcagtgatcctgtgagactgaaaaggctgatgagcctggtgtcggccggcgatgtgtggggggttggccatcgtaccgaaaaagggctggcgacaatggggatcaaaacggcgctggcgctcgcagagatggatatccgacttgcacgccggctgtacggtgtgacgctggaacggaccatccgtgagctgcgtggcgaggcctgctttgccctggaagaaggtaccggcgcgaaacagcagcttgttgtatcccgctcgtttggatcgcgggtcacgcaactggcgcagatgcagcaggcggtgactaaatatgccacacgggcaggggaaaagttgcgccaggaaaaccgtctggcgaaggtggtaacggtctttatccgcagcagtgcttatgacgccggcggtgtgccctacagtaaccaggctacggaagtgctttccgtgccaagccaggatacccgcgacatcatcgccgcggcgcagctggggctgtcgcgtatctggcgtgagggtgtgcggtatgcaaaagccggcgtgatgctcagcgatctgcagggacatgaaacccagctggatctgtttgcgccggctgcagtgcggccgggcagcgaaaaactgatggccaccatcgacaaaataaacagggaaggaaggtcaagggtcttcttcgccggggaaggtattgatccggaatatgccatgcgccgtgaaatgttgtctccggcctacaccacgcagtggaaggatattcccgcggcgtttatgcgataa

SEQ ID NO: 66443 - protein, 434 aa, Citrobacter freundii
MGCGYVHCYESPPVYALIDVNSMYCSCEEAFRPDLRGRPVVVLSNNDGALVAVNRAAKALGVRRGEPYFRCRRLLEQHNVAVFSSNYTLYASFSARFATVVESLAPRTFVYSIDELFADASHMEGVMSPQAFGQLLRAEVLRQTTLTCGVGVAPTKTLAKLCNHAAKTWPATGGVVALSDPVRLKRLMSLVSAGDVWGVGHRTEKGLATMGIKTALALAEMDIRLARRLYGVTLERTIRELRGEACFALEEGTGAKQQLVVSRSFGSRVTQLAQMQQAVTKYATRAGEKLRQENRLAKVVTVFIRSSAYDAGGVPYSNQATEVLSVPSQDTRDIIAAAQLGLSRIWREGVRYAKAGVMLSDLQGHETQLDLFAPAAVRPGSEKLMATIDKINREGRSRVFFAGEGIDPEYAMRREMLSPAYTTQWKDIPAAFMR

SEQ ID NO: 66444 - DNA, 1269 bp, Salmonella enterica subsp. enterica serovar Typhi Ty2
  CDS (1)..(1269): transl_table=11
atgttcgcgctctgcgatgttaatagcttttacgcctcctgcgaaacggtctttcgtcctgatttatgtggccgaccggtggtggtgttatcaaacaatgatggctgcgttatcgcgtgtagcgccgaggcgaaacaactcggtatcgcagcaggtgagccatacttcaaacagaaagaacgcttccggcgatccggtgttgtttgcttcagcagtaattacgagctttacgctgatatgtcgaaccaggtaatgaccacactagaggagatggtgccgcgggtagaaatttacagcattgatgaggctttttgtgatctgacgggggtacgaaactgccgggatctgacagatttcgggcacgagataagagcgacggtcctgaagcgcacgcacctgactgtcggtgtaggcattgcccagacgaaaacccttgccaagctggctaaccatgctgcgaaaaagtggcagcgccagaccgacggggtggttgacctgtcgaacatcgatcgccagcgtcggctgctggccctgatacccgtagaggatgtctggggtgtcggcagacgcatcagtaagaagctcaatgccctgggcatcaagactgctctcgatctctctgaacaaagtacctggatcatcaggaaacacttcaatgtcgtgctggagcgtaccgtgagagagcttcgcggagagccatgtctggagcttgaagagtttgcgccggcaaagcaggaaatcgtttgtagccgctctttcggcgagcgggtcacagactatgaggaaatgcgccaggctgtttacagctacgctgcgcgcgcggcagaaaaactccgcggcgagcaccagtactgctgtttcatttcaacattcgtcaaaacatcaccctttgccctgaacgagccctactacggtaacagcgccgcggtgacgcttctcacccccacgcaggattcacgtgacattatcaatgcggctgtgaaatgtctggataaaatctggcgcgacggccatcgctaccagaaagcgggggtgatgctgggtggcttcttcagccagggcgtagcgcaactcaaccttttcgacgataacgcgccgcgcgccggtagtgcgaagttgatggaagtactggaccatcttaacgcaaaagacgggaaggggacgctgtacttcgccgggcaggggatgtcgcaacagtgggctatgaagcgagaaatgctttcgcctcggtacaccacaagatactctgatctactgcgtgttaagtaa

SEQ ID NO: 66445 - protein, 422 aa, Salmonella enterica subsp. enterica serovar Typhi Ty2
MFALCDVNSFYASCETVFRPDLCGRPVVVLSNNDGCVIACSAEAKQLGIAAGEPYFKQKERFRRSGVVCFSSNYELYADMSNQVMTTLEEMVPRVEIYSIDEAFCDLTGVRNCRDLTDFGHEIRATVLKRTHLTVGVGIAQTKTLAKLANHAAKKWQRQTDGVVDLSNIDRQRRLLALIPVEDVWGVGRRISKKLNALGIKTALDLSEQSTWIIRKHFNVVLERTVRELRGEPCLELEEFAPAKQEIVCSRSFGERVTDYEEMRQAVYSYAARAAEKLRGEHQYCCFISTFVKTSPFALNEPYYGNSAAVTLLTPTQDSRDIINAAVKCLDKIWRDGHRYQKAGVMLGGFFSQGVAQLNLFDDNAPRAGSAKLMEVLDHLNAKDGKGTLYFAGQGMSQQWAMKREMLSPRYTTRYSDLLRVK

SEQ ID NO: 66446 - DNA, 1275 bp, Salmonella enterica subsp. enterica serovar Typhi Ty2
  CDS (1)..(1275): transl_table=11
atgttcgccctggctgacgtcaacagcttctacgcgagctgtgaaaaagtatttcgtcccgatttacgtaatacacctgttgtggtgctcagtaacaacgatggatgtgttatcgcgcgttcaaaagaagcgaagcaactgggcattaaaatgggggttccgtggtttcaactgaaaacaaccgaatttcctgtacctgtcgttgcgttctcgagtaactacgaactctacgcgtcgatgtcgaaccgtgttatggcgcatctcgaagaactggcacctcgcgttgagcagtattctatcgacgaaatgtttcttgatgtgcgcaatattgacagttgtatcgattttgaagacttcggccggcagttgcgcgagcatgtacattcaggaaccggactgaccatcggagttgggatgggaccgaccaagacactggcaaaaagcgcacaatgggcgtctaaggaatggcggcagtttgagggcgtgcttgctctgacttcaggcaatccaaagcgaacggagaaactattgtcactgcagccagtagacgaaatctggggggttggtcgccggatctcgaagaaactgcacacaatggggataacaactgcactgcagctggcgcgcgcgaacccaacatttatcaggaaaaatttcagtgttgttctcgagagaactgtccgtgaactgaacggggaaagctgtatttcactggaggaggctccgccacccaagcagcagattgtctgcagccgatcctttggggagcgcgtcacaacatatgaagccatgcgccaggcagtctgtcagtatgctgagcgtgcagctgaaaagctgcgcggcgagcggcaattctgcagacatgttgctgtatttgtgaagacgtcaccgttcgctgtgaacgaaccgtattacgggaatgtggccagtgagaaactgacgactcccacgcaggataccagggacatcatagccgcagcggtgaaagcactggatcggatctgggtgaaagggcatagatatgcaaaagcgggttgcatgctcaatgatttcacaccaaccgggatttctcagttaaatctttttgatgaagtgcagccgcacgaacgaagtgagcagttgatgaaagttctcgacagtatcaaccattcaggtatgggaaaagtgtggtttgccggaagagggatagcccctgagtggcagatgaaaagagagctactctctccagcttataccactcgctgggctgaattacctgttgcacgattgcgctga

SEQ ID NO: 66447 - protein, 424 aa, Salmonella enterica subsp. enterica serovar Typhi Ty2
MFALADVNSFYASCEKVFRPDLRNTPVVVLSNNDGCVIARSKEAKQLGIKMGVPWFQLKTTEFPVPVVAFSSNYELYASMSNRVMAHLEELAPRVEQYSIDEMFLDVRNIDSCIDFEDFGRQLREHVHSGTGLTIGVGMGPTKTLAKSAQWASKEWRQFEGVLALTSGNPKRTEKLLSLQPVDEIWGVGRRISKKLHTMGITTALQLARANPTFIRKNFSVVLERTVRELNGESCISLEEAPPPKQQIVCSRSFGERVTTYEAMRQAVCQYAERAAEKLRGERQFCRHVAVFVKTSPFAVNEPYYGNVASEKLTTPTQDTRDIIAAAVKALDRIWVKGHRYAKAGCMLNDFTPTGISQLNLFDEVQPHERSEQLMKVLDSINHSGMGKVWFAGRGIAPEWQMKRELLSPAYTTRWAELPVARLR

SEQ ID NO: 66448 - DNA, 1272 bp, Prochlorococcus marinus subsp. marinus str. CCMP1375
  CDS (1)..(1272): transl_table=11
atgtctatagctctaattgatagtaataatttttatgcttcatgcgaagagagcatggatccttccataaggaatcatcctttaatagtgctttctaataacgatggttgcgttatagctcgtaacgcagaagccaaggcccttgggatcgctatgggacaaccctatttcaaggtacgtcgcaagctaaaagatcttggagtaaaaatacgaagttcaaactacgcactttatgctgacatgagtcggcgcttaatgagtctcatagaagcaaactgtgaagagctggaaatttattctattgacgaagcattcgtaaaaatcaaccgtcctcatgactacgatctcaatccctgggcatatcgactacgcacaacaatatatcaaagtctaagcttaccaattgctattggaattggaactaccaaaagccaatcaaagcttgctaaccacttagcaaaaacaacagcaagccatgcagggatctttgatttcgaagcctccgatgatcaagaccattggcttaagcaagttgcaatagaaaacgtttggggcattggaagaaaattagcctactggtgtcgaatgcacggaattaataatgctcgacaattacgagacactcccagtaatgaactaaggcaaaaattcggtgttacaggcatacgtttacaacatgaattaagaggggaaaaatgtctcaacctcttaataaaatctattcccaaaaaagaaacatgcgtcagcagaagctttagccgtcctgtaagtaacatagaagagctgcgacaagcaatagcaaatcatgcagtacgtgcaagtgaaaaattacgcaaacagcatcaacatgctactgcagttacagtatttactcgtactagtttatatacgtcacctttttatagccaatcagcgacacagcgtctaagtttacctagtaataatactagagttattctttcaacaactctctctttaacagaaaaaatattctgctccaattgtttattaataaaagcaggtgtaattatgcaaggacttgtaaacgaagactatcttcaactatctttattttcactaactaatcccaaggaaatatccagacacaaaagcttaatgaaatcaattgactacctaaatacgcgatatggtaaggacacaatacaatgggctgtttgtggcatcaatcaacaagaatgggaaatgtgccgaagaaacttaagtccttcagcaacaacacttttcaaagaaatccctattgtaaaagcctaa

SEQ ID NO: 66449 - protein, 423 aa, Prochlorococcus marinus subsp. marinus str. CCMP1375
MSIALIDSNNFYASCEESMDPSIRNHPLIVLSNNDGCVIARNAEAKALGIAMGQPYFKVRRKLKDLGVKIRSSNYALYADMSRRLMSLIEANCEELEIYSIDEAFVKINRPHDYDLNPWAYRLRTTIYQSLSLPIAIGIGTTKSQSKLANHLAKTTASHAGIFDFEASDDQDHWLKQVAIENVWGIGRKLAYWCRMHGINNARQLRDTPSNELRQKFGVTGIRLQHELRGEKCLNLLIKSIPKKETCVSRSFSRPVSNIEELRQAIANHAVRASEKLRKQHQHATAVTVFTRTSLYTSPFYSQSATQRLSLPSNNTRVILSTTLSLTEKIFCSNCLLIKAGVIMQGLVNEDYLQLSLFSLTNPKEISRHKSLMKSIDYLNTRYGKDTIQWAVCGINQQEWEMCRRNLSPSATTLFKEIPIVKA

SEQ ID NO: 66450 - DNA, 1293 bp, Prochlorococcus marinus subsp. pastoris str. CCMP1986
  CDS (1)..(1293): transl_table=11
atgaaaagtaaaagctcaaatactgaagcaatagctcttatagatgccaataatttctacgcatcgtgcgaacaaagtatcaaccccaatttaaggaataaaccagtagtaatattatctaataacgacggatgcattatcgcaagaagccctgaagctcgtgctttgaaaataaaaatgggaattccttattttaaagtcaaagaaagtttgaataacttaggagttgcagtcctaagttccaattattcgctctatggtgatatgagcaagagattaatgaatttattaaaggactattctgaagagatagagatttattctattgatgaagcctttatctcaattcttagacctaaagataagaatttaaatccttgggcaagaaaagtaaggtgcttaatatatcaaaatctaggaataacattaacaataggaatagcagaaaacaaagtaagagcaaaaattgctaataatctagctaagaatatagattcttccgcaggaatatttgatttagctaggatctataatgataatgattacttaagaaaaattagtgtagaaaaaatatggggtattggtaaacaaacatctaattggttacaaagcaaagggattaaaaatgcaaaagaattcagagatatggatgaagatgaaataattaagaaattagggatcatagggaaaagattacaaatggaattaaaaggtaataaatgtcttccgatagaaataattaagaagccaaaaaaagagattcaagtaagtagaagctttggaaaaccaatcacaaaattagaagatttaactcaagcattagcaatttatgcaataaaagcgtccgagaaaatgagaagtcaaagcttaaaatcatctgccattactatatttgtaagaactagtcattattcaaatcatccttatcacaaaagtgcttataaaaaacttataaatgcaacagataatacaagtactattttaaaaacagtacttgcattatctaaagaaatttatactccggaatataaattatcaaaagctggggttttgatgcaggatttaactaattgcaaatatttacagcaatcaattatcaattacgaatctcaagaggaatcaaaaaaatcaatccgtcttatgaaaacaattgactccttgaataaaaaatttaataatgaagtaattacatgggcaattacaaaaaaaccacaagaatgggcaatgaatagaaattcattaagttctggatctacaacagatattagaaaaattccaaatataatgatataa

SEQ ID NO: 66451 - protein, 430 aa, Prochlorococcus marinus subsp. pastoris str. CCMP1986
MKSKSSNTEAIALIDANNFYASCEQSINPNLRNKPVVILSNNDGCIIARSPEARALKIKMGIPYFKVKESLNNLGVAVLSSNYSLYGDMSKRLMNLLKDYSEEIEIYSIDEAFISILRPKDKNLNPWARKVRCLIYQNLGITLTIGIAENKVRAKIANNLAKNIDSSAGIFDLARIYNDNDYLRKISVEKIWGIGKQTSNWLQSKGIKNAKEFRDMDEDEIIKKLGIIGKRLQMELKGNKCLPIEIIKKPKKEIQVSRSFGKPITKLEDLTQALAIYAIKASEKMRSQSLKSSAITIFVRTSHYSNHPYHKSAYKKLINATDNTSTILKTVLALSKEIYTPEYKLSKAGVLMQDLTNCKYLQQSIINYESQEESKKSIRLMKTIDSLNKKFNNEVITWAITKKPQEWAMNRNSLSSGSTTDIRKIPNIMI

SEQ ID NO: 66452 - DNA, 1275 bp, Prochlorococcus marinus str. MIT 9313
  CDS (1)..(1275): transl_table=11
atgtctcgggtcacagccctgatcgacggcaacaatttctatgcctcctgtgagcaaagccttgacgcctcgctgatcggtcgtcctctggtcgtgctctccaacaacgatggctgcattgttgctcgcagctccgaagcgcgtgctctcggaatcagcatgggcacgccctatttcaaggtccgtcacaaattggaccgacttggcgttgtcgtgcgcagctccaactacgccctctacggcgatatgagccaacgactgatgagcttgctggaagcccattgtgaggagctggagatttactcgattgatgaagcctttgcttacatcaatggtccctctgatgacaacctaaagccctgggcccgtcaactacgggccctggtgcatcgcaacctgggcctaccgatagcaatcggacttggcgccagtaaaggtcaggccaaactcgccaaccacctggccaaggccataccggctcacgctggagtgttcaacctactcaccgctagtgatccagatacatggcttgagagcgtcgctatcgaaaatgtatgggggatcggtcgcaagttggcccattggtgccgacttagaggcgtaaccaatgcccggcaattgcgcgatatgccacgtagccaacttcatgcccgctgcggcgttgtaggcatacgcctacaacgagaattacaaggttatgcctgccttcctctagccctagccccaacatcaaaacaggaaacctgcgttagccgcagttttagccgaccaatcgccaacctagaggaattacgccaggcaatcgcaacctacgtggtgcgcgccagtgaaaaactgcgacgacaacagcaacgggccgggatcctcaccgtattcacacgtaccagcccatttgcaccatcgttttacagccaagccgctaccattcaactggatttgccaagcaacgacactgcaatcttgctagcagcagccttgccactagtcgagcgaatctaccggccccatcgccgcttaaacaaagccggggtgctgatgcaaaacctacagagcgcagaccatctgcaacaacacctgttggtagcagttcatgccgatgagcagcatcgtagcgatcgactaatgaacaccgtcgaccgacttaatcaccgttacggcagcggaaccgtgagttgggctgtttgtggcatgcagccaggatggagcatgcgtcgtcatcaactcagccgcgcggccacaactcgcctcaatgacgtgccgttggtgctggcctga

SEQ ID NO: 66453 - protein, 424 aa, Prochlorococcus marinus str. MIT 9313
MSRVTALIDGNNFYASCEQSLDASLIGRPLVVLSNNDGCIVARSSEARALGISMGTPYFKVRHKLDRLGVVVRSSNYALYGDMSQRLMSLLEAHCEELEIYSIDEAFAYINGPSDDNLKPWARQLRALVHRNLGLPIAIGLGASKGQAKLANHLAKAIPAHAGVFNLLTASDPDTWLESVAIENVWGIGRKLAHWCRLRGVTNARQLRDMPRSQLHARCGVVGIRLQRELQGYACLPLALAPTSKQETCVSRSFSRPIANLEELRQAIATYVVRASEKLRRQQQRAGILTVFTRTSPFAPSFYSQAATIQLDLPSNDTAILLAAALPLVERIYRPHRRLNKAGVLMQNLQSADHLQQHLLVAVHADEQHRSDRLMNTVDRLNHRYGSGTVSWAVCGMQPGWSMRRHQLSRAATTRLNDVPLVLA

SEQ ID NO: 66454 - DNA, 1281 bp, Synechococcus sp. WH 8102
  CDS (1)..(1281): transl_table=11
atgggccttgccaccgccctgatcgacggcaacaacttctacgcatcctgcgaacagagccttgaccccagcctgatcggcaaacccgtcgtcgtgctctccaacaacgacggctgcatcgtggcccgcagtgcagaagcccgggccctcggcattgcgatgggaaccccctatttcaaggcgcgtcaggagttggaacgccagaacgtggtggtgcgcagctcgaactacgccctgtacgccgacatgagccagcggatgatgagcctgctggaaattcactgcgaagagctcgagatctattccatcgacgaagccttcgggcgcgtccgtcgtccgaaggatggtgacttgcagagctgggggcgatccctgcgagcccgggtgcgccaggacctggggctgccgatcgccatcggcctgggggccagcaaaagccaggcaaaactggccaatcgcctggccaagcaagtccccgcccatgccggcatcttcgatctgggccactgcacggatcccgacgcctggctcgagaccatcgcaatcgaggacgtctggggcatcggccgcaaactggcgcgctggtgccggctgcggggggtgaacaacgcccgcctgctgcgggacatgcccagcggtgaacttcgggcgaagtgcggtgtggtggggttgcggctgcagcgggaactgcgcggccatgcctgcttgccactggcgttggcaccgtcccccaaacaggaaacctgcgtgagccgcagcttcagcaggccgatcacgaccctggaggaactgcggcaggccgtcgccacctatgtggtgcgcgccgcggaaaaactgcgcaagcagcaccaacgggctgccgccctcacggtgtacacccgcaccagccccttcatccccgcgttttacagccaggccgccagcacccgactggatctgcccagcaacgacaccaccgttctgctggaggcagcgctccccctggtggaccgcatcttccggccacaccgacagctggcgaaggcgggggtgctgatgcagcacctgcagggaaccgagctgctccagtcccatcttctggtgccactgagtgaggcacagcaacaacgacgagaggagctgatgcgcaccattgatcggctcaatcgccgctatggccgaggcacggtccagtgggcagcctgcgggttgcatccgagctggatgatgcgacgggagcggctgggacggaccgccaccacccggctgagtgatgttccagtggtgcacgccgatcgctga

SEQ ID NO: 66455 - protein, 426 aa, Synechococcus sp. WH 8102
MGLATALIDGNNFYASCEQSLDPSLIGKPVVVLSNNDGCIVARSAEARALGIAMGTPYFKARQELERQNVVVRSSNYALYADMSQRMMSLLEIHCEELEIYSIDEAFGRVRRPKDGDLQSWGRSLRARVRQDLGLPIAIGLGASKSQAKLANRLAKQVPAHAGIFDLGHCTDPDAWLETIAIEDVWGIGRKLARWCRLRGVNNARLLRDMPSGELRAKCGVVGLRLQRELRGHACLPLALAPSPKQETCVSRSFSRPITTLEELRQAVATYVVRAAEKLRKQHQRAAALTVYTRTSPFIPAFYSQAASTRLDLPSNDTTVLLEAALPLVDRIFRPHRQLAKAGVLMQHLQGTELLQSHLLVPLSEAQQQRREELMRTIDRLNRRYGRGTVQWAACGLHPSWMMRRERLGRTATTRLSDVPVVHADR

SEQ ID NO: 66456 - DNA, 1299 bp, Porphyromonas gingivalis W83
  CDS (1)..(1299): transl_table=11
atgtatgccctcttagactgcaacaacttcttcgtcagttgcgaaagggtgttcgacccctcgctccgaaacaggccggtcgttgtcctctccaataacgatggttgtatcatcgctcgcagcaatgaagccaaagcattggggatagggatgggacaacctttcttcaaggtgcaggacttgattcgccggcacaatgtggcattcttcagctcgaacttcattctctacggcgatatgtcccgacgaatcatgtcgcttgtatcggaacttgtacctcggatgtcgatctattcgatagacgagtgtttcatggatttgagaggagtgaaagattatatgtcgctatgccacatgatagtcgatagagtccgccaatgtacgggtataccggtgagtataggtgtagccgatacgatgaccctgtccaaagtggcagacaaatatgccaagaggtatgcgggttacaagggcgtatgcgccatagactccgaagaaaagaggagaaaggctctgcaaacgttcgatgtaagcgatgtatggggaatagggcgcagactatctcgcaagctatactattatggtatcaatacggcagccgactttgcttcgatgagagaaggtcgggtatatcgtttggccggcacttcgggcgtcaggacatggcaggagcttaggggcgaagcctgcaaagagatgaaattgccacagcctcgccaaagtgtctgcaccacgcgctctttcggccatccatgccgagattttgactcccttctcaggcatttggctgttttcgccgatagttgctgtacgaagatacgtgaagaaaagagcagggcacgccgtttgagtatctttataagctgtagccgatttgatcaggagaacgactattccggccggaatgagatgctccttcccgtagctacttctgacccttcagaactgatcccaaagattcgcaccctgctacaagagatttatcgaccaaatctgccctacaaacaggcaggggtgatcttgtccgacttggtagcggaggcctatcagctcaatcttttcgacccgatcgatcgcatgcggcaggagcgtttcttatcctctgtggatgcgatccgccagcgtttcggaagagatagtctgaccgttgctacccaagaaacagaagctatagcatctgtctcttcgatcaagcatcgttcgcgcagatatacgaccgatatgaacgaggtcatagatgtcgttctgcccgatcagcgaaaaagcggagaaaaaaaatcgacgatcaacagccggtag

SEQ ID NO: 66457 - protein, 432 aa, Porphyromonas gingivalis W83
MYALLDCNNFFVSCERVFDPSLRNRPVVVLSNNDGCIIARSNEAKALGIGMGQPFFKVQDLIRRHNVAFFSSNFILYGDMSRRIMSLVSELVPRMSIYSIDECFMDLRGVKDYMSLCHMIVDRVRQCTGIPVSIGVADTMTLSKVADKYAKRYAGYKGVCAIDSEEKRRKALQTFDVSDVWGIGRRLSRKLYYYGINTAADFASMREGRVYRLAGTSGVRTWQELRGEACKEMKLPQPRQSVCTTRSFGHPCRDFDSLLRHLAVFADSCCTKIREEKSRARRLSIFISCSRFDQENDYSGRNEMLLPVATSDPSELIPKIRTLLQEIYRPNLPYKQAGVILSDLVAEAYQLNLFDPIDRMRQERFLSSVDAIRQRFGRDSLTVATQETEAIASVSSIKHRSRRYTTDMNEVIDVVLPDQRKSGEKKSTINSR

SEQ ID NO: 66458 - DNA, 1299 bp, Pseudomonas syringae pv. syringae
  CDS (1)..(1299): transl_table=11
atggcgtcacaagctttgagtaacaagccagcgccggtctttgcgctggtcgattgcaattcgttctacgccagctgtgagcgcgttttccgacctgacttggccaaggagcctattgtggtgctcagcaataacgatggctgcgttattgcccgcagctacgatgcaaaaccttacgtgaaaatgggcgcgccttattttcagatcaaagatattttgcgccggcacggaatccaggtgttcagcagtaatttttcgctctatggcgatttaagccagcgcgtgatggccatcattgaatccatggtccctgctgttgaggtttatagcatcgatgaggcgtttgcagacctgaccggcttgcctggcaatctgaccgagttgggaaggtcaattcgatccaaagtctaccgctgcaccggcattcccgtgggtgtggggattgcaccgactaagacactggccaagctggccaaccacacggcaaagcgtcttcaggcgcacaccggcggggtcgttgacatctgtgaccctgtaaaacgcgattgggtgctgcgcaatacttctgtcggagaggtctggggcataggtcgaaagatgaaagcgcacctggaaggcatgcagatccggtcggccaaggacttggccatggccgatccttggatgctgcgcaaaacattcagtgttgtgatcgagaaaacggcacgcgagctggcgggcaccgcgtgcctggagctggacgaagtcgaaccaccacgtcaggagatctgctgcagcagaatgtttggtaagcggttgaccgagctggggccgatcaaagaggcggtggccacctacgtgatgcgtgcctctgaaaaattacgcgcccagggatcggtgtgtaaaaagatccgggtgagcattcgcaccggcatgttcaatcctgacgaagccaagtatgcaaacggcgctctggtccagctgccctaccccaccaacgatgtgagggtgatgacccagttcgcgaccgaggcggtttcgcggatttttcgaccaggcttcaggtacagcaaagcagaagtcttgctgatggatatctgccagccaggcgaattcaccgacgatctgttcaccatcgatcagccggcgagtgcagatcgactgatggctactttggacataatcaacggcaagtggggacgcgggacgctgcgtacaggatcagtaccagtcgttccggattgggggatgcgccgtgagctgatgagccagagctacacgacgcgacttgatcagctgtgggttgtaaaggctaactga

SEQ ID NO: 66459 - protein, 432 aa, Pseudomonas syringae pv. syringae
MASQALSNKPAPVFALVDCNSFYASCERVFRPDLAKEPIVVLSNNDGCVIARSYDAKPYVKMGAPYFQIKDILRRHGIQVFSSNFSLYGDLSQRVMAIIESMVPAVEVYSIDEAFADLTGLPGNLTELGRSIRSKVYRCTGIPVGVGIAPTKTLAKLANHTAKRLQAHTGGVVDICDPVKRDWVLRNTSVGEVWGIGRKMKAHLEGMQIRSAKDLAMADPWMLRKTFSVVIEKTARELAGTACLELDEVEPPRQEICCSRMFGKRLTELGPIKEAVATYVMRASEKLRAQGSVCKKIRVSIRTGMFNPDEAKYANGALVQLPYPTNDVRVMTQFATEAVSRIFRPGFRYSKAEVLLMDICQPGEFTDDLFTIDQPASADRLMATLDIINGKWGRGTLRTGSVPVVPDWGMRRELMSQSYTTRLDQLWVVKAN

SEQ ID NO: 66460 - DNA, 1254 bp, Serratia marcescens
  CDS (1)..(1254): transl_table=11
atgcacgttgatattaacggagcctatgcggcatttgagtgtgcgatggatcccaagctgtcaaaaaagccgctcatcatagccagcaataacgattcgtccgtcattgcaatgaataaactggctaaaagcgttggtattaagcgtgggaccccaatttttaagtgcagggatttgattcagcaacaccggatcgaagtccggagctctaactttactttgtatgaagactactcaaatcgcttccatgaaacgctggaaagcttcgcgcctcaatcgagtcgatatagcatagatgaaaatttcatgttattgaaaaacatgaacaagataatagattatgaagattacggccggttgatcagaagtacacttcttcataatctgtcccttacctgtggtgtgggttgttcaagcaccaaaaccctcgctaaattatgcacctatgcgagcaaacgatgggcagctacaggcggggttgtagttttgactgatcaggccaggatcaggaagctcctgagcctgatcagtaccagagaaatatggggtattggtcgaaagattagtgaacgcctgtcggctttcgggatcatcactgccggtgatttttataatagcgacgttcgctttttacgtaaaagctttggcgttgaaatcgagcgtacctggcgggaactgcatggcgaaccatgtttccggctgcacgagtctcctcctgtcaggcaacagattatcgtttccagaagttttggtcagcgccttaatgagataggcaagctacatgaggcagtttcattttttaccgcccgggcggcagagcagctgcgcaaggatggctcgtggacccgtcaaatcacagtcttcattcagagtagcaattatgcgcaaggtgaaaaccgctacagcaattgtggtatcgagccgcttaccgctacacaggacacccgcgatctggttgatgcagccatgaccatcctgaaccgcatttacagacccgggatagcgtatgcgaaagcaggggtaatgctctccgctatgactgacggcacagagcaactcagcctgtttgatactcgcccggccaggcctggcagtcaggcactgatgaaagttatggaccggttcaataaagaaaagcgcggagctctgtttttactgggggaaggcattcaacaggattttcgtatgaagcaggccatgctatcaccgagatatacgacccgctgggatgaattactcgttgtaaaagcgtag

SEQ ID NO: 66461 - protein, 417 aa, Serratia marcescens
MHVDINGAYAAFECAMDPKLSKKPLIIASNNDSSVIAMNKLAKSVGIKRGTPIFKCRDLIQQHRIEVRSSNFTLYEDYSNRFHETLESFAPQSSRYSIDENFMLLKNMNKIIDYEDYGRLIRSTLLHNLSLTCGVGCSSTKTLAKLCTYASKRWAATGGVVVLTDQARIRKLLSLISTREIWGIGRKISERLSAFGIITAGDFYNSDVRFLRKSFGVEIERTWRELHGEPCFRLHESPPVRQQIIVSRSFGQRLNEIGKLHEAVSFFTARAAEQLRKDGSWTRQITVFIQSSNYAQGENRYSNCGIEPLTATQDTRDLVDAAMTILNRIYRPGIAYAKAGVMLSAMTDGTEQLSLFDTRPARPGSQALMKVMDRFNKEKRGALFLLGEGIQQDFRMKQAMLSPRYTTRWDELLVVKA

SEQ ID NO: 66462 - DNA, 1263 bp, Synechocystis sp. PCC 6803
  CDS (1)..(1263): transl_table=11
atgaacagtattgccctggtggattgcaataatttctatgtgtcctgtgagcgggtctttcaacccctattaaacggcaagccggtggtggtactttccaataatgatggttgtgtggtggcgagatcgtcagaagccaaggctttaggaatcaagatgggggtgccgctgttcaaaattcgagatttggttgagcgacataatattcaggttttttcttccaattactgtttgtacggcgacttatcccacaggataatgaccagcctgcaattatttagccctgtcgtggaaatttattccattgatgaagcgtttctggaactgactccaaatcaaagtaatacaaattatggggaagaaattcggcgttgccttaaacaatgggtaggcattcccgtttctattggcattgcccccactaaggtactcgctaaagtggcaactgatgtggcaaaacaatccggggctggaacattttgtttagacaaagcagaagcggctgatactattttggcaacgatgccgatcgccgatatttggggcattggacgacggttagagaagtggtttaccactaggggcgtctcaacagccttgcaattcaaacaagccaatcctgaacttatccgcaaaaaaatgggggtcgtggggcaacggctattactagaactccagggtatttcctgtttacccctagaactaattcctaacccaaagcaagaaacctgcgtttcccgttcctttgctcaagcggtaacgacattggatgaattacaaacggcgatcgccttttttgtcagtcgggcggcggagaaactgcggcgacaacagcaaaccccagcagtgatgattatttttgcccgcaccagcttcttcattgagcaaccaatttccatctcccagacgattgccctgccgactccaacccattacaccccagaattacttaaattggctcaaaccagcctcaaacaaatctttcgaccccatcatccctacaaaaaagctggcgtgataatgaccgggttacagtcggaacgcattgtgcaaggcgatctttttgaacaaccacgggatacggaacggcaacagcggcttatgttgacggtggaccagcttaatcaaaagtttggcagggaaactttgggttttggtattttcgggcaacaacaggattggcggatgaagtccgacctacgctctccccgatttacaacggcttgggatgatttgccagaggtaaaggcaggattttattag

SEQ ID NO: 66463 - protein, 420 aa, Synechocystis sp. PCC 6803
MNSIALVDCNNFYVSCERVFQPLLNGKPVVVLSNNDGCVVARSSEAKALGIKMGVPLFKIRDLVERHNIQVFSSNYCLYGDLSHRIMTSLQLFSPVVEIYSIDEAFLELTPNQSNTNYGEEIRRCLKQWVGIPVSIGIAPTKVLAKVATDVAKQSGAGTFCLDKAEAADTILATMPIADIWGIGRRLEKWFTTRGVSTALQFKQANPELIRKKMGVVGQRLLLELQGISCLPLELIPNPKQETCVSRSFAQAVTTLDELQTAIAFFVSRAAEKLRRQQQTPAVMIIFARTSFFIEQPISISQTIALPTPTHYTPELLKLAQTSLKQIFRPHHPYKKAGVIMTGLQSERIVQGDLFEQPRDTERQQRLMLTVDQLNQKFGRETLGFGIFGQQQDWRMKSDLRSPRFTTAWDDLPEVKAGFY

SEQ ID NO: 66464 - DNA, 1305 bp, Erwinia amylovora
  CDS (1)..(1305): transl_table=11
atggggtgtggttacgttcactgtcatgagacaccgcccgtgtacgccttaatcgacgtcaattcgatgtactgcagctgcgaagaggcgttccgccctgatttacgaggtcgccctgtggtcgttctcagcaacaacgacggggcgcttgttgcggtcaatcgcgcggcgaaagcgctgggcgtgcgccgcggggagccttatttccgctgccgccgcctgctggaacagcataacgttgccgtattcagttccaactacaccctttacgcctcattctccgccagatttgcaaccgtggtggaaagtctggcgccgcggacatttgtttactcaattgatgagctctttgcggatgcctctcatatggagggagtgatgacgccgcaggcgtttggccagcttttgcgggctgaagtgctgcgccagacaacgctcacctgtggagtcggcgtcgcgccaacgaagacgctggccaagctgtgcaaccacgccgcaaagacgtggcctgccaccgggggggttgtggcgctcagtgatgctgtaagactgaaaaagctgatgagcctggtgtcggccggcgatgtgtggggcgttggccatcgtaccgaaaaagggctggcggcaatggggatcaaaacggcgctggcgctcgcagagatggatatccgtcttgcacgccggctgtacggtgtgacgctggaacggaccattcgtgagctgcgtggcgaggcctgctttgccctggaggaaggtaccggcgcgaaacagcagcttgttgtatcccgttcgtttggagcacgggtcacgcaactggcgcagatgcagcaggcggtgactaaatatgccacacgggcaggggaaaagttgcgccaggaaaaccgcctggcgaaggtggtaacggtctttatccgcagcagtgcttatgacgccggcggtgtgccctacagtaaccaggctacggaagtgcttcccgtgccaagccaggatacccgcgacatcatcgccgcggcgcagctggggctgtcgcgtatctggcgtgagggcgtgcggtatgcaaaagccggcgtgatgctcagcgatctgcagggatatgaaacccagctggatctgttttcgccggctgcagtgcggccgggcagcgaaaaactgatggccaccatcgacaaaataaacagggaaggaaggtcaaggatcttcttcgccggagaaggtattgatccggaatatgccatgcgccgtgaaatgttgtccccggcctacaccacgcagtggaaggatattcccgcggcgtttatgcgataa

SEQ ID NO: 66465 - protein, 434 aa, Erwinia amylovora
MGCGYVHCHETPPVYALIDVNSMYCSCEEAFRPDLRGRPVVVLSNNDGALVAVNRAAKALGVRRGEPYFRCRRLLEQHNVAVFSSNYTLYASFSARFATVVESLAPRTFVYSIDELFADASHMEGVMTPQAFGQLLRAEVLRQTTLTCGVGVAPTKTLAKLCNHAAKTWPATGGVVALSDAVRLKKLMSLVSAGDVWGVGHRTEKGLAAMGIKTALALAEMDIRLARRLYGVTLERTIRELRGEACFALEEGTGAKQQLVVSRSFGARVTQLAQMQQAVTKYATRAGEKLRQENRLAKVVTVFIRSSAYDAGGVPYSNQATEVLPVPSQDTRDIIAAAQLGLSRIWREGVRYAKAGVMLSDLQGYETQLDLFSPAAVRPGSEKLMATIDKINREGRSRIFFAGEGIDPEYAMRREMLSPAYTTQWKDIPAAFMR

SEQ ID NO: 66466 - DNA, 1182 bp, Parachlamydia sp. UWE25
  CDS (1)..(1182): transl_table=11
gtggttgttttatccaataatgatggatgcgtaatttcccgttctcaagaagccaagcttttgggcgttaaaatgggggaaccttactttcaaattaaagcgctttgtgaatttagaaatattcaagtgttttcttcaaattacgcgctctacggagatatttcagagcgtatcatgaacctcttattcgaacatgcccccgacctagacatttattcaattgatgaagcttttttaaaatatccttctagtgttgccccttctgatttagtttctctttgtcacgaattacaaaagaaggttaaaaaatgggtgggaatgcctatttctttaggccttgctaacacaaagacacttgcaaaaatggccaatgatctcgccaaaaaaattcaaaatttctatgtgtttgatttaaattcatcggttcgtcaaaaggtcttacaaaattatttgattggggatgtttgggggattggacgaaatttaaaagaaaaattaaatggaatgaatattcacacggcctgggaatatgcacaaatggatccttccattattcgcaaacgactgggtgtgattggagagcgaatactatgggaattaagaggagttagctgcttagaatcagatgaaaaagtctctaaaaaaagtttgctttattctaggtctttcggacatgttctttcagagataacccctttgtccgaggctttatctacctacgtttatacagtggctgaaaagttaagagcacagggaagcctagcaaaagcgttgtatatatttttagaatatcaaattcagcccggaaagaagatgcgctgttatgatagtattactgaaatatttccagctccaactaaagacacaggagagatgattaaggccgcgaaacgagggttaaataaaattttccgtcgtgaagaaagatataagaaatgtggggtcattttattagatcttttacctgaatcatcttcaaattctgatttgtttttaaatcctgtagatcccaagcgaacacaattaatgaataccatggatgcattaaatgctcgttttggtaaaaaaaaattattctttggagcaatgggaacagacgtaagctggaagtctcgaaaagactgcagctcaaagcacaatccttctaattggcagcagctacccattgttttagctaagtaa

SEQ ID NO: 66467 - protein, 393 aa, Parachlamydia sp. UWE25
MVVLSNNDGCVISRSQEAKLLGVKMGEPYFQIKALCEFRNIQVFSSNYALYGDISERIMNLLFEHAPDLDIYSIDEAFLKYPSSVAPSDLVSLCHELQKKVKKWVGMPISLGLANTKTLAKMANDLAKKIQNFYVFDLNSSVRQKVLQNYLIGDVWGIGRNLKEKLNGMNIHTAWEYAQMDPSIIRKRLGVIGERILWELRGVSCLESDEKVSKKSLLYSRSFGHVLSEITPLSEALSTYVYTVAEKLRAQGSLAKALYIFLEYQIQPGKKMRCYDSITEIFPAPTKDTGEMIKAAKRGLNKIFRREERYKKCGVILLDLLPESSSNSDLFLNPVDPKRTQLMNTMDALNARFGKKKLFFGAMGTDVSWKSRKDCSSKHNPSNWQQLPIVLAK

SEQ ID NO: 66468 - DNA, 1404 bp, Desulfovibrio vulgaris subsp. vulgaris str. Hildenborough
  CDS (1)..(1404): transl_table=11
gtgcatgggccgcctgaatcacaagagccatgcggaaccttcgggccagacgagaccacaggggcaacctcgacggccgcatcacgcggggaggcccgacgcctgccgcgggggggcgtcctgtgggcgctggtggactgcaacaacttctacgcctcgtgcgaacggcttttcaggcccgacctcaaggggcgtccggtcgtggtgctttccaacaacgacggctgtgtcatcgcgcgttccgccgaagccaaggcactcggcgtgcccatgggggcaccggagttcaaggtgcgcgacatgctgcgtgcccacgacgtggctgtgttctcgtccaattacgccctgtacggcgacctctcgcaacgggtcatgcgcacactggcgacggtggtgccccgggtcgaggtctattccatcgacgaggcgttcatcccgttgcctgcggcacttgccgccgaccccgtagctgtggggcgcaccctgcggcagcgcgtggcgcaatgggtgggcattcccgtgtcggtgggcgtcggccccacgcggaccctcgccaagcttgccaacaggctttccaagcaggactccgcgtatgggaatgtcttcgacctgaccccggagacggtggacatggacagggtactcgccagcgtggatgtgggcgatgtgtggggcgtggggcgccggagtgcggagatgctgcgggggcgtggcattctcaccgcgcgggcgctgcgcgacgcagaccccctgtgggtgcggcagcgcatgaccgtcacgggctggcgcacgcagcaggagttgcggggaatgccgtgcctcacggatgacgacctgcccgtgccgcgtcgttccatccgctcatcccgttcgttcggtcagatggtgcgcaccttggagcccctgcgggaggcggtcgccacgttcaccgcacgggcggtggccaaggcgcgcgccgaagggcttgtggcgtcgtgcatcgaggtgcatatccgcacgccgcggcacaccgaacgaccacgttacgacgagacgacgaccatcaccctgccttgccccacggcggacacgggcctgtgcatacgacacgccctcacggggctggagcgcatcttccgtgagggctatctctacgccaaggcgggggtcacgctgttcggactcgaaccggctgcggggcggcaggggagccttctcgacctcctcgacggttcgcacgagcacaaggcgcgacgcgaacgactcatggccgcgctggatgccgtcaacctacggcacgggcgcgggagtatccgccacggtgcggaaggcgaccccggtgccgcgtggcatatgagccagaagtaccgttcgccgcgctacaccacggcatgggaggaactgcccgaagtgctctgccgttga

SEQ ID NO: 66469 - protein, 467 aa, Desulfovibrio vulgaris subsp. vulgaris str. Hildenborough
MHGPPESQEPCGTFGPDETTGATSTAASRGEARRLPRGGVLWALVDCNNFYASCERLFRPDLKGRPVVVLSNNDGCVIARSAEAKALGVPMGAPEFKVRDMLRAHDVAVFSSNYALYGDLSQRVMRTLATVVPRVEVYSIDEAFIPLPAALAADPVAVGRTLRQRVAQWVGIPVSVGVGPTRTLAKLANRLSKQDSAYGNVFDLTPETVDMDRVLASVDVGDVWGVGRRSAEMLRGRGILTARALRDADPLWVRQRMTVTGWRTQQELRGMPCLTDDDLPVPRRSIRSSRSFGQMVRTLEPLREAVATFTARAVAKARAEGLVASCIEVHIRTPRHTERPRYDETTTITLPCPTADTGLCIRHALTGLERIFREGYLYAKAGVTLFGLEPAAGRQGSLLDLLDGSHEHKARRERLMAALDAVNLRHGRGSIRHGAEGDPGAAWHMSQKYRSPRYTTAWEELPEVLCR

SEQ ID NO: 66470 - DNA, 1278 bp, Legionella pneumophila subsp. pneumophila str. Philadelphia 1
  CDS (1)..(1278): transl_table=11
atgagcttgcctgagatgtttgcccttatcgattgcaacaatttttacgccagttgtgagcgtttgtttcgtcctgatttaaaggacgtccccatcgtggtgctatccaataacgatggctgttgtatcgcacgctcgaatgaagccaaagcattgggcattgccatgggcgagccgtacttcaaaattaaacatttgtgcaaacagcatggagtgaaagctttttcctcaaattatacgctgtatggcaacatgagtcatcgtgtgatgtgcactattgaagaagcctggccccatatagaagtttactcgattgatgaagcgtttcttgatttaaggagtttaccggttgatagctatgattcgttttgcgagcagttacaaaagaaaatcttgaagcacacaggaatacccacttccatcggtattggacctactaaaacactagctaaagccgccaatcatttatgcaaaaaagtttataaaattcctgtgtttaatatcacctcgaatcgtgggcggttattgcaacagatttccgttggggacatttggggagtagggcggcaatgggccaataaattaatttcgcgaggcattcatacggcttatgatttggcaatgaccaatcctcaccttctgaagaaatgttttaacgccgtgttgatgcgaactgctatggagcttcaaggaattgcttgtggcggtttagaggtaatagagcctaagcaaagtattatgtcatccaaaagttttggtcagatgcaaactcaaattgcttcgattgaggaatcaatcagtagccattgtgctcgtgcggtggagaaaatgcgtcgccaacaattggtggcgacgcgtctggttgtatttgtgcatacgaaccgatttcgggaagatttggctcagcactttcagtccatcgaatttaagctgattaatcctacagatgatttgcgcttaattaccaaaatagccaaaagatgtctgcaacgcatttttaaaccagggtattactataaaaaggcaggggtatgtcttgaagacttaattcctaaaaaaccacgacagctggatatgtttcatcaaccaagtgatgagcatctaaaacacaccgaacaattgatgggtgtctttgaccaaatcaatcaaaagtatggaagaagcacgattcggttagccgccgaaggctattcaaaaccctgggagatgcgtgctgagctgaaatcacctgcttataccacgcgatggtctcaagttcccaaagttcatttgtattaa

SEQ ID NO: 66471 - protein, 425 aa, Legionella pneumophila subsp. pneumophila str. Philadelphia 1
MSLPEMFALIDCNNFYASCERLFRPDLKDVPIVVLSNNDGCCIARSNEAKALGIAMGEPYFKIKHLCKQHGVKAFSSNYTLYGNMSHRVMCTIEEAWPHIEVYSIDEAFLDLRSLPVDSYDSFCEQLQKKILKHTGIPTSIGIGPTKTLAKAANHLCKKVYKIPVFNITSNRGRLLQQISVGDIWGVGRQWANKLISRGIHTAYDLAMTNPHLLKKCFNAVLMRTAMELQGIACGGLEVIEPKQSIMSSKSFGQMQTQIASIEESISSHCARAVEKMRRQQLVATRLVVFVHTNRFREDLAQHFQSIEFKLINPTDDLRLITKIAKRCLQRIFKPGYYYKKAGVCLEDLIPKKPRQLDMFHQPSDEHLKHTEQLMGVFDQINQKYGRSTIRLAAEGYSKPWEMRAELKSPAYTTRWSQVPKVHLY

SEQ ID NO: 66472 - DNA, 1296 bp, Legionella pneumophila subsp. pneumophila str. Philadelphia 1
  CDS (1)..(1296): transl_table=11
ttggggagtcgtcactcatgttattcatacggtattgtgatgtttgcgctggtcgattgtaataatttttatgtctcgtgtgagcgtttatttaaaccagccttagcgaataaacccattttggtcttgtctaataatgatggttgtgtgattgcgcgatctaatgaagtaaaagctttgggtgttcaaatgggagtgccttattttgcagtcaaagcattatgtaagcagcataaagtgcatgtgttttcatccaattacacattgtatgctgatatgtcacgccgggttatgtcagttcttgaagacaattggccagcaatagagatttactccattgatgaagcttttcttgatttgaatactttgccccaatctgaacatgatgagttttgccgcaagttacaaaaaattgttttgcgccataccggtattcccgtatccataggcataggggcaaccaaaaccctggctaaactcgcaaaccatattgcgaaaaaggaattaagaacccctgtatttaacattgaaaatcaatatcattggctagctaaaatagttgttggcgaggtatgggggataggacggcaatggggtaaaaagttagtacaacaggggatttatacagctcatgacttggctggtatggatttgcaattaattaaaaaattatttagtgttgtattgcaacgaacagtgcttgagttgcgtggggtttcatgtggcagtttacaggattttgagtcaagaaaaagcataatatcttccaaatcctttggttctatgcaaacagagtattctgctcttgctcaggccatcagcagccattgtgccagagcttgggaaaagttacgtcatcaaaaattgatggcatgccatctttccatatttatcaaaaccaatcaatttcgtttggatttgccacaatatcagcaaactatagggtttaagctgattaatccaactgatgatctgcgacatttgattcgttgtgccaaattgtgcctgcgtaaaatatttcgctctggattccattaccaaaaggtaggcgtttatttaggagatttaattgaaaaaaactgtttgcagttagatttgtttaaccaggtttcagagaaagaattgaatcagacagagcgattgatgtcggtattagatgaaatcaacacgaaatatggccgccataccttgcgtttggcagcagaagggcatgtgaagccatgggctatgcgggcgcagtcccgttctcctcgctatacaacttcctggtctgaattgcctgtggtaattatttaa

SEQ ID NO: 66473 - protein, 431 aa, Legionella pneumophila subsp. pneumophila str. Philadelphia 1
MGSRHSCYSYGIVMFALVDCNNFYVSCERLFKPALANKPILVLSNNDGCVIARSNEVKALGVQMGVPYFAVKALCKQHKVHVFSSNYTLYADMSRRVMSVLEDNWPAIEIYSIDEAFLDLNTLPQSEHDEFCRKLQKIVLRHTGIPVSIGIGATKTLAKLANHIAKKELRTPVFNIENQYHWLAKIVVGEVWGIGRQWGKKLVQQGIYTAHDLAGMDLQLIKKLFSVVLQRTVLELRGVSCGSLQDFESRKSIISSKSFGSMQTEYSALAQAISSHCARAWEKLRHQKLMACHLSIFIKTNQFRLDLPQYQQTIGFKLINPTDDLRHLIRCAKLCLRKIFRSGFHYQKVGVYLGDLIEKNCLQLDLFNQVSEKELNQTERLMSVLDEINTKYGRHTLRLAAEGHVKPWAMRAQSRSPRYTTSWSELPVVII

SEQ ID NO: 66474 - DNA, 1284 bp, Bacteroides fragilis YCH46
  CDS (1)..(1284): transl_table=11
atgtttggactaatggactgcaataacttctacgcaagttgcgagagagtgttcaatccggctttgaacggtaagccgatcgttgttttaagtaataacgacggatgtgttattgccagaagtaacgaagcgaaaacattggggattaaaatgggagttccggcttatcagatcaaagatgatattcagaaatatggtatatctgtcttttcatcgaactatacgctatacggcgacatgtccggacgcgtgatgtccatactggcagaacaagtgccggaaatggaagtatacagtatagacgaagcatttcttaacctggaagggattcgggatattcagtcactcggaacagacatcataaacaaagtaatccgcggaaccggcatacctgttagtttgggtatcgccccaaccaaaacactcgcaaaggtcgccaataaatttgcaaagaaatatcctgcttacaatcgtttatgtatcatcgatacagaagaaaagcgcaccaaggccctgcaacttactgaaattggagacatctgggggatcggtcaccggcaagttgccaagttagaaaagcagggagtcaaaacagcctatgattttaccgagttgcccgaatcttgggtgcgtaagaacatgactgtagtcggagaaaggacctggaaagaacttcaaggcatttcctgtattgatatggaaaccacaccaccggccaaaaagcagatatgtacaagtcggtcattcggcaagatggtggaggacatcgatacaatgtcggaagcaatcgccactcacgcttctacatgcgcaaagaaactccgacaacagaaaggctatgcaatgtcactaatggtattcatccatacgaataacttccgtaaagattcgccacaatattggaggaatacagttgtacatcttccgataccgaccaatgacacattagaaattgtacattatgcactggccgggctaaaaacgattttcatgcaaggctatcaatataagaaagccggagttattatcaccgaaataaccgatagcacccaattgggactgtttgattcagtagatcgcgagaaacgtgaacgtcttcaacaaacaatagataagataaacggtaaacacagccgactcgtcaaattagcgattcaaggtacagggaggaattggaagcttaaacaaaaacagctatcagggcattataccactgacatcaatcagattataagcattaattgtacttacccaactgcatgtcaacgaaaacaatatagctga

SEQ ID NO: 66475 - protein, 427 aa, Bacteroides fragilis YCH46
MFGLMDCNNFYASCERVFNPALNGKPIVVLSNNDGCVIARSNEAKTLGIKMGVPAYQIKDDIQKYGISVFSSNYTLYGDMSGRVMSILAEQVPEMEVYSIDEAFLNLEGIRDIQSLGTDIINKVIRGTGIPVSLGIAPTKTLAKVANKFAKKYPAYNRLCIIDTEEKRTKALQLTEIGDIWGIGHRQVAKLEKQGVKTAYDFTELPESWVRKNMTVVGERTWKELQGISCIDMETTPPAKKQICTSRSFGKMVEDIDTMSEAIATHASTCAKKLRQQKGYAMSLMVFIHTNNFRKDSPQYWRNTVVHLPIPTNDTLEIVHYALAGLKTIFMQGYQYKKAGVIITEITDSTQLGLFDSVDREKRERLQQTIDKINGKHSRLVKLAIQGTGRNWKLKQKQLSGHYTTDINQIISINCTYPTACQRKQYS

SEQ ID NO: 66476 - DNA, 1278 bp, Legionella pneumophila str. Lens
  CDS (1)..(1278): transl_table=11
atgagcttgcctgagatgtttgcccttatcgattgcaacaatttttacgccagttgtgagcgtttgtttcgtcctgatttaaaggatgtccccatcgtggtgctatccaataacgatggctgttgtatcgcacgctcgaatgaagccaaagcattgggcattgccatgggcgagccatacttcaaaattaaacatttgtgcaaacagcatggtgtgaaagctttttcctcaaattatacgttgtacggtaacatgagtcatcgcgtgatgtgcactattgaagaagcctggcctcatatcgaaatttactcgattgatgaagcgtttcttgatttaaggagtttaccggttaactcgcataatttgttttgcgagcagttacaaaagaaaatcttgaagtacacgggaatacccacttccatcggcattgggccgaccaaaacactagccaaagccgccaatcatttatgcaaaaaagtttataaaatccctgtgtttaatatcacctcgagtcgtgagcggttattacaacagatttccgttggagacatttggggagtaggacggcaatgggccaataaattaatttcgcgaggtattcatacggcttatgatttggcaatgaccaatcctcaccttctgaagaaatgttttaacgtcgtgttgatgcgtaccgccatggagcttcaaggaattgcttgtggcggtttagaggcaatagagcctaagcaaagtattatgtcatctaaaagttttggtcagatgcaaacccaacttgcttcgattgaggaatcaatcagtagccattgtgcccgtgcggtggagaaaatgcgtcgccagcaattggtggcgaagcgcatggttgtatttgttaatacgaaccgatttcgggaagatttggcacagcactttcagtccatcgaatttaagctgattaatcccacagatgatttgcgcttaattactaaaatagccaaacgatgtctgcagcgtatttttaaaccagggtattactataaaaaggcaggagtatggcttgaagatttaattcctaaaagcccacgacagctggatatgtttcatcaaccaagtgatgagcatctaaaacacaccgaacaattgatgggggtctttgaccaaatcaatcaaaaatacggacgaagtacaattcgcctcgcagcagagggttattcaaaaccttgggcgatgcgtgctgaactgaaatcgcctgcctatactacacgatggtctgaggttccgcaggttcgtttgttttga

SEQ ID NO: 66477 - protein, 425 aa, Legionella pneumophila str. Lens
MSLPEMFALIDCNNFYASCERLFRPDLKDVPIVVLSNNDGCCIARSNEAKALGIAMGEPYFKIKHLCKQHGVKAFSSNYTLYGNMSHRVMCTIEEAWPHIEIYSIDEAFLDLRSLPVNSHNLFCEQLQKKILKYTGIPTSIGIGPTKTLAKAANHLCKKVYKIPVFNITSSRERLLQQISVGDIWGVGRQWANKLISRGIHTAYDLAMTNPHLLKKCFNVVLMRTAMELQGIACGGLEAIEPKQSIMSSKSFGQMQTQLASIEESISSHCARAVEKMRRQQLVAKRMVVFVNTNRFREDLAQHFQSIEFKLINPTDDLRLITKIAKRCLQRIFKPGYYYKKAGVWLEDLIPKSPRQLDMFHQPSDEHLKHTEQLMGVFDQINQKYGRSTIRLAAEGYSKPWAMRAELKSPAYTTRWSEVPQVRLF

SEQ ID NO: 66478 - DNA, 1278 bp, Legionella pneumophila str. Paris
  CDS (1)..(1278): transl_table=11
atgagcttgcctgagatgtttgcccttatcgattgcaacaatttttacgccagttgtgagcgtttgtttcgtcctgatttaaaggacgtccccatcgtggtgctatccaataatgatggctgttgtatcgcacgctcgaatgaagccaaagcattgggcattgccatgggcgagccgtacttcaaaattaaacatttgtgcaaacagcatggagtgaaagctttttcctcaaattatacgctgtatggcaacatgagtcatcgtgtgatgtgcactattgaagaagcctggccccatatagaagtttactcgattgatgaagcgtttcttgatttaaggagtttaccggttgatagccatgattcgttttgcgagcagttacaaaagaaaatcttgaagcacacaggaatacccacttccatcggtattggacctactaaaacactagctaaagccgccaatcatttatgcaaaaaagtttataaaatccctgtgtttaatatcacctcgaatcgtgggcggttattgcaacagatttccgttggggacatttggggagtagggcggcaatgggccaataaattaatttcgcgaggcattcatacggcttatgatttggcaatgaccaatcctcaccttctgaagaaatgttttaacgtcgtgttgatgcgtaccgccatggagcttcaaggaattgcttgtggcggtttagaggcaatagagcctaagcaaagtattatgtcatctaaaagttttggtcagatgcaaactcaacttgcttcgattgaggaatcaatcagtagccattgtgcccgtgcggtggagaaaatgcgtcgccagcaattggtggcgaagcgcctggttgtatttgtgcatacgaaccgatttcgcgaagatttggcacagcactttcagtccatcgaatttaagctgattaatcctacagatgatttgcgcttaattaccaaaatggccaagcgatgtctgcaacgcatttttaaaccagggtattactataaaaaggcaggagtatgtcttgaggacttaattcccaaaaacccacgacagctggatatgttttatcaaccaagtgacgagcatctaaaccacacggaacaattgatggcggtctttgaccaaatcaatcaaaaatacggacgaagtacaatccgcctcgcggcagagggttattcaaaaccttgggcgatgcgtgctgaactgaaatcgcctgcctataccacacgatggtctgatttacctcgtgcaatcattaggtaa

SEQ ID NO: 66479 - protein, 425 aa, Legionella pneumophila str. Paris
MSLPEMFALIDCNNFYASCERLFRPDLKDVPIVVLSNNDGCCIARSNEAKALGIAMGEPYFKIKHLCKQHGVKAFSSNYTLYGNMSHRVMCTIEEAWPHIEVYSIDEAFLDLRSLPVDSHDSFCEQLQKKILKHTGIPTSIGIGPTKTLAKAANHLCKKVYKIPVFNITSNRGRLLQQISVGDIWGVGRQWANKLISRGIHTAYDLAMTNPHLLKKCFNVVLMRTAMELQGIACGGLEAIEPKQSIMSSKSFGQMQTQLASIEESISSHCARAVEKMRRQQLVAKRLVVFVHTNRFREDLAQHFQSIEFKLINPTDDLRLITKMAKRCLQRIFKPGYYYKKAGVCLEDLIPKNPRQLDMFYQPSDEHLNHTEQLMAVFDQINQKYGRSTIRLAAEGYSKPWAMRAELKSPAYTTRWSDLPRAIIR

SEQ ID NO: 66480 - DNA, 1257 bp, Legionella pneumophila str. Paris
  CDS (1)..(1257): transl_table=11
atgtttgcgctggtcgattgtaataatttttatgtctcgtgtgagcgtttatttaaaccagccttagcgaataaaccaattttggtcttgtctaataatgatggttgtgtgattgcgcgatctaatgaagtaaaagctttgggtgttcaaatgggagtgccttattttgcagttaaagcattatgtaagcagcataaagtacatgtgttctcatccaattacacattgtatgctgatatgtcacgccgggttatgtcagttcttgaaaacaattggccagcaatagagatttactccattgatgaagcttttcttgatttgaatactttgccccaatctgaacatgatgagttttgccgcaagttacagaaaattgttttgcgctataccggtattcccgtatccataggcataggggcaaccaaaaccctggctaaactcgcaaaccatattgcgaaaaaggaattaagaattcctgtgtttaacattgaaaatcaatatcattggttagctaaaatagttgttggcgaggtatggggagtaggacggcaatggggtaaaaagttagtacaacaggggatttatacagctcatgacttggctggtatggatttgcaattaattaaaaaattatttagtgttgtattgcaacgaacagtgcttgagttgcgtggggtttcatgtggcagtttacaggattttgagtcaagaaaaagcataatatcttccaaatcctttggttctatgcaaacagagtattctgctcttgctcaggccatcagcagccattgtgccagagcttgggaaaagttacgtcatcaaaaattgatggcatgccatctttccatatttatcaaaaccaatcgattccgtttcgatttgccacaatatcagcaaactatagggtttaagttgattaatccaactgatgatttgcgacatttgattcgttgtgccaaattgtgcctgcgtaaaatatttcgtcccggattccattaccaaaaggtaggcgtatatttgggagatttaattgaaaaaaactgtttgcagttagatttgtttaatcaggtttcagagaaagaattgaatcagacagagcgattgatgtcggtattagatgaaatcaatacgaaatatggccgtcataccttacgtttggcagcagaagggcatgtgaagccatgggctatgcgggcacagtcacgttctccctgttataccacttcctggtctgaattgcctgtggtaattatttaa

SEQ ID NO: 66481 - protein, 418 aa, Legionella pneumophila str. Paris
MFALVDCNNFYVSCERLFKPALANKPILVLSNNDGCVIARSNEVKALGVQMGVPYFAVKALCKQHKVHVFSSNYTLYADMSRRVMSVLENNWPAIEIYSIDEAFLDLNTLPQSEHDEFCRKLQKIVLRYTGIPVSIGIGATKTLAKLANHIAKKELRIPVFNIENQYHWLAKIVVGEVWGVGRQWGKKLVQQGIYTAHDLAGMDLQLIKKLFSVVLQRTVLELRGVSCGSLQDFESRKSIISSKSFGSMQTEYSALAQAISSHCARAWEKLRHQKLMACHLSIFIKTNRFRFDLPQYQQTIGFKLINPTDDLRHLIRCAKLCLRKIFRPGFHYQKVGVYLGDLIEKNCLQLDLFNQVSEKELNQTERLMSVLDEINTKYGRHTLRLAAEGHVKPWAMRAQSRSPCYTTSWSELPVVII

SEQ ID NO: 66482 - DNA, 1278 bp, Legionella pneumophila str. Lens
  CDS (1)..(1278): transl_table=11
atgagcttgcctgagatgtttgcccttatcgactgcaacaatttttacgccagttgtgagcgtttgtttcgtcctgatttaaaggatgtccccatcgtggtgctatccaataacgacggctgttgtatcgcacgctcgaatgaagccaaagcattgggcattgccatgggcgagccatacttcaaaattaaacatttgtgcaaacagcatggcgtgaaagctttttcctcaaattatacgttgtatggtaacatgagtcatcgcgtgatgtgcactattgaagaagcctggcctcatatcgaaatttactcgattgatgaagcgtttcttgatttaaggagtttaccggttaactcgcatgatttgttttgcgagcagttacaaaagaaaatcttgaagtacacgggaatacccacttccatcggcattgggccgaccaaaacactagccaaagccgccaatcatttatgcaaaaaagtttataaaatccctgtgtttaatatcacttcgagtcgtgagcggttattacaacagatttccgttggggacatttggggagtagggcggcaatgggccaataaattaatttcgcgaggtattcagacggcttatgatttggcaatgaccaatcctcaccttctgaagaaatgttttaacgtcgtgttgatgcgtaccgccatggagcttcaaggaattgcttgtggcggtttagaggcaatagagcctaagcaaagtattatgtcatctaaaagttttggtcagatgcaaactcaacttgcttcgattgaggaatcaatcagtagccattgtgcccgtgcggtggagaaaatgcgtcgccagcaattggtggcgaagcgcctggttgtatttgtgcatacgaaccgatttcgcgaagatttggcacagcactttcagtccatcgaatttaagctgattaatcctacagatgatttgcgcttaattaccaaaatggccaagcgatgtctgcaacgcatttttaaaccatggtattactataaaaaggcaggagtatgtcttgaggacttaattcccaaaaacccacgacagctggatatgtttcatcaaccaagtgacgagcatctaaaccacacggaacaattgatggcggtctttgaccaaatcaatcaaaaatacggacgaagtacaatccgcctcgcggcagagggttattcaaaaccttgggcgatgcgtgctgaactgaaatcgcctgcctataccacacgatggtctgatttacctcgtgcaatcattaggtaa

SEQ ID NO: 66483 - protein, 425 aa, Legionella pneumophila str. Lens
MSLPEMFALIDCNNFYASCERLFRPDLKDVPIVVLSNNDGCCIARSNEAKALGIAMGEPYFKIKHLCKQHGVKAFSSNYTLYGNMSHRVMCTIEEAWPHIEIYSIDEAFLDLRSLPVNSHDLFCEQLQKKILKYTGIPTSIGIGPTKTLAKAANHLCKKVYKIPVFNITSSRERLLQQISVGDIWGVGRQWANKLISRGIQTAYDLAMTNPHLLKKCFNVVLMRTAMELQGIACGGLEAIEPKQSIMSSKSFGQMQTQLASIEESISSHCARAVEKMRRQQLVAKRLVVFVHTNRFREDLAQHFQSIEFKLINPTDDLRLITKMAKRCLQRIFKPWYYYKKAGVCLEDLIPKNPRQLDMFHQPSDEHLNHTEQLMAVFDQINQKYGRSTIRLAAEGYSKPWAMRAELKSPAYTTRWSDLPRAIIR

SEQ ID NO: 66484 - DNA, 1257 bp, Legionella pneumophila str. Lens
  CDS (1)..(1257): transl_table=11
atgtttgcgctggtcgattgtaataatttttatgtctcgtgtgagcgtttatttaaaccagccttagcgaataaaccaattttggtcttgtctaataatgatggttgtgtgattgcgcgatctaatgaagtaaaagctttgggtgttcaaatgggagtaccttattttgcagtcaaagcattatgcaagcagcataaagtgcatgtgttttcatccaattacacattgtatgctgatatgtcacgtcgggttatgtcagttcttgaagacaattggccagcaatagagatttactccattgatgaagcttttcttgatttgaatactttgccccaatctgaacataatgagttttgtcgcaagttacagaaaattgttttgcgctataccggtattcccgtatccataggcataggggcaaccaaaaccctggctaaactcgcaaaccatattgcgaaaaaggaattaagaactcctgtgtttaacattgaaaatcaatatcattggttagctaaaatagttgttggcgaggtatgggggatagggcggcaatggggtaaaaagttagtacaacagggaatttatacagctcatgacttggctggtatggatttgcaattaattaaaaaattatttagtgttgtattgcaacgaacagtgcttgagttgcgtggggtttcatgtggcagtttacaggattttgaatcaagaaaaagcataatatcttccaaatcctttggttctatgcaaacagagtattctgctcttgctcaggccatcagcagccattgtgccagagcttgggaaaagttacgtcatcaaaaattgatggcatgccatctttccatatttatcaaaaccaatcgattccgtttggatttgccacaatatcagcaaactatagggtttaagttgattaatccaactgatgatctgcgacatttaattcgttgtgccaaattgtgcctgcgtaaaatatttcgtcctggattccattaccaaaaggtaggcatatatttgggagatttaattgaaaaaaactgtttgcaactggatctgtttaaccaagtttcagagaaagagttaaatcaggcagagcgattgatgtcggtattaggtgcaatcaatacgaaatatggccgtcataccttacgtttggcagcagaaggatatgtgaagccttgggctatgcgggcacagttacgttctcccagctataccacttcctggtctgaattgcctgtggtcattatttaa

SEQ ID NO: 66485 - protein, 418 aa, Legionella pneumophila str. Lens
MFALVDCNNFYVSCERLFKPALANKPILVLSNNDGCVIARSNEVKALGVQMGVPYFAVKALCKQHKVHVFSSNYTLYADMSRRVMSVLEDNWPAIEIYSIDEAFLDLNTLPQSEHNEFCRKLQKIVLRYTGIPVSIGIGATKTLAKLANHIAKKELRTPVFNIENQYHWLAKIVVGEVWGIGRQWGKKLVQQGIYTAHDLAGMDLQLIKKLFSVVLQRTVLELRGVSCGSLQDFESRKSIISSKSFGSMQTEYSALAQAISSHCARAWEKLRHQKLMACHLSIFIKTNRFRLDLPQYQQTIGFKLINPTDDLRHLIRCAKLCLRKIFRPGFHYQKVGIYLGDLIEKNCLQLDLFNQVSEKELNQAERLMSVLGAINTKYGRHTLRLAAEGYVKPWAMRAQLRSPSYTTSWSELPVVII

SEQ ID NO: 66486 - DNA, 1305 bp, Photobacterium profundum SS9
  CDS (1)..(1305): transl_table=11
atgacaggtcaccttagtgggtataaaaatcaggtatgggcactggtcgatgtaaagagtttttattgttcttgtgagcaactgtttgatccctcattagtcaatcaacccgtggtggtattgtcgaataacgatgggtgttgtgttgccgtttcagagcaagcgaaagcattaggcatacagcgaggagcaccttggttcaaaattgagcgagaagcacggcagctaggtgtacaagttcgcagttctaactacgccttgtatgctgatatgagccgacgatttatagaagaactacaccgtttttcccctcatgtagagcaatattcaattgatgaagcctttgtgcgtttagacggttttcggcttgatactcttgaacaatatggttcaacaatacgagatgccattcgcgatcatattggtttgcctgtacgtgtaggtattggtgcaacgccaaccttggccaaattaggcaatcaggcagcgaagcaatttgaatgtcgagttgaaggtgtcattaaaattgattcagatgtacgccgtcagtggattcttgagcgaacagatatacaagatatatgggggatcggtgctaaaacggcgtcgcgtttacgtacaacaggcattgataatgcgctacagctagcgaacaagaccccagcagatatgcgcagactatggaatgtcggtttagcgcgtacagtcatggaactgcaaggcattgcttgtattgagcctggagacattgatgaaacgcgtaaacaaatattatcaagccgaagctttggctcaggtatttccaattttgatgaattaaaagcagcgttagcgtttcattgccagcgtgcgggagaaaaactgcgtaagcaaggtagccaagccaatgttgttggtgtgtttttacgtacgaataggcataagaacctgccacaacataatagaagtagtgctatgccactaagctgccccagccaagatagttacaagtttcttgatcttgctttgttgcagttaaagcaactctaccgaccgggctatgagtaccaaacaattggtgtaattcttaatgaattaacagaggcgaagaatgatagctttcaattggatatgtttaatagtagtgcgcttgatgaacataaacggcgagatttaatggcaatcaccgatcaagtgaatgctcgatttaaaaacggtattaaaccagcatctgttattggctcaacaaactggcatatgcggcaagcttttcgctctaaccgctggacaacgaggcttgacgaattgcctatcgcgaagtgctag

SEQ ID NO: 66487 - protein, 434 aa, Photobacterium profundum SS9
MTGHLSGYKNQVWALVDVKSFYCSCEQLFDPSLVNQPVVVLSNNDGCCVAVSEQAKALGIQRGAPWFKIEREARQLGVQVRSSNYALYADMSRRFIEELHRFSPHVEQYSIDEAFVRLDGFRLDTLEQYGSTIRDAIRDHIGLPVRVGIGATPTLAKLGNQAAKQFECRVEGVIKIDSDVRRQWILERTDIQDIWGIGAKTASRLRTTGIDNALQLANKTPADMRRLWNVGLARTVMELQGIACIEPGDIDETRKQILSSRSFGSGISNFDELKAALAFHCQRAGEKLRKQGSQANVVGVFLRTNRHKNLPQHNRSSAMPLSCPSQDSYKFLDLALLQLKQLYRPGYEYQTIGVILNELTEAKNDSFQLDMFNSSALDEHKRRDLMAITDQVNARFKNGIKPASVIGSTNWHMRQAFRSNRWTTRLDELPIAKC

SEQ ID NO: 66488 - DNA, 1269 bp, Salmonella enterica subsp. enterica serovar Paratyphi A str. ATCC
  CDS (1)..(1269): transl_table=11
atgttcgcgctctgcgatgttaatagcttttacgcctcctgcgaaacggtctttcgtcctgatttatgtggccgaccggtggtggtgttatcaaacaatgatggctgcgttatcgcgtgtagcgccgaggcgaaacaactcggtatcgcagcaggtgagccatacttcaaacagaaagaacgcttccggcgatccggtgttgtttgcttcagcagtaattacgagctttacgctgatatgtcgaaccgggtaatgaccacactagaggagatggtgccgcgggtagaaatttacagcattgatgaggctttttgtgatctgacgggggtacgaaactgccgggatctgacagatttcgggcacgagataagagcgacggtcctgaagcgcacgcacctgactgtcggtgtaggcattgcccagacgaaaacccttgccaagctggctaaccatgctgcgaaaaagtggcagcgccagaccgacggggtggttgacctgtcgaacatcgatcgccagcgtcggctgctggccctgatacccgtagaggatgtctggggtgtcggcagacgcatcagtaagaagctcaatgccctgggcatcaagactgctctcgatctctctgaacaaagtacctggatcatcaggaaacacttcaatgtcgtgctggagcgcaccgtgagagagcttcgcggagagccatgtctggagcttgaagagtttgcgccggcaaagcaggaaatcgtttgtagccgctctttcggcgagcgggtcacagactatgaggaaatgcgccaggctgtttacagctacgctgcgcgcgcggcagaaaaactccgcggcgagcaccagtactgctgtttcatttcaacattcgtcaaaacatcaccctttgccctgaacgagccctactacggtaacagcgccgcggtgacgcttctcacccccacgcaggattcacgtgacattatcaatgcggctgtgaaatgtctggataaaatctggcgcgacggccatcgctaccagaaagcgggggtgatgctgggtgacttcttcagccagggcgtagcgcaactcaaccttttcgacgataacgcgccgcgcgccggtagtgcgaagttgatggaagtactggaccatcttaacgcaaaagacgggaaggggacgctgtacttcgccgggcaggggatgtcgcaacagtgggctatgaagcgagaaatgctttcgcctcggtacaccacaagatactctgatctactgcgtgttaagtaa

SEQ ID NO: 66489 - protein, 422 aa, Salmonella enterica subsp. enterica serovar Paratyphi A str. ATCC
MFALCDVNSFYASCETVFRPDLCGRPVVVLSNNDGCVIACSAEAKQLGIAAGEPYFKQKERFRRSGVVCFSSNYELYADMSNRVMTTLEEMVPRVEIYSIDEAFCDLTGVRNCRDLTDFGHEIRATVLKRTHLTVGVGIAQTKTLAKLANHAAKKWQRQTDGVVDLSNIDRQRRLLALIPVEDVWGVGRRISKKLNALGIKTALDLSEQSTWIIRKHFNVVLERTVRELRGEPCLELEEFAPAKQEIVCSRSFGERVTDYEEMRQAVYSYAARAAEKLRGEHQYCCFISTFVKTSPFALNEPYYGNSAAVTLLTPTQDSRDIINAAVKCLDKIWRDGHRYQKAGVMLGDFFSQGVAQLNLFDDNAPRAGSAKLMEVLDHLNAKDGKGTLYFAGQGMSQQWAMKREMLSPRYTTRYSDLLRVK

SEQ ID NO: 66490 - DNA, 1257 bp, Synechococcus elongatus PCC 6301
  CDS (1)..(1257): transl_table=11
atgttcgccctgattgactgcaacaacttctacgtctcttgtgaacgagtatttgatcccaagctgcaggggcagcctgtcgttgtcctctccaataacgacggctgcgtgattgctcgttctgcagaagcaaaagctctagggattcccatggggatccccttcttcaaagtcaaagacctgatatcacaacatcagattcaggtcttctccagcaactacgccctctacggcgacatgagccagcgagtgatgcaaaccctggcaacactctgtcctgatctagaggtctattccattgatgaagccttcttagacttctcaggatttcaagcccagcccctgcagcaaggtcaattgattcgtcaaaccgtcgggcagtggacaggcatccccgtctcgatcggcattgctgccaccaaggtactcgccaaagtagccaacaaactcgccaagcaaaatggtggtgtctttgtcctgtcgccatcaaaagtgcaagccgtcctcatgactctgcccgttgaagaagtttggggcatttccagtcgttggggtcagcggcttcgggctttgaacatcagtaccgccgccgaactccaggccactaaccttaatctgatgcgtcagcagttcaacatagttctcgagcggattgtgcgagagctacggggggaatcctgcttacccctcgaatccattgtcaatccgcagcaaagcttggtagtctctcgttccttcgggcagccaattacaacgctgccagagcttaaacaagccgtagcgacctacgtcagtcgagccgccgaggaactacggagccggcaactaacgaccagctatctaaccgtctttgtaagaacaaatcggtttcaagagaactatgaagcgcccaatgctagtcagggcttactcacgcccaccaatcacacggggaaattactggaaattgccctgcgttgcacagaatcgctctatcaaccaggacgagcctacaagaaagctggagtcctgtttcaagggttagggtcagcgcagtcaatccagcagagcctgtttgaggagtccgacagcgagaaaggagcagcgctgatggtgacgatggaccggcttaaccggcggtatggtcggcagtccctgcactatggagccacaggaactcgacaaccttgggccatgcgctccgaccagcgatcgccgcaatacacaactcgatggcaagacttacccgaagtccatgcaagagctcgagagatttga

SEQ ID NO: 66491 - protein, 418 aa, Synechococcus elongatus PCC 6301
MFALIDCNNFYVSCERVFDPKLQGQPVVVLSNNDGCVIARSAEAKALGIPMGIPFFKVKDLISQHQIQVFSSNYALYGDMSQRVMQTLATLCPDLEVYSIDEAFLDFSGFQAQPLQQGQLIRQTVGQWTGIPVSIGIAATKVLAKVANKLAKQNGGVFVLSPSKVQAVLMTLPVEEVWGISSRWGQRLRALNISTAAELQATNLNLMRQQFNIVLERIVRELRGESCLPLESIVNPQQSLVVSRSFGQPITTLPELKQAVATYVSRAAEELRSRQLTTSYLTVFVRTNRFQENYEAPNASQGLLTPTNHTGKLLEIALRCTESLYQPGRAYKKAGVLFQGLGSAQSIQQSLFEESDSEKGAALMVTMDRLNRRYGRQSLHYGATGTRQPWAMRSDQRSPQYTTRWQDLPEVHARAREI

SEQ ID NO: 66492 - DNA, 1272 bp, Escherichia coli
  CDS (1)..(1272): transl_table=11
atgtttgcactagctgatatcaacagtttctacgcctcatgtgaaaaagttttccgcccggaccttcgcaacgaaccggtcatcgtactcagcaataacgatggctgtgtgatcgcgcgcagcccggaggcaaaagcccttggcatcagaatggggcagccctggtttcaggtgagacaaatgcgcctggagaagaaaatacatgtattttccagcaattatgcgctgtaccacagcatgagccaacgggttatggctgttctggagtcgctttctcccgcagttgagccctactcaattgatgaaatgttcattgatttgcgggggataaatcattgcatctctccggagttttttggtcatcagctcagggaacaggtaaaaagctggacaggactcaccatgggggtgggcattgcgcctacaaaaacgctggctaaaagtgcacagtgggcaacaaagcaatggccacagttttccggtgtggtcgcgctgacggcagaaaaccgtaatcggatcttgaagctactggggctgcagccagttggtgaggtctggggagtaggacgcagactgacggaaaagctgaatgcgctgggtattaacacagcactgcagctggcgcaggctaacacggcattcatccggaaaaacttcagcgtcattcttgagcgtacggtacgcgaactcaacggcgagtcctgcatatccctggaagaagcaccaccggcaaaacagcagattgtctgtagtcgcagttttggtgaacgaatcacagacaaagatgccatgcaccaggctgttgttcagtatgcagagcgggccgcagagaaactacgtggggagcgtcagtattgccggcaggtgacgacatttgtacggacatccccctttgcagtaaaagaaccctgttacagcaatgccgctgtggaaaagcttccattgcccacacaggacagccgggacattattgccgcagcatgcagagcgttaaaccatgtctggcgtgaagggtaccgctatatgaaggcaggtgtcatgctggctgatttcacaccatcgggtatagcgcagccgggattatttgatgaaatccagccccgtaaaaacagtgaaaagttaatgaaaacactcgatgaactgaaccagtcgggaaaagggaaagtgtggtttgcggggcgaggaaccgcccctgaatggcaaatgaaacgggaaatgctctcgccttcgtatacaacacaatggactgagatccccattgcttcattatga

SEQ ID NO: 66493 - protein, 423 aa, Escherichia coli
MFALADINSFYASCEKVFRPDLRNEPVIVLSNNDGCVIARSPEAKALGIRMGQPWFQVRQMRLEKKIHVFSSNYALYHSMSQRVMAVLESLSPAVEPYSIDEMFIDLRGINHCISPEFFGHQLREQVKSWTGLTMGVGIAPTKTLAKSAQWATKQWPQFSGVVALTAENRNRILKLLGLQPVGEVWGVGRRLTEKLNALGINTALQLAQANTAFIRKNFSVILERTVRELNGESCISLEEAPPAKQQIVCSRSFGERITDKDAMHQAVVQYAERAAEKLRGERQYCRQVTTFVRTSPFAVKEPCYSNAAVEKLPLPTQDSRDIIAAACRALNHVWREGYRYMKAGVMLADFTPSGIAQPGLFDEIQPRKNSEKLMKTLDELNQSGKGKVWFAGRGTAPEWQMKREMLSPSYTTQWTEIPIASL

SEQ ID NO: 66494 - DNA, 1263 bp, Gluconobacter oxydans 621H
  CDS (1)..(1263): transl_table=11
gtgatgcgtgttttcggcctgatcgacggcaattccttctattgctcctgccagcgcgctttcgagccgcgcctgaagcgcaggccggtcgtggtcctgagcaacaatgatggctgcgcgattgcccgcacccgagaagccaaggcactcggcatcaagatgggggatgcctggcacttggcccggaaacggcccgagagccgtccggtcgtctggtactcctcgaactatgccctctatgccgatatgtcgcgacggatgtatcaggtcctggcggagcgcgtgccgggcgtggagccctactcgatcgacgagatgttcctcgatctgagcaatcttccaggggatctgcatgaccgctgtcggcagctgcgccaggacgtgcttgatcatgcgaagatcccgacctgcgtgggctggggcccgaccaagacaatcgccaagctggccaacggtctggcgaaagatcatgcggaactggatggtttgtgtgacctcacagatcctgccatgcgccaagactggtaccgccgcacggacattgatgaagtctggggtatcggccgacagacgacgcagaagctgaaggccatgggcatcgagacaatcgccgatttcgtggcgcttgacgcaaagacagtccgtcagatgctgaccgtcgtgggcgcacgcgtacaggcggagctgcgcggtcaatcctgccttcccctgtccgacattgccgccacgcggaaaagcatcgcctcgacccggacgttcggccgtctgctactgaaatgggacgagattcgtgaggctatcgcgcactatgcgaaccgggctgcggagaaactgcgagaggataagcttgaagctgcgcacctttctgtcttgatgcagaccaatccgcacaatggcgacccctggtatgcgaagcacgcagccatcaccatcgagccaacgtccgatgccagggacctgatccggcatgcgacagaactcggccgagccatctggcttccaggatatcgctatttcaaagctggagtgatcttggcggatctgcgtcctgccgacagtcaaggactcatgttcgcatcgcgagatccggttcagtctgcgaccgtcatggctgcactggacgcagtgaatgcacgctttggaatggggactctccgcccgggatcgactgggctaaagcacagctggtcaccccggcagtctttgttgtcggcgcgatatacaacacagctggatgagattgtgacagcgaaaggttggtga

SEQ ID NO: 66495 - protein, 420 aa, Gluconobacter oxydans 621H
MMRVFGLIDGNSFYCSCQRAFEPRLKRRPVVVLSNNDGCAIARTREAKALGIKMGDAWHLARKRPESRPVVWYSSNYALYADMSRRMYQVLAERVPGVEPYSIDEMFLDLSNLPGDLHDRCRQLRQDVLDHAKIPTCVGWGPTKTIAKLANGLAKDHAELDGLCDLTDPAMRQDWYRRTDIDEVWGIGRQTTQKLKAMGIETIADFVALDAKTVRQMLTVVGARVQAELRGQSCLPLSDIAATRKSIASTRTFGRLLLKWDEIREAIAHYANRAAEKLREDKLEAAHLSVLMQTNPHNGDPWYAKHAAITIEPTSDARDLIRHATELGRAIWLPGYRYFKAGVILADLRPADSQGLMFASRDPVQSATVMAALDAVNARFGMGTLRPGSTGLKHSWSPRQSLLSARYTTQLDEIVTAKGW

SEQ ID NO: 66496 - DNA, 1293 bp, Azoarcus sp. EbN1
  CDS (1)..(1293): transl_table=11
atgagttcaccgcccccggttttcgcgctggtcgactgcaacaacttctacgccagctgcgaaaaactcttcgaccctcggctcgccggccgggcggtcgtggtgctgtcgaacaacgacggctgcgtggtcgcccgctcggccgaggcgaaggtcctcggagtcccgatgggcgcgccctggttcaaactcgccgggctcgcccagcggcacggaatcatcgccctgtcctcgaactacgcgctgtacgcggacatgagcaaccgtgtgatcgaggttctggccagcttcacgccgcggctcgaggtctacagcatcgacgagtgctttctcgatttagcggggtttgctcagctcgacctcgtggagtacagctaccggatccgcgaccgcgtcagccaatggctcgggctgccggtatgcatcgggatcgccccgacgaaaaccctcgccaagctcgccaatcatcttgccaagaagcgcctgcagtacgctggcgtctgcgacctgcgcacaatccagccagcgcaacgggcggccctattcgctgaaatcggtgtcggcgaggtgtggggcgtcggtggccggctgcaggaccgcttggccacgatggcgatccgcaccgttgaagacctgcgtcgggccaaccccgaattaatccggcgccgcttctcggtcgccctcgaacgcacggtgcgcgagctcaatgacatgtcctgcctcgaactcgaagaggtcgccccgcccaggcagcagatcattgccagccgctcgttcggcaacgccgtcttcctcttggaagagctgcgggaagcggtcgcaagccacatcagccgggcagcggagaagctgcgcgcgcgaggatccgaggtaggggcgctgacggtgatgatctgcaccaatccgttcaagccccaagatccgcaataccagcgcgcggtcacggttccgctgagcgacccgaccagcgacacccgcaagctgatcgcaatcgcgctgcgggtgctcgacggtctctaccggtcaggcttcgcataccacaaagctggaatcatgctcgccgagctcatgccggccggaaaacggcaacagagcctgttcgacgagctggcgagcgatacgcgcgcacaagccgtcatggtggcaatggatgcgatcaaccaccgatggggccgcagcacgctgaaatcctccgtcatcggcacccggcaaggctggaagatgcgccaggaacggcggacaccggactatacgacgtcctggagcgatttaccggtggtggtggcacgctga

SEQ ID NO: 66497 - protein, 430 aa, Azoarcus sp. EbN1
MSSPPPVFALVDCNNFYASCEKLFDPRLAGRAVVVLSNNDGCVVARSAEAKVLGVPMGAPWFKLAGLAQRHGIIALSSNYALYADMSNRVIEVLASFTPRLEVYSIDECFLDLAGFAQLDLVEYSYRIRDRVSQWLGLPVCIGIAPTKTLAKLANHLAKKRLQYAGVCDLRTIQPAQRAALFAEIGVGEVWGVGGRLQDRLATMAIRTVEDLRRANPELIRRRFSVALERTVRELNDMSCLELEEVAPPRQQIIASRSFGNAVFLLEELREAVASHISRAAEKLRARGSEVGALTVMICTNPFKPQDPQYQRAVTVPLSDPTSDTRKLIAIALRVLDGLYRSGFAYHKAGIMLAELMPAGKRQQSLFDELASDTRAQAVMVAMDAINHRWGRSTLKSSVIGTRQGWKMRQERRTPDYTTSWSDLPVVVAR

SEQ ID NO: 66498 - DNA, 1275 bp, Salmonella enterica subsp. enterica serovar Choleraesuis str
  CDS (1)..(1275): transl_table=11
atgttcgctttggctgacgtcaactcgttctatgccagttgcgaaaaggtctttcgccccgatttgcgtgacaggtctgtggtggtcctgagtaacaacgatggttgtgtaatcgcgcgcagcgctgaagcaaaaaaactgggcataaaaatgggggtgccgtggtttcaactgaggtcggcgaaatttccggagccggttatcgcgttctccagtaattacgccctctacgcatcaatgtcgaacagggtcatggttcaccaggaagagctggcgccacgcgttgagcagtactccattgacgagatgtttctggatattcgcggtatagacagttgcatcgatttcgaggatttcggccgacagctgcgtgagcacgttcgttccggcacagggctgaccatcggcgtcggaatgggaccgaccaaaacgctggctaaaagcgcgcaatgggcatcgaaagaatggtcacagttcggaggcatgcttgccctgacgttacacaatcagaaacgaacggagaaactgctgtcactgcaaccggtggaggaaatctggggtgtgggccgcaggatctcaaagaagctgaacacaatggggatcaccacagcactgcagctggcccgcgcgaatccaacgttcatcaggaaaaactttaatgtggttctggagagaacggtccgggaactcaatggagaaagctgtatttccctggaggaagcaccgccccccaaacagcagatagtctgcagcagaagctttggagaacgagtcacgacttatgaagcgatgcggcaggcagtctgtcagcacgctgaacgtgccgccgaaaagctgcgtggggaacggcagttctgcaggcatattgccgtgtttgtgaaaacatcgccgttcgccgtaactgagccctactacggtaatctggccagtgaaaaactgctcatccccacgcaggatacacgggacatcattgccgctgccgtcagagctctggacaggatctgggtggatggtcaccgttacgcaaaggcaggctgtatgctgaacgatttcacgccaaccagggtatcgcagcttaatttgtttgatgaagtacagccgcgggaacggagcgagcagctgatgcaagtcctagatgggattaaccatccgggcaaggggaaaatatggttcgccggtcgggggattgcccccgagtggcagatgaaaagggaactactttcgccagcttatacgacacgttgggcagatattcctgcagcgaaattgacttga

SEQ ID NO: 66499 - protein, 424 aa, Salmonella enterica subsp. enterica serovar Choleraesuis str
MFALADVNSFYASCEKVFRPDLRDRSVVVLSNNDGCVIARSAEAKKLGIKMGVPWFQLRSAKFPEPVIAFSSNYALYASMSNRVMVHQEELAPRVEQYSIDEMFLDIRGIDSCIDFEDFGRQLREHVRSGTGLTIGVGMGPTKTLAKSAQWASKEWSQFGGMLALTLHNQKRTEKLLSLQPVEEIWGVGRRISKKLNTMGITTALQLARANPTFIRKNFNVVLERTVRELNGESCISLEEAPPPKQQIVCSRSFGERVTTYEAMRQAVCQHAERAAEKLRGERQFCRHIAVFVKTSPFAVTEPYYGNLASEKLLIPTQDTRDIIAAAVRALDRIWVDGHRYAKAGCMLNDFTPTRVSQLNLFDEVQPRERSEQLMQVLDGINHPGKGKIWFAGRGIAPEWQMKRELLSPAYTTRWADIPAAKLT

SEQ ID NO: 66500 - DNA, 1284 bp, Bacteroides fragilis NCTC 9343
  CDS (1)..(1284): transl_table=11
atgtttggactaatggactgcaataacttctacgcaagttgcgagagagtgttcaatccggctttgaacggtaagccgatcgttgttttaagtaataacgacggatgtgttattgccagaagtaacgaagcgaaagcattggggattaaaatgggagttccggcttatcagatcaaagatgatattcagaaatatggtatatctgtcttttcatcgaactatacgctatacggcggcatgtccggacgcgtgatgtccatactggcagaacaagtgccggaaatggaagtatacagtatagacgaagcatttcttaacctggaagggattcgggatattcagtcactcggaacagacatcataaacaaagtaatccgcggaaccggcatacctgttagtttgggtatcgccccaaccaaaacactcgcaaaggtcgccaataaatttgcaaagaaatatcctgcttacaatcgtttatgtatcatcgatacagaagaaaagcgcaccaaggctctgcagcttactgaaattggagacatctgggggatcggtcaccggcaagttgccaagttagaaaagcagggagtcaaaacagcctatgactttaccgagttgcccgaatcttgggtgcgtaagaacatgactgtagtcggagaaaggacctggaaagaacttcaaggcatttcctgtattgatatggaaaccacaccaccggccaaaaagcagatatgtacaagtcggtcattcggcaagatggtggaggacatcgatacaatgtcggaagcaatcgccactcacgcttctacatgcgcaaagaaactccgacaacagaaaggctatgcaatgtcactaatggtattcatccatacaaataacttccgtaaagattcaccacaatattggaggaatacagttgtacatcttccagtaccgaccaatgacacattagaaattgtacattatgcactggccgggctaaaaacgattttcatgcaaggctatcaatataagaaagccggagttattatcaccgaaataaccgatagcacccaattgggactgtttgattcagtagatcgcgagaaacgtaaacgtcttcaacaaacaatagataagataaacggtaaacacagccgactcgtcaaattagcgattcaaggtacagggaggaattggaagcttaaacaaaaacagctatcagggcattataccactgacatcaatcagattataagcattaattgtacttacccaactgcatgtcaacgaaaacaatatagctga

SEQ ID NO: 66501 - protein, 427 aa, Bacteroides fragilis NCTC 9343
MFGLMDCNNFYASCERVFNPALNGKPIVVLSNNDGCVIARSNEAKALGIKMGVPAYQIKDDIQKYGISVFSSNYTLYGGMSGRVMSILAEQVPEMEVYSIDEAFLNLEGIRDIQSLGTDIINKVIRGTGIPVSLGIAPTKTLAKVANKFAKKYPAYNRLCIIDTEEKRTKALQLTEIGDIWGIGHRQVAKLEKQGVKTAYDFTELPESWVRKNMTVVGERTWKELQGISCIDMETTPPAKKQICTSRSFGKMVEDIDTMSEAIATHASTCAKKLRQQKGYAMSLMVFIHTNNFRKDSPQYWRNTVVHLPVPTNDTLEIVHYALAGLKTIFMQGYQYKKAGVIITEITDSTQLGLFDSVDREKRKRLQQTIDKINGKHSRLVKLAIQGTGRNWKLKQKQLSGHYTTDINQIISINCTYPTACQRKQYS

SEQ ID NO: 66502 - DNA, 1269 bp, Salmonella enterica subsp. enterica serovar Choleraesuis str
  CDS (1)..(1269): transl_table=11
atgttcgcgctctgcgatgttaatagcttttacgcctcctgcgaaacggtctttcgtcctgatttatgtggccgaccagtggtggtgttatcaaacaatgatggctgcgttatcgcgtgtagcgccgaggcgaaacagctcggtatcgcaccaggtgagccatacttcaaacagaaagaacgcttccggcgatccggcgttgtttgcttcagcagtaattacgagctttacgctgatatgtcgaaccgggtaatgaccacactcgaggagatggtgccgcgggtagaaatttacagcattgatgaggctttttgtgatctgacgggggtacgaaactgcctggatctgacagatttcgggcgcgagataagagcgacggtcctgaagcgcacgcacctgactgtcggtgtaggcattgcccagacgaaaacccttgccaagctggctaaccatgctgcgaaaaagtggcagcgccagaccgacggggtggttgacttgtcgaacatcgatcgccagcgtcggctgctggccctgatacccgtagaggatgtctggggtgtcggcaggcgcatcagtaagaagctaaatgccctgggcatcaagactgctctcgatctctctgaacaaagtacctggatcatcaggaaacacttcaatgtcgtgctggagcgtaccgtgagagagctttgcggagagccatgtctggagcttgaagagtttgcgccggcaaagcaggaaatcgtttgtagccgctctttcggcgagcgggtcacagactatgaggaaatgcgccaggctgtttacagctacgctgcgcgcgcggcagaaaaactccgcggcgagcaccagtactgccgtttcatctcaacattcgtcaaaacatccccctttgccctgaacgagccctactacggtaacagcgccgcagtgacgcttctcacccccacgcaggattcacgcgacattatcaatgcggctgtgaaatgcctggataaaatctggcgcgacggccatcgctaccagaaagcgggggtgatgctgggtgacttcttcagtcagggcgtagcgcaactcaaccttttcgacgataacgcgccgcgcgccggtagtgcgaagttgatggaagtactggaccatcttaacgcaaaagacgggaaggggacgctgtacttcgccgggcaggggatgtcgcaacagtgggctatgaagcgagaaatgctttcgcctcggtacaccacaagatactctgatctactgcgtgttaagtaa

SEQ ID NO: 66503 - protein, 422 aa, Salmonella enterica subsp. enterica serovar Choleraesuis str
MFALCDVNSFYASCETVFRPDLCGRPVVVLSNNDGCVIACSAEAKQLGIAPGEPYFKQKERFRRSGVVCFSSNYELYADMSNRVMTTLEEMVPRVEIYSIDEAFCDLTGVRNCLDLTDFGREIRATVLKRTHLTVGVGIAQTKTLAKLANHAAKKWQRQTDGVVDLSNIDRQRRLLALIPVEDVWGVGRRISKKLNALGIKTALDLSEQSTWIIRKHFNVVLERTVRELCGEPCLELEEFAPAKQEIVCSRSFGERVTDYEEMRQAVYSYAARAAEKLRGEHQYCRFISTFVKTSPFALNEPYYGNSAAVTLLTPTQDSRDIINAAVKCLDKIWRDGHRYQKAGVMLGDFFSQGVAQLNLFDDNAPRAGSAKLMEVLDHLNAKDGKGTLYFAGQGMSQQWAMKREMLSPRYTTRYSDLLRVK

SEQ ID NO: 66504 - DNA, 1281 bp, Pseudomonas syringae pv. syringae B728a
  CDS (1)..(1281): transl_table=11
atggaaaagcgtgaggctgtcttcgcgctaatcgactgcaattgcttctatgccagctgcgagcgtgtttttcgtccagatctggagaaaacgcccatcgtggtactcagcaataacgacggttgcgtcatcgcccgtagctacgacgccaagccatttgtgaaaatgggcgctccctattttcagatcagagaggtgttgcgccgcaacggcatcaaggtgttcagcagcaactatgcactctatggcgacatgagcgagcgtgtcatgtcgatcatcgagtcgatggtgccagcctccgaggtctacagcatcgatgaggcgttcgcagacctcaccggcgtgcctggcgatctcacagcgttcggtcgacgcatccgggcgaacattcttaaatgcactggcattcctgtgggtgtgggtatcggtcctacgaaaacgctcgccaagctggcaaaccacactgctaagcgactgctatcccatacaggcggtgttgtagacatttgcgacctgcataaccgcaactgggtactgcgtaatacggcggtctcagaggtctggggggtagggaagaagatgaatgcccacctggaggctatgaacatccgcaccgcaatggaccttgcaaccgccgacccgcgtactctgcgcgaacggttcagcgtggtcattgaaaagaccgcacgtgagctggcaggtacttcgtgcctggagctgggcgaagctgcaccacccaagcaggagatctgttgcagccgaatgttcggcaaacggctaaccaccattcagcctatcaaagaggcggtggccacctacactcagcgtgcggccgagaagctccgttctcaaaactcgctgtgcaagaagatccgcgtcagcatccgtaccggcatgttcaatccggaagaagccaagtacgccaacggcgctttggttgaattgccataccccaccaacgacgtgcgcttgatgaccagggcggcgactgaggcagtgaatcgtttgtttcgaccggggttcaagtacagcaaagctgaggttctgttgctggatctgagacagcctggcgaatttacggatgacatgttcgctgcttcgcagccggcatcttcagagaaggtgatgggagtcctggatgagatcaatacacgctggggcagagggactttacgagctgggagtgttccttccaatccggagtgggctatgcgtcgcgagctgatgagtcaaagttatacgaccaggctcgatcagttgtgggaggtgaaaagtgtgtaa

SEQ ID NO: 66505 - protein, 426 aa, Pseudomonas syringae pv. syringae B728a
MEKREAVFALIDCNCFYASCERVFRPDLEKTPIVVLSNNDGCVIARSYDAKPFVKMGAPYFQIREVLRRNGIKVFSSNYALYGDMSERVMSIIESMVPASEVYSIDEAFADLTGVPGDLTAFGRRIRANILKCTGIPVGVGIGPTKTLAKLANHTAKRLLSHTGGVVDICDLHNRNWVLRNTAVSEVWGVGKKMNAHLEAMNIRTAMDLATADPRTLRERFSVVIEKTARELAGTSCLELGEAAPPKQEICCSRMFGKRLTTIQPIKEAVATYTQRAAEKLRSQNSLCKKIRVSIRTGMFNPEEAKYANGALVELPYPTNDVRLMTRAATEAVNRLFRPGFKYSKAEVLLLDLRQPGEFTDDMFAASQPASSEKVMGVLDEINTRWGRGTLRAGSVPSNPEWAMRRELMSQSYTTRLDQLWEVKSV

SEQ ID NO: 66506 - DNA, 1281 bp, Pseudomonas syringae pv. syringae B728a
  CDS (1)..(1281): transl_table=11
atggccggtcatgagaatgtcttcgcgctgatcgactgcaactgtttttatgcgagctgcgagcgagctttccgtcccgacctggcaaagactcccatcgtagtgctcagtaacaacgacggatgtgttatcgcccggagctatgacgcaaaaccatttgtgaaaatgggtgcaccgtactttcagatcaaggacgttttgcgtcagaacggcgtgattgccttcagcagcaattacgccctgtatggcgacatgagtgagcgggttatgacgatcatcgagtcgatggtgcccgcctcggaggtttatagcatcgatgaagcgtttgccgatctgacgggcataccgggcgacatgacagaatttggccggcgcatccggtcgaaaatcctcaaatgcaccggtataccagttggcgttggcattgggcctaccaagacgcttgccaagctggcgaaccacaccgctaagagactgctggcccaaacaggtggagtcgttgacatctgcgacctgcacaagcgcaactgggtgctgcgcaatacgtgtgtgtcagaggtgtggggagtgggaaagaagatgaaagcgcatctagaggccatgaacatccgaagcgcaatggatttggccaatgctgacgcgcgcaccctacgcaccaagttcagtgtcgtcattgaaaagactgcgcgagagctggccggcacgtcgtgtttggaaatgagcgaagctgatccgcccaaacaggaaatctgcagcagtcgaatgtttgggcagcgcctgaccactatcgagccgatcaaggaagcggtggccacctacacgcagcgcgccgctgaaaaactgcgtgcccagaattcactgtgcaagaagatgcgcgtcagtatccgcacaggtatgttcaacccggatgaacctaaatatgcgaatggtgcgctggtcgagctgccgtatcccaccaatgacgtgcgcttgctgacgaagggtgcaactgaggcggtcaaccgacttttccgcccagggtacaagtacagcaaggccgaagtgctgctgctggatcttcgccaacctggcgagtttacggatgacctgtttgcggagtcgcagccagcggcggtagaaaaggtgatgggcgtgctcgacgaaatcaatgcactctgggggagggggacattgagggccgggagcgtaccgtccgatccagactgggcaatgcgcagggacatgatgagccagagctacacgactcgattggatcaactgtgggtagtcagggcgtactga

SEQ ID NO: 66507 - protein, 426 aa, Pseudomonas syringae pv. syringae B728a
MAGHENVFALIDCNCFYASCERAFRPDLAKTPIVVLSNNDGCVIARSYDAKPFVKMGAPYFQIKDVLRQNGVIAFSSNYALYGDMSERVMTIIESMVPASEVYSIDEAFADLTGIPGDMTEFGRRIRSKILKCTGIPVGVGIGPTKTLAKLANHTAKRLLAQTGGVVDICDLHKRNWVLRNTCVSEVWGVGKKMKAHLEAMNIRSAMDLANADARTLRTKFSVVIEKTARELAGTSCLEMSEADPPKQEICSSRMFGQRLTTIEPIKEAVATYTQRAAEKLRAQNSLCKKMRVSIRTGMFNPDEPKYANGALVELPYPTNDVRLLTKGATEAVNRLFRPGYKYSKAEVLLLDLRQPGEFTDDLFAESQPAAVEKVMGVLDEINALWGRGTLRAGSVPSDPDWAMRRDMMSQSYTTRLDQLWVVRAY

SEQ ID NO: 66508 - DNA, 1281 bp, Pseudomonas fluorescens Pf-5
  CDS (1)..(1281): transl_table=11
atgtctaaacacaatgagccggtgtttgccctgatcgactgcaatagcttctatgccagttgcgagcgagtgtttcgccctgatctggcaaaggtgccgattgttgtgctgagcaataacgacggttgtgtcattgcgcgcagctatgacgcaaagtccttcgtcaaaatgggagagccgtattttcagatcaagcacaagctgaggcagcacggcattgtggcgttctcttcgaactatgccctctacggcgacatgagcgagcgggtgatatcgctgatcgaatcgatggtaccggcagtcgaggtgtacagcatcgatgaagccttcgcagatctcacgggaatcaatagccttgagcagttcggccgccagatccgggcccaggtgctgcgctgtacaggcattccggttggtgtagggatcgcacctacaaagacgctcgccaagttggccaaccacactgccaagcgtctacaagcgcacactgggggcgttgtagatattaccgatcaggtgaagcgagattgggtgttgcgaaacactgatgtcgccgaggtgtggggtatcggccggcggatgaaggcgcatctggacgggatgggaatcaagtctgctatggacctggccaaggctgatccgtggacgttgcgcaaaaatttcagtgtcgtgatcgagaagacggcccgggagttggcgggcacgccgtgcctggaactggacgagccagatccgccgaaacaggagatctgctgtagtcggatgtttgggaagcgactaaccgagttggcccctatcaaggaggcggttgctacttacatgatgagagcctcggaaaaactacgggctcagaactcattgtgtaagaaaatccgcgtcagcattcgcacgggcatgtttaaccccgaggaagccaagtatgcaaacggtgtcctggtagaactgccgtatccaaccaatgacgtcagactaatgacgaaaatggctgtggaagcgctggaccgcgttttcaggccgggtttcaaatacagtaaggccgaggtcctgttgttgaatctgtgccaaccaagcgagtacaccggcgatctcttcgccttagcgcaaccatctgaaaccgacaaggtgatgaaggttctggaccagatcaacagtcgctgggggaggggcacactccgtgctgccagcgtccctaccaatcccgattggggtatgcggcgggagatgatgagccagagttacacgacgaagcttgatcagctttggaaggtgtcctgcaactga

SEQ ID NO: 66509 - protein, 426 aa, Pseudomonas fluorescens Pf-5
MSKHNEPVFALIDCNSFYASCERVFRPDLAKVPIVVLSNNDGCVIARSYDAKSFVKMGEPYFQIKHKLRQHGIVAFSSNYALYGDMSERVISLIESMVPAVEVYSIDEAFADLTGINSLEQFGRQIRAQVLRCTGIPVGVGIAPTKTLAKLANHTAKRLQAHTGGVVDITDQVKRDWVLRNTDVAEVWGIGRRMKAHLDGMGIKSAMDLAKADPWTLRKNFSVVIEKTARELAGTPCLELDEPDPPKQEICCSRMFGKRLTELAPIKEAVATYMMRASEKLRAQNSLCKKIRVSIRTGMFNPEEAKYANGVLVELPYPTNDVRLMTKMAVEALDRVFRPGFKYSKAEVLLLNLCQPSEYTGDLFALAQPSETDKVMKVLDQINSRWGRGTLRAASVPTNPDWGMRREMMSQSYTTKLDQLWKVSCN

SEQ ID NO: 66510 - DNA, 1272 bp, Pseudomonas fluorescens Pf-5
  CDS (1)..(1272): transl_table=11
atgtctgactcggtatttgcacttatcgattgcaacagcttctacgcaagctgtgagcgggtattcaggccggacctggctcgggtgccgatcgtggtcctgagcaataacgacggctgcgttattgcacgcagttatgatgctaaaccgcatgtaaagatgggcgagccgtactttcaaattaagcgcaagctccagcagttgggcatagtcgcattttcgtcgaattacgcgctctatggcgatatgagccagcgcgtcatgagcgtcatcgagtccatggttccggctgtggaggtatattcgatcgatgaagctttcgccgatctgagtgggatctgcgggccggaagccctgggccggcaaatccgcgcgcaggttatgcgcgataccgggatacccgtcggagttgggatcgccaggactaaaaccctggctaagctggcaaaccacaccgccaaacgcctgcagacacacaccggaggcgtcgtcgatctatgcgacacgttcaagcgagactgggtgcttcgtaacaccgacgtcgcagaagtctggggtgttggccgccggatgacagcgcacctggaatcaattgggatcaggacagctatggatctggccaatgcggatcctcgaacactgcgcatgaaattcagcgtagtcattgagaaaactgcacgggaactagccggtaccgcgtgcctggagctggacgaccccgctccaccgaagcaggaaatctgctgcagtcggatgttcggccaacgcctgcaggaactgccagcgctcaaagaggcggtggccacctacatgatgcgtgcctcagaaaagctccgagcccagggctcactgtgcaagaaaattcgtgtcagcatccgcactggcatgttcaatccggaggaggcgaagtatgcaaacggtgttgtggtgcatctgccctaccccaccgacgacgtgcgtttactgacacgggaagcggtggatgccttggaccgaatattcaggccaggcttcaagtacagcaaagcagaagttatgttgctcgacctatgccagccaggcgactacacggacgacctttttgcggtgtcgcaacctgctgacgcaactcgggtaatgaaggttcttgatcagattaacgatcgatggggtcgaggaactcttcgatcagccagcgtgccagcagaacccgcctggggcatgcgcagagagatgatgagccgcagctacaccacacgtctagagcaactctggacggttcactgtcattga

SEQ ID NO: 66511 - protein, 423 aa, Pseudomonas fluorescens Pf-5
MSDSVFALIDCNSFYASCERVFRPDLARVPIVVLSNNDGCVIARSYDAKPHVKMGEPYFQIKRKLQQLGIVAFSSNYALYGDMSQRVMSVIESMVPAVEVYSIDEAFADLSGICGPEALGRQIRAQVMRDTGIPVGVGIARTKTLAKLANHTAKRLQTHTGGVVDLCDTFKRDWVLRNTDVAEVWGVGRRMTAHLESIGIRTAMDLANADPRTLRMKFSVVIEKTARELAGTACLELDDPAPPKQEICCSRMFGQRLQELPALKEAVATYMMRASEKLRAQGSLCKKIRVSIRTGMFNPEEAKYANGVVVHLPYPTDDVRLLTREAVDALDRIFRPGFKYSKAEVMLLDLCQPGDYTDDLFAVSQPADATRVMKVLDQINDRWGRGTLRSASVPAEPAWGMRREMMSRSYTTRLEQLWTVHCH

SEQ ID NO: 66512 - DNA, 1281 bp, Candidatus Pelagibacter ubique HTCC1062
  CDS (1)..(1281): transl_table=11
atgtcatccattcaacgtactaagaaaatagcattagtagattgtaattcattttatgtttcctgtgaaagattattcaatcctaagattagaaataagccagttgtcgtattgtcgaataatgatggctgcattattgcaagatcgaatgaagcaaagtttcttggtattaaaatgggtgagccttactttaaagctaaagaaataatacttaaaaataaagtttatgtattttcttcaaattattctttgtatggagatttatctagaagagtgatgagaactttaaaaagatttaatcctgaattagaaatatattcagtagatgaggcctttttagatttgagtaattatccagatgatgaagtagaagatgtgggaaaagaaattagaagcattattttacaatggacaggaattccaactagcattggtattgctaaaacaaaaacactaagcaaaattgcaaatcatatagcaaagaaaaaacaatctggtgttacaaacttgataggaattgaaaatattgatccactattagaaaaaatagatatcaacgatgtgtggggagttggtaaacagatgacaaaattttatcatcaaaatggaatttataatgccaaacaattaaaaaatatgtcaaatacttggattaaaaaaagttctaatgttttaagttctagaactgccttagaacttagaggtattccttgtatcccactagaaactaaaacttccaaaagaaaaagttgtgtagtgtcaagatcatttggtacaagagttgaaaagtttcaagagttagaagaggcagttgcaagctattgtttaaatgcttcagaaaaaattagatcagaatctttaatagcaaaatcaataactgtgtctgttagaacaagcccttttcaaaatagaggggtgtattattcaaatgctaaaactatagattttccaatagctaccaataatagtattgaaatagttaaaactgctttgattgcattaaatgaaatctttattaatggatacagatatcaaaaagcaggcataacattgactggtttagttagttcaagtggcagtaaaaatctattttccactgaaaaagatgagaaaattaaaggcttaatgagatctattgatagtacaaattataagtatggacgatcaacattaagtttagctagcgctggagtaaataaaaaatggaatatgagaagagaccactcttcaaagatagatacagctaattttcattcgctaccaataataaaagctatttaa

SEQ ID NO: 66513 - protein, 426 aa, Candidatus Pelagibacter ubique HTCC1062
MSSIQRTKKIALVDCNSFYVSCERLFNPKIRNKPVVVLSNNDGCIIARSNEAKFLGIKMGEPYFKAKEIILKNKVYVFSSNYSLYGDLSRRVMRTLKRFNPELEIYSVDEAFLDLSNYPDDEVEDVGKEIRSIILQWTGIPTSIGIAKTKTLSKIANHIAKKKQSGVTNLIGIENIDPLLEKIDINDVWGVGKQMTKFYHQNGIYNAKQLKNMSNTWIKKSSNVLSSRTALELRGIPCIPLETKTSKRKSCVVSRSFGTRVEKFQELEEAVASYCLNASEKIRSESLIAKSITVSVRTSPFQNRGVYYSNAKTIDFPIATNNSIEIVKTALIALNEIFINGYRYQKAGITLTGLVSSSGSKNLFSTEKDEKIKGLMRSIDSTNYKYGRSTLSLASAGVNKKWNMRRDHSSKIDTANFHSLPIIKAI

SEQ ID NO: 66514 - DNA, 1254 bp, Colwellia psychrerythraea 34H
  CDS (1)..(1254): transl_table=11
atgtttgggttagttgatgctgtttctttctatgcacgtgcagagaaggtttttgacccaagcattaggcataaacctgttgtcgttttaacgaataacgacggctgtatttgtgctgtctgtcctattgcgaggcagctaggtgtacctaaatttgtcccctattttaaggttaagtcttttctagcaaagcacggtgtcgttgttcgttcttcaaactatgaactgtatgcagacctaagtgaaagaatgatgaatgttattgcgcgttactcagataaccattatgtctattctattgatgaatcattcttacatttcaaaaactttagctgtgttgataactggcacgaatacggccatgtaatacgtaaggcggtgtggcgagaaacacgtttacccgttggtgttggtttcggtgcaaccttaacattagccaaagcagcgaatcatgcctctaaaaagctgtcaggttttgatggtgtcgctgtgatagatgataaagcctctcgtaaagaaatcctctctagaatgtcgctcactgaggtttggggtattggctccaagttgggtaaacggctaagtatattagggcttaaaaatggctgggatttagctaatcaatcacctaaagcaatgcgaggtcagttcggtgtggtcgttgaacgtacagtgaatgaactgaacggcatgccgtgcttacaatgggatgaaatagggcaagacaaacaagagatattttctacacgtagttttgggcaacgagtaaccgacggtcatgcactcaaagctgcactatcaagtcacgccagtattgtaggggcaaaagttagacgacaaggctctttgattaaacgcttagttatttttgcatcaagttcgccacatgatgacagttactataaaaaatcggtcatttatgagtttcccattgcgactgacaatatcttaaagctagtcggtgctatttcttacgtatttgataatatttatagacaaggtgttagcttttatcgctgtggagtaggtggcgttgaattagagaatagtcaatttcagcaacaagatatgtttagtcttagtgtgaataacccgcctttaatgaaatgctatgaccaaataaatcatcgttatggtcgtggggctgttgaagtggctatcgctgaaaaaaatgaaaagtgggccatgaggcgaaacttcttatcacctcgctctacgagtaactggtcagaaatacctaagataaactgttga

SEQ ID NO: 66515 - protein, 417 aa, Colwellia psychrerythraea 34H
MFGLVDAVSFYARAEKVFDPSIRHKPVVVLTNNDGCICAVCPIARQLGVPKFVPYFKVKSFLAKHGVVVRSSNYELYADLSERMMNVIARYSDNHYVYSIDESFLHFKNFSCVDNWHEYGHVIRKAVWRETRLPVGVGFGATLTLAKAANHASKKLSGFDGVAVIDDKASRKEILSRMSLTEVWGIGSKLGKRLSILGLKNGWDLANQSPKAMRGQFGVVVERTVNELNGMPCLQWDEIGQDKQEIFSTRSFGQRVTDGHALKAALSSHASIVGAKVRRQGSLIKRLVIFASSSPHDDSYYKKSVIYEFPIATDNILKLVGAISYVFDNIYRQGVSFYRCGVGGVELENSQFQQQDMFSLSVNNPPLMKCYDQINHRYGRGAVEVAIAEKNEKWAMRRNFLSPRSTSNWSEIPKINC

SEQ ID NO: 66516 - DNA, 1257 bp, Colwellia psychrerythraea 34H
  CDS (1)..(1257): transl_table=11
atgtatgctttagttgatgcagtatcattctacgcaagtgctgaaaaagtttttgaccccagcatacgtaataaacccgttgttgttttaactaataatgatggttgtatctgcgctgtctgtccgattgcaagacgccttggtattccaaaatttataccgtactttcaagttaaatcattgcttgaaaagcatggcgtggttgttcgttcttcaaattatgagttgtatgcggatttgagcgaacgaatgatgaatgtcatcggccgcttttgtgataaccagtatatatacagcattgatgagtcatttttatattttgatcattatgaaagctgcataaatgattggcacgaatatggacataaaataagaaaagccatttggaaagaaacgagacttcccgtcggtgttggttttggtgaaacagcaacactgtcaaaagcggcaaaccatgcagccaaaaaactctctggttttaatggtgtagccgttattaatagcgcagtaagcagagacaaaatactcaagcgcatggcggtagatgaggtatggggcatcgggcgaaaaatatcgaaacgattagggcttgagggtattaacaacgccgcgcagttagcagagcaagatcctaaacatatacgaaaacaatttagcgtagtaactgaaagaaccgtgaatgaattaaacggcatcagttgtttgtcttgggatgaggtgaaatcacccaaaaaagagattttctcaacacgaagttttggacagcgcattaccacaaaaaatgaattacgctctgcgttggtaacacatgcagccattgtaggaaggaaagtgagaagacaaaattcactcattaaaaagttaatgatatttgcctctaactcgccgcatgatgacttgtattacaagcaatccatggtttttccatttatcatagcgactgaaaatacctgtgaaatggcgcgcgcggtaaaccaagttattgattctatatacaaagcaggaataaaattttaccgttgtggtgtaggtgcaatcgaattaaatagtaaaacgtttatacaaccagacttatttatgcccgatcacactaatagtaacgtaatgaaatgcttagataatgtgaaccacagatacggagatagcaccttaaagctggccgctgaagggcatcatgaaaaatggcaaatgcgacgagcgtttttaagccctcaatacaccagtcagtggcgagacattcctaaaatacagtgctag

SEQ ID NO: 66517 - protein, 418 aa, Colwellia psychrerythraea 34H
MYALVDAVSFYASAEKVFDPSIRNKPVVVLTNNDGCICAVCPIARRLGIPKFIPYFQVKSLLEKHGVVVRSSNYELYADLSERMMNVIGRFCDNQYIYSIDESFLYFDHYESCINDWHEYGHKIRKAIWKETRLPVGVGFGETATLSKAANHAAKKLSGFNGVAVINSAVSRDKILKRMAVDEVWGIGRKISKRLGLEGINNAAQLAEQDPKHIRKQFSVVTERTVNELNGISCLSWDEVKSPKKEIFSTRSFGQRITTKNELRSALVTHAAIVGRKVRRQNSLIKKLMIFASNSPHDDLYYKQSMVFPFIIATENTCEMARAVNQVIDSIYKAGIKFYRCGVGAIELNSKTFIQPDLFMPDHTNSNVMKCLDNVNHRYGDSTLKLAAEGHHEKWQMRRAFLSPQYTSQWRDIPKIQC

SEQ ID NO: 66518 - DNA, 1275 bp, Salmonella enterica
  CDS (1)..(1275): transl_table=11
atgttcgctttggctgacgtcaactcgttctatgccagttgcgaaaaggtctttcgccccgatttgcgtgacaggtctgtggtggtcctgagtaacaacgatggttgtgtaatcgtacgcagcgctgaagcaaaaaaactgggcataaaaatgggggtgccgtggtttcaactgaggtcggcgaaatttccggagccggttatcgcgttctccagtaattacgccctctacgcatcaatgtcgaacagggtcatggttcacctggaagagctggcgccacgcgttgagcagtactccattgacgagatgtttctggatattcgcggtatagacagttgcatcgatttcgaggatttcggccgacagctgcgtgagcacgttcgttccggcacagggctgaccatcggcgtcggaatgggaccgaccaaaacgctggctaaaagcgcgcaatgggcatcgaaagaatggtcacagttcggaggcgtgcttgccctgacgttacacaatcagaaacgaacggagaaactgctgtcactgcaaccggtggaggaaatctggggtgtgggccgcaggatctcaaagaagctgaacacaatggggatcaccacagcactgcagctggcccgcgcgaatccaacgttcatcaggaaaaactttaatgtggttctggagagaacggtccgggaactcaatggagaaagctgtatttccctggaggaagcaccgccccccaaacagcagatagtctgcagcagaagctttggagaacgagtcacgacttatgaagcgatgcggcaggcagtctgtcagcacgctgaacgtgccgccgaaaagctgcgtggggaacggcagttctgcaggcatattgccgtgtttgtgaaaacatcgccgttcgccgtaactgagccctactacggtaatctggccagtgaaaaactgctcatccccacgcaggatacacgggacatcattgccgctgccgtcagagctctggacaggatctgggtggatggtcaccgttacgcaaaggcaggctgtatgctgaacgatttcacgccaaccggggtatcgcagcttaatttgtttgatgaagtacagccgcgggaacggagcgagcagctgatgcaagtcctggatgggattaaccatccgggcaaggggaaaatatggttcgccggtcgggggattgcccccgagtggcagatgaaaagggaactactttcgccagcttatacgacacgttgggcagatattcctgcagcgaaattgacttga

SEQ ID NO: 66519 - protein, 424 aa, Salmonella enterica
MFALADVNSFYASCEKVFRPDLRDRSVVVLSNNDGCVIVRSAEAKKLGIKMGVPWFQLRSAKFPEPVIAFSSNYALYASMSNRVMVHLEELAPRVEQYSIDEMFLDIRGIDSCIDFEDFGRQLREHVRSGTGLTIGVGMGPTKTLAKSAQWASKEWSQFGGVLALTLHNQKRTEKLLSLQPVEEIWGVGRRISKKLNTMGITTALQLARANPTFIRKNFNVVLERTVRELNGESCISLEEAPPPKQQIVCSRSFGERVTTYEAMRQAVCQHAERAAEKLRGERQFCRHIAVFVKTSPFAVTEPYYGNLASEKLLIPTQDTRDIIAAAVRALDRIWVDGHRYAKAGCMLNDFTPTGVSQLNLFDEVQPRERSEQLMQVLDGINHPGKGKIWFAGRGIAPEWQMKRELLSPAYTTRWADIPAAKLT

SEQ ID NO: 66520 - DNA, 1284 bp, Pseudomonas syringae pv. phaseolicola 1448A
  CDS (1)..(1284): transl_table=11
ttgaataagaagcccgcgccggtgtttggcctggtcgattgcaactcgttttacgcgagctgtgagcgcgtatttcgacctgacttggccaaggtccctatcgttgttctcagcaacaacgatggctgtgttattgcccgcagctacgatgcaaaaccgtacgtgaaaatgggcgcgccttatttccagatcaaagatgttttgcgccggcacggcatccagtcgttcagtagtaattttgcgttgtatggcgacttaagccagcgcgtgatggccatcatagaatccatggtcccagccgttgaggtttacagcattgatgaagcgttcgcagacctctccggcatgcctggcaatttgaccgagctgggaagatcgattcgatcaaaagtctaccgctgcaccggtatccccgtgggtgtgggcattgcaccgaccaagacgctggccaagctggccaaccacaccgcaaagcgtctccaagcgcacaccggcggggtcgtggacatctgcgaccctgtaaaacgtgattgggtgctgcgcaatacctctgtcggagaggtatggggcatcggtcgaaaaatgaaagcgcacctggagggtatgcagatcctgtcggccaaggacttggcaatggccgatccctggatgctgcgcaaaacgttcagcgttgtgatcgagaaaacggctcgcgagctcgcgggcactgcgtgcctggagttagacgaagtcgaaccgccacgccaggagatttgttgcagcagaatgttcggcaagcgattaactgaactggggccgatcaaagaggcggtggccacctacatgatgcgcgcctccgagaagctgagagcccagggttccgtgtgcaaaaagatcagggtcagcatccgcacagggatgttcaaccctgatgaggccaagtatgcgaacggcgcgttggtgcagctcccctaccccaccaacgatgtgcggctgatgactcagtacgcgaccgaggcggtttcgcggatatttcgaccaggcttcaggtacagcaaagcagaggtgctgctgatggatatttgccagccaggcgaatttaccgatgacctgttcgcggtcaatcagccggtgagttcagatcggctgatggctgctttggattcaatcaacggcaagtggggacgtgggacgctgcgtacaggctcagtaccagtcaccccagattggggcatgcgccgtgagcagatgagccagagctacacgacacggcttgatcagttgtgggtcgtaaaagctaagtga

SEQ ID NO: 66521 - protein, 427 aa, Pseudomonas syringae pv. phaseolicola 1448A
MNKKPAPVFGLVDCNSFYASCERVFRPDLAKVPIVVLSNNDGCVIARSYDAKPYVKMGAPYFQIKDVLRRHGIQSFSSNFALYGDLSQRVMAIIESMVPAVEVYSIDEAFADLSGMPGNLTELGRSIRSKVYRCTGIPVGVGIAPTKTLAKLANHTAKRLQAHTGGVVDICDPVKRDWVLRNTSVGEVWGIGRKMKAHLEGMQILSAKDLAMADPWMLRKTFSVVIEKTARELAGTACLELDEVEPPRQEICCSRMFGKRLTELGPIKEAVATYMMRASEKLRAQGSVCKKIRVSIRTGMFNPDEAKYANGALVQLPYPTNDVRLMTQYATEAVSRIFRPGFRYSKAEVLLMDICQPGEFTDDLFAVNQPVSSDRLMAALDSINGKWGRGTLRTGSVPVTPDWGMRREQMSQSYTTRLDQLWVVKAK

SEQ ID NO: 66522 - DNA, 1122 bp, Pseudomonas syringae pv. phaseolicola 1448A
  CDS (1)..(1122): transl_table=11
gtgaaaatgggggctccgtatttccagatcaaagaggtgctgcgccgcaatgggatcaaggtgttcagcagcaactacgcgctttatggcgacatgagcgagcgcgtgatgtcgatcatcgagtccatggtgcccgccactgaggtttacagtattgacgaagcgttcgcggacttgactggcatccctggggatctcacagcattcggtcgtcgcatacgggcttccgtcctcaagtgcacgggcatacctgtcggggtcggcatcgctcctacaaaaaccctggccaagcttgcgaatcataccgccaagcgcttattggctcagacaggtggtgtcgtcgatatctgcgatctgcataaacgcaactgggtgctgcgtaacacagcagtttccgaggtctggggcgtgggcaggaagatgaaagcacacctggaggcgatgaacatccgcaccgcaatggacctggccaacgccgatccgcgcaccttgcgcgaccgtttcagtgttgtcattgaaaagacagctcatgagttggccggcactccatgcctggagctgggcgaggccgcgccccccaagcaggagatctgctgcagccgaatgtttggtcagcggctgactacgattgagccaatcaaagaagcggtggccacctatacgcaacgtgctgccgagaagcttcgctctcagagttccctgtgcaagaagatccgagtcagcatccgcaccggcatgttcaaccctgaagaagccaagtacgccaatggggcgctggttgaactgccgtatcccaccaacgacgttcgcttgatgacgaaagccgcgaccgaggcggtcaaccgtctgttccggccgggcttcaagtacagcaaagcggaggtgttgctactggaccttcgtcagccaggtgaatttacggatgatcttttcgcggcctcgcagccggtcgccgccgagaaggtgatgggcgtactggacgagatcaatacgcgctggggcagagggacccttaggacgggaagtgtgcctacgaatcctgagtgggccatgcggcgcgacatgatgagccagagttacaccacaaggcttgatcagctttggactgtccgaagtgagtga

SEQ ID NO: 66523 - protein, 373 aa, Pseudomonas syringae pv. phaseolicola 1448A
MKMGAPYFQIKEVLRRNGIKVFSSNYALYGDMSERVMSIIESMVPATEVYSIDEAFADLTGIPGDLTAFGRRIRASVLKCTGIPVGVGIAPTKTLAKLANHTAKRLLAQTGGVVDICDLHKRNWVLRNTAVSEVWGVGRKMKAHLEAMNIRTAMDLANADPRTLRDRFSVVIEKTAHELAGTPCLELGEAAPPKQEICCSRMFGQRLTTIEPIKEAVATYTQRAAEKLRSQSSLCKKIRVSIRTGMFNPEEAKYANGALVELPYPTNDVRLMTKAATEAVNRLFRPGFKYSKAEVLLLDLRQPGEFTDDLFAASQPVAAEKVMGVLDEINTRWGRGTLRTGSVPTNPEWAMRRDMMSQSYTTRLDQLWTVRSE

SEQ ID NO: 66524 - DNA, 1278 bp, Prochlorococcus marinus str. NATL2A
  CDS (1)..(1278): transl_table=11
atgtccaaagtaatacttcaaattgatgggaataatttctatgcttcgtgtgaacaaatgatcgatccttccataaaaggaaagggattagtagtactttcgaataatgatggatgcataatagctcgcagttcagaggccagaagaatgggaattcctatgggacagccttatttcaagttaaagaataaactaaatcaattaaatataaatgtgagaagttcaaattacgaactgtacggtgatataagtaatcgattaatgcaactactaagaaaaaattgcgaagaactggaaatttactctatagatgaagcgtttggaactataaaacgtccaaaagaaaagtgcttatacaaatggggaaaagatttaagggctttggtttatcaaaacataggaataccaatatctattggtattggtgagacaaaagttctatcaaaaatttctaatcatctagcaaaaaagatacaaacgaattcaggtatatttgatataggtcgtgttgaaaataaagatcattatcttgatctaattaatgtagataaagtttggggtatcggcaaaaggatgtctaaatggctaaaagacagaggcatcactaatgcgagagaacttagagatatgtcaagcgaccaaatcaaaggaaagtatggtgtagttggtctacgcattcaaaatgaattaaaaggaaacctctgtatccctataaaagagaactcatcagatcgaaaagaaatctgcgtaagcaggagttttgcacatcccatagatagcttagatgatttgagccaagcaattattaaatacgttttaatcgcaagtgctaagttgcgaaaatacaatcaattatcttcagctattacggtttttacgaatacaaatactcattcaaaagatttctttaggagtgaagcaacagaaaaaataagcgttccaacttctaactcaaagatcatgattgaaaaaagcctatcactaacaaaagaaatttttaaaccatataaaaattttataaaagcaggtgtaatattacataaacttcaaagcaatcaatacaaacaaaacctaatatttgatgcacagaatattaaagaagaattatatctacagagactagataatgtaatagataatattaattcgaaaaatggtatagatacaataaattggggatcatcaatgatggatacagaatggagcccccgaagaaaaaatctatctagtataaaaacaacaaatatagaaaatattccgactatatatgctaattag

SEQ ID NO: 66525 - protein, 425 aa, Prochlorococcus marinus str. NATL2A
MSKVILQIDGNNFYASCEQMIDPSIKGKGLVVLSNNDGCIIARSSEARRMGIPMGQPYFKLKNKLNQLNINVRSSNYELYGDISNRLMQLLRKNCEELEIYSIDEAFGTIKRPKEKCLYKWGKDLRALVYQNIGIPISIGIGETKVLSKISNHLAKKIQTNSGIFDIGRVENKDHYLDLINVDKVWGIGKRMSKWLKDRGITNARELRDMSSDQIKGKYGVVGLRIQNELKGNLCIPIKENSSDRKEICVSRSFAHPIDSLDDLSQAIIKYVLIASAKLRKYNQLSSAITVFTNTNTHSKDFFRSEATEKISVPTSNSKIMIEKSLSLTKEIFKPYKNFIKAGVILHKLQSNQYKQNLIFDAQNIKEELYLQRLDNVIDNINSKNGIDTINWGSSMMDTEWSPRRKNLSSIKTTNIENIPTIYAN

SEQ ID NO: 66526 - DNA, 1239 bp, Pseudoalteromonas haloplanktis TAC125
  CDS (1)..(1239): transl_table=11
gtggccttttatgccagtgctgaaaaagtattcgatccggctattcgctcaaaacctgtggtggtgcttaccaataacgacggttgcatatgcgcggtttgccccattgctcggcgtttaaatattcctaaatttgcgccttactttaaagttaagcagttacttgcgcaaaataatgtagtaattcgttctagtaattacgagctatacgcagatttaagcgacaaaatgatgaacgttattggccgtttttgcgacgtgcaacacgtatacagtatcgacgaatcatttttacactttaacggttacacccctgttattaatgactggtttgcatacgggcacactattaggcgcaccgtatggcgcgaaactaagctccccgttggtgttggctttggctctacggctactttagcaaaagcggcaaaccatgccgctaaaaaattatccggatttaatggcgttgctgttattaactgcgaagcaagccgtaaagctattttacaaagaatgagttgccaagatatatggggtattggtaagcgtttagccaaaaaattaaaagtaatgaacatacacactgcatggcaattagcgcagcaaaaccctaacagtatgcgccgtgcatttagtgtggtggtagagcgcactgtaaatgagcttaatggcataccttgcttaaattgggacgaagtacgccaagataagcgcgagatattttcgacccgaagctttggtgagcgtatatacgagccaacggcacttaaaaccgcgttaattaatcacgttactgtggttgctagtaaattaagaaagcaaaaatcgcttaccaaacaactttatatttttgcggcgagctcgtctcacgaaaacgttttttataaaaagtcgtatatgtatacatttgccagccccactaacgacacctgcgtaatggctagtgctgtatctcaagtgtttgagcaaatataccagccgggtattcgctattataaatgtggtgtaggtgctttagagcttattgcgcagcaatttcaacaagacgatttatttaatgaacgcaccgacaatccaccattaatgaattgtcttgatgcaataaataaacgctatggtaaaggaatgctaagtttagcaagcagtaaattaaatgaaggttggcatatgaacaggaattttttatctccgcagtacaccacgcgctggcgtgatatacccaaaatatattgtgagtaa

SEQ ID NO: 66527 - protein, 412 aa, Pseudoalteromonas haloplanktis TAC125
MAFYASAEKVFDPAIRSKPVVVLTNNDGCICAVCPIARRLNIPKFAPYFKVKQLLAQNNVVIRSSNYELYADLSDKMMNVIGRFCDVQHVYSIDESFLHFNGYTPVINDWFAYGHTIRRTVWRETKLPVGVGFGSTATLAKAANHAAKKLSGFNGVAVINCEASRKAILQRMSCQDIWGIGKRLAKKLKVMNIHTAWQLAQQNPNSMRRAFSVVVERTVNELNGIPCLNWDEVRQDKREIFSTRSFGERIYEPTALKTALINHVTVVASKLRKQKSLTKQLYIFAASSSHENVFYKKSYMYTFASPTNDTCVMASAVSQVFEQIYQPGIRYYKCGVGALELIAQQFQQDDLFNERTDNPPLMNCLDAINKRYGKGMLSLASSKLNEGWHMNRNFLSPQYTTRWRDIPKIYCE

SEQ ID NO: 66528 - DNA, 1299 bp, Pelodictyon luteolum DSM 273
  CDS (1)..(1299): transl_table=11
atgttcgcccttgccgactgcaacaacttctatgtgtcctgcgagcgggtcttcaaccccatgctttgtgggcggccggtggtggtgctttccaacaatgacggctgcgtcatcgcccgctccgaggagtcgaaagcgcttggcatagcgatgggtactccgctgttccggtgccgggatgtgattggccgccacggcgtcgcagtcttttcttccaactaccccctctacggtgacatgtcttcacgggtgatgaacaccctcggggccatggctccggagcaggagcgctattctatcgacgaggcttttttcgacctctccgggttccggcgtttcggcctcagggagcatgcggccctcatgcgacgcaccgtgctcaaacacaccggtatccccgtcagcatcggcatcgcccataccaagaccctcgccaaacttgcagcgaaggcggccaagaaagacccctcgtgcggcggcgtgctcatgcttgagggggcggaccgggtgcgccgtgcccttgcatccacccatctggaggatgtctggggtatcggtcggcagtggagcctgaaactcgctttgcagggtattcaaaccgcagccgactttgccggtatgcctcccgcgcttgtgcgccggctgctcggggtcaccggcgcaaaggtacaggctgagctccaggggcaccgatgtctcccgctggagcttgtccggcccatgaaacagaccatctgcacctcccgttcgttcggccggaacgttttctcggttgaggaactgcaagaggctgttgcaagcttcgcttcccgggccgcttcgaagcttcgccgtgagggctcgacggcctcgcttctcaccgtcttcatctccacgagcccgtttgccgcttccgctctccggcgcgaggcctcacgcaccgtctctcttccccgtgcggccgacgatgccatgacgctcgtcacggccgcctcccgggtgctcgaggcgatctaccagggcggccacccgtaccggaaagccggtgtgcttctcggagccattgctccgaagaaccctccgggagagtcattcctgctcttcggcgacgagggtgaggggagagctgaagcgctccagcaggtcatggaacaggtcaacctccgctacggaaacggcagcatccgccttgccgcggaggactcccgggcctgggagccgctttgccggcacatctccccacgctacaccacttcctgggaggagatcctccgggttccctccgcaccgcaggccccacccgctcccgctcacaggtga

SEQ ID NO: 66529 - protein, 432 aa, Pelodictyon luteolum DSM 273
MFALADCNNFYVSCERVFNPMLCGRPVVVLSNNDGCVIARSEESKALGIAMGTPLFRCRDVIGRHGVAVFSSNYPLYGDMSSRVMNTLGAMAPEQERYSIDEAFFDLSGFRRFGLREHAALMRRTVLKHTGIPVSIGIAHTKTLAKLAAKAAKKDPSCGGVLMLEGADRVRRALASTHLEDVWGIGRQWSLKLALQGIQTAADFAGMPPALVRRLLGVTGAKVQAELQGHRCLPLELVRPMKQTICTSRSFGRNVFSVEELQEAVASFASRAASKLRREGSTASLLTVFISTSPFAASALRREASRTVSLPRAADDAMTLVTAASRVLEAIYQGGHPYRKAGVLLGAIAPKNPPGESFLLFGDEGEGRAEALQQVMEQVNLRYGNGSIRLAAEDSRAWEPLCRHISPRYTTSWEEILRVPSAPQAPPAPAHR

SEQ ID NO: 66530 - DNA, 1275 bp, Synechococcus sp. CC9902
  CDS (1)..(1275): transl_table=11
atggctcaggtcaccgccctcattgacgggaacaatttctatgcctcctgcgaacagagcctggacccagccctgattggtcggccggtggtggtgctttccaataacgacggttgcatcgtggctcgaagtgccgaagcgcgggaacttggcatcgccatggggaccccatatttcaaagccaggcgcgagctagcccgccaaaacgttgtggtgcggagctcgaactatgcgctctacgccgatatgagccaacggatgatgagcctgctggaagcccattgcgacgacgttgagatctattccatcgatgaagcctttggacgcctaaggcggcccaacaatggagagctcattccctgggcgcgccagcttcgcgcacgggtacgccaaaacctgggactccccattgcgatcggattgggcgcgagcaaaagtcaagccaaactggccaaccgcctggcaaaagcggtccccaatcatgcgggggtcttcgatttcgggacttgccacaacccagatcaatggctggaaacgattgcgatcgaagacgtttgggggatcggccggcaattggcggcgtggtgccagcggagaggaatcagcaacgcacgccaactgagggatatgccccaaggagagctcaaagcgaaatgtggcgtggtgggattacgactgcaatgggaactgcggggatatgcctgcctgcccatggatttggcacccgcagccaaacaagaaacatgcgtgagccgtagcttcagccaaccggtgaccacccgcgaagagctgcgccagtcgatcgcgacgtatgtggtgcgcgcagccgaaaaattgcgtaagcaacagcaacgcacatcggccctcacgatctacacccgcacaagtcccttcaagcccaacttttacagccgtgctgccagtcgccaattggatgtacccagcaacgacaccgccgttctgctccaagcggcgctgcccctggtcgaccacatctttcgtccgcaccgtcccctcgccaaagcgggggtgttgatgcaacacctccagggcatcgacacccttcaatcccacttgttggtaccgatgagtgccgagcaacaagacaaacgggagagcctgatgcaaaccatcgaccaactcaaccgacgctatgggcgaggctccgtgcactgggccgcctgtgggctggaacctggatgggccatgcgtcgcgaccaattgagtcgtgccgcgacaacccgtttgagggatattcctgtggtccgggcttaa

SEQ ID NO: 66531 - protein, 424 aa, Synechococcus sp. CC9902
MAQVTALIDGNNFYASCEQSLDPALIGRPVVVLSNNDGCIVARSAEARELGIAMGTPYFKARRELARQNVVVRSSNYALYADMSQRMMSLLEAHCDDVEIYSIDEAFGRLRRPNNGELIPWARQLRARVRQNLGLPIAIGLGASKSQAKLANRLAKAVPNHAGVFDFGTCHNPDQWLETIAIEDVWGIGRQLAAWCQRRGISNARQLRDMPQGELKAKCGVVGLRLQWELRGYACLPMDLAPAAKQETCVSRSFSQPVTTREELRQSIATYVVRAAEKLRKQQQRTSALTIYTRTSPFKPNFYSRAASRQLDVPSNDTAVLLQAALPLVDHIFRPHRPLAKAGVLMQHLQGIDTLQSHLLVPMSAEQQDKRESLMQTIDQLNRRYGRGSVHWAACGLEPGWAMRRDQLSRAATTRLRDIPVVRA

SEQ ID NO: 66532 - DNA, 1275 bp, Synechococcus sp. CC9605
  CDS (1)..(1275): transl_table=11
atgcctcaggccacggccctgatcgatggaaacaacttctacgcctcctgcgaacagagcctggatccggctctgatcggtcagcccgtggtggtgctgtccaacaacgacggctgcatcgttgcgcgcagtgccgaagcccgtgccctcggcatccgcatgggaacgccgtacttcaaggcgcgcagggagcttgaacggcacaacgtggtggtgcgcagttcgaactacgccctctatgccgacatgagccagcggatgatgagcctgctggaggcccactgtgaagagctggaggtgtattcgattgacgaggccttcgggaggattcgtcgtccccgcaatggcgacctgcagggttgggcacgccagctgagggcacgggcacggcagaacctcggccttccgatcgccatcggcctaggggccagcaaggcgcaggccaagctggccaatcgcctggccaaacaggccccggaccatgccggaatgttcgacctcggacagtgcgacaaccccgatcgctggctggaaaccattgcgattgaagatgtctggggaatcggtcgccaattggcccattggtgccgcctgcggggcatcagcaacgcacgacatctccgggacatgccgagtggtgaactgcgcgccaaatgcggcgtggtgggtctgcggctgcaacgggagctgcgaggccatgcctgcctgccgctggagctggcaccagcaccgaagcaggaaacctgcgtgagccgcagtttcagccgccccatcaccagccaggaggagctgcaccaggccatcgccacctatgtggtgcgcgccgccgagaaattgcgcaagcaacggcaacgggcagcggccctcaccatctacacccgcaccagcccgtttgctcctgggttttacagccaagcggccagcacgcagctagacctaccgagcaatgacacagctgtgctgctgcaagcggcacgccccttggtggcacggatcttccggccccaccgtcaattggccaaggccggcgtgctgacgcagcacctgcagagccacaacatcctgcagacccatctgatggtgccgatgagtgaggagcagcagcagaaacgggagtgcctgatgcagaccatcgaccggatcaatcggcgttacgggcgtggaaccctgcaatgggccggttgcggactgcagcccagctggctgatgcggcgtgagcaactcagccgcgccgccaccacccgtctgcaggatctaccggtggtgaaggcctga

SEQ ID NO: 66533 - protein, 424 aa, Synechococcus sp. CC9605
MPQATALIDGNNFYASCEQSLDPALIGQPVVVLSNNDGCIVARSAEARALGIRMGTPYFKARRELERHNVVVRSSNYALYADMSQRMMSLLEAHCEELEVYSIDEAFGRIRRPRNGDLQGWARQLRARARQNLGLPIAIGLGASKAQAKLANRLAKQAPDHAGMFDLGQCDNPDRWLETIAIEDVWGIGRQLAHWCRLRGISNARHLRDMPSGELRAKCGVVGLRLQRELRGHACLPLELAPAPKQETCVSRSFSRPITSQEELHQAIATYVVRAAEKLRKQRQRAAALTIYTRTSPFAPGFYSQAASTQLDLPSNDTAVLLQAARPLVARIFRPHRQLAKAGVLTQHLQSHNILQTHLMVPMSEEQQQKRECLMQTIDRINRRYGRGTLQWAGCGLQPSWLMRREQLSRAATTRLQDLPVVKA

SEQ ID NO: 66534 - DNA, 1479 bp, Desulfovibrio desulfuricans G20
  CDS (1)..(1479): transl_table=11
gtgtgcttacacttgcggcagtaccggcatgcagcgcctgtgcgtgaaggagggatggctgtggatgtgaccgtactgggcagagctgcctgttcccgcgtgcggcatgacgggggaacaccgtccgcacccgcggcacagcggcaggggcgtccgttgtatgcgcttgtggactgcaacagtttttatgtttcctgcgagcgggttttcaggcccgaccttgtccgccgccccgtggttgtgctgtccaacaacgacggctgcatcattgcacgctcggcagaggctaaagctctgggtattcccatgggggccccgtggttcaaggtgcgcagacatgctgagtccgcgggggtgaccgtgttttcgtccaattatgccttgtacggtgatatgtcgtcacgcgtcatgcgggtgctggagcgtttctgtccggatgtgcatgtgtattccattgatgaggcttttatgcggctggacagcctgatcatgccgccgggtatgtcgccggagcggtatgcggcgtgtctgcggcgcgaggtgtaccggcgtacaggcattcccgtgtcggtggggctgggctgcaccaagactcttgccaagctggcaaacaggctgagcaaacagcagaatgccggagcgcgggccatggtgccggcggctttccggtatgccggagtattcaactttggagcagtgacagatcctgacgttatggatgcgttgctggaaacgctggacgtgacggatgtgtggggtgtgggggcgcgccatgcggggcgtctgcggacatggggcatacgcaccgcgcgggcgctgcgtgatgcaccggatgacagggtgcgcagatacatgagcgtgaccggtctgcacaccgtgctggaactgcgcggcatttcgtgtctgcctctggatgatgcgccgccgtcgcgcaggtcggttgtctcttcgcggtcattcggcacactggtgacgcacaaggagcatatgctcgaagctgtcacggcctatatgacacgggccgccgaaaaactgcggcgcgaacagcttgaagcgcactgcgtgggggttatgatcagcaccccgcgccacggcgacgggccgcgctatgccgacagcgcacaggtgcagcttgcggtgcccaccagccatacgccgcagctgatagtccgcgcccgcgccctgctggagagtatatggcgcgacggctaccggtaccagaaggccggcgtgatgctttcggggcttgaatctgcggtatcccgtcaggtttccatgctgcctgccctgcaggggacagggcggggactggaacggggaaggcggctcatggcggcggccgatgcggtgaatgcacgtttcggaaggggaacgctggaatacgcggcggccggtctgggaaggccgtggagcatgaaacaggaacacctgtcgccccgctacacttcggactggaaaaaactgccgcttgtgcgctga

SEQ ID NO: 66535 - protein, 492 aa, Desulfovibrio desulfuricans G20
MCLHLRQYRHAAPVREGGMAVDVTVLGRAACSRVRHDGGTPSAPAAQRQGRPLYALVDCNSFYVSCERVFRPDLVRRPVVVLSNNDGCIIARSAEAKALGIPMGAPWFKVRRHAESAGVTVFSSNYALYGDMSSRVMRVLERFCPDVHVYSIDEAFMRLDSLIMPPGMSPERYAACLRREVYRRTGIPVSVGLGCTKTLAKLANRLSKQQNAGARAMVPAAFRYAGVFNFGAVTDPDVMDALLETLDVTDVWGVGARHAGRLRTWGIRTARALRDAPDDRVRRYMSVTGLHTVLELRGISCLPLDDAPPSRRSVVSSRSFGTLVTHKEHMLEAVTAYMTRAAEKLRREQLEAHCVGVMISTPRHGDGPRYADSAQVQLAVPTSHTPQLIVRARALLESIWRDGYRYQKAGVMLSGLESAVSRQVSMLPALQGTGRGLERGRRLMAAADAVNARFGRGTLEYAAAGLGRPWSMKQEHLSPRYTSDWKKLPLVR

SEQ ID NO: 66536 - DNA, 1353 bp, Thiomicrospira crunogena XCL-2
  CDS (1)..(1353): transl_table=11
atggcggtttttgcactggtggatggcaacagtttttatgtatcttgccaaatagcgtttgaacccgcattaaagaaccgacccgcagtggtcttgtcgaataatgatggctgtgtggtggccgcgaatgccaaggcgaaagccattgatgcctttttgaggcagcagaaaacgcatttcggaccgggcggctacaaagcggcacggcccgaaagtattatgtttcaaccgtactttaaggtgaagcggtatttagaccagattaatgcagtggtgtttagttcgaactatgaattgtatgccgatatgagtagtcgaatgcattcggttttatccggctttgctgtgcaacaggagatttattccatcgatgaaagtttcttggatttatcgggcatgtcgttatccgatttcacggcgtatggcgaagagatgaagcgtacggtgatgcaatggttagggttgccggtggcggttgggtttgggtcgtctcgaaccttggcaaagctggcgaaccatttggccaaaaagcaacctgatcatcaggacgtgctcgatttgacggtgttatcagaagccagtttgaatgccttgcttaaaaaagttgcgattcgagatgtgtggggcgtcggcaaaggattgtccgccaaactggaaatgcagggcattctttcagcgtatgatttaaaagtcagtgatcttaagttcatccgaaaacgctattccattacgttggagcgtatcgtaagagaattgagaggtgagtcctgtttgtctttgggcgctttagccacctcggatcgacaaattatttcttctcgctcttttggtcaacctgtgacggagtatgctgaaatggaacaagcggtggcgagttacattgtacgagcggccgagaaaatgcgtgctcagcacaaagtgtgtcagtttgtgacggtatccattcgaaccagtccttttcagaatcggtcatgtttttaccaaaattcacagaccttgcctttgatttacccctcagacagttctgtgttgctgatcaaactggccaaacgtgctttaagatcgatttggcagtcaggatatgcttaccagaaagctggtgtgattttatcgggggtgacggaaaaaggtgcggttcagattgactgctttgcgccgaatccgcaatattccgcaaatccaaaatcagatcgtttaatgcaggtgatggattttttaaatcacagcatgggaaaaggaacggttcaattagccgcagaaggacgtaaaaatgaccaggcctggcaaatgaagcgttccaaaatgtcaaagcgttataccacgcgctgggacgagttactgacggtacgatga

SEQ ID NO: 66537 - protein, 450 aa, Thiomicrospira crunogena XCL-2
MAVFALVDGNSFYVSCQIAFEPALKNRPAVVLSNNDGCVVAANAKAKAIDAFLRQQKTHFGPGGYKAARPESIMFQPYFKVKRYLDQINAVVFSSNYELYADMSSRMHSVLSGFAVQQEIYSIDESFLDLSGMSLSDFTAYGEEMKRTVMQWLGLPVAVGFGSSRTLAKLANHLAKKQPDHQDVLDLTVLSEASLNALLKKVAIRDVWGVGKGLSAKLEMQGILSAYDLKVSDLKFIRKRYSITLERIVRELRGESCLSLGALATSDRQIISSRSFGQPVTEYAEMEQAVASYIVRAAEKMRAQHKVCQFVTVSIRTSPFQNRSCFYQNSQTLPLIYPSDSSVLLIKLAKRALRSIWQSGYAYQKAGVILSGVTEKGAVQIDCFAPNPQYSANPKSDRLMQVMDFLNHSMGKGTVQLAAEGRKNDQAWQMKRSKMSKRYTTRWDELLTVR

SEQ ID NO: 66538 - DNA, 1287 bp, Prochlorococcus marinus str. MIT 9312
  CDS (1)..(1287): transl_table=11
atgagaatttcaagcattgatgctatagctcttatagatgctaataatttttatgcgtcatgtgaacaaactattaatcctcatttgagaaataaaccagtagtaattttatctaataatgacggatgtatcattgcgagaagtcccgaagcgcgagctttgaaaattaaaatgggaactccttattttaaggtcaaagaaaaattaaataaattagatgtagcagtcttaagctcaaactactcgctttacggcgatatgagcagaagacttatgaatttactaaaaaaatactgtgaacaaatagaaatttattctattgacgaagcatttgtctcaatttctagacctaatgataaaaatctatatccttgggcaagaaacataagatcattaatatatcagaatctaggcatcacactaacagtaggtataggagaaaataaagtaagagcaaaaattgctaataaattagctaaaaatattgattattcagctggaatatttgatttatctagaactagaaatgagaataattatttaaaaagaattagtgtagataacatatggggagtcgggaaacaaacctctaattggttgaaaagtaaaggtattaaaaatgcgagagaattaagagatatggaagaaaatgaaattattaagaaactaggcatagtagggaaaagattacaattagaactgaaaggctataaatgcctgcctctagaaaaaagcaagaaatcaaaaaaagaaattcaggtaagcaggagtttcggtacccctatcacaaaattagaagacttaactcaagcactggcgactcatgcaataaaagcatctgaaaaaatgagaagtcagaatttacaatcatccgacattagagtatttgccagaaccagtaaatattcaagtcaaaattatcaaagaagtgctcatagaaaacttacaaatgcgacagacgacacaaacagcattttaaaaatagtagttgaattatctaaagaaatttataatcccgaatataaattttcaaaagctggtgttttaatgcaggatttaactaatagcgaatatttacagcaatcagttatcaattacaaatctcagaaagacctaaaaaaatcagcaactctcatgagaactattgatttattaaataaaagatttaataacaatgcaattacatgggctattacaaaaacgcaaaaaagttggaagatgaataagaatttcttaagtcgctcatctacaactgatatagaacaaatcccaactatagtaaagtaa

SEQ ID NO: 66539 - protein, 428 aa, Prochlorococcus marinus str. MIT 9312
MRISSIDAIALIDANNFYASCEQTINPHLRNKPVVILSNNDGCIIARSPEARALKIKMGTPYFKVKEKLNKLDVAVLSSNYSLYGDMSRRLMNLLKKYCEQIEIYSIDEAFVSISRPNDKNLYPWARNIRSLIYQNLGITLTVGIGENKVRAKIANKLAKNIDYSAGIFDLSRTRNENNYLKRISVDNIWGVGKQTSNWLKSKGIKNARELRDMEENEIIKKLGIVGKRLQLELKGYKCLPLEKSKKSKKEIQVSRSFGTPITKLEDLTQALATHAIKASEKMRSQNLQSSDIRVFARTSKYSSQNYQRSAHRKLTNATDDTNSILKIVVELSKEIYNPEYKFSKAGVLMQDLTNSEYLQQSVINYKSQKDLKKSATLMRTIDLLNKRFNNNAITWAITKTQKSWKMNKNFLSRSSTTDIEQIPTIVK

SEQ ID NO: 66540 - DNA, 1257 bp, Synechococcus elongatus PCC 7942
  CDS (1)..(1257): transl_table=11
atgttcgccctgattgactgcaacaacttctacgtctcttgtgaacgagtatttgatcccaagctgcaggggcagcctgtcgttgtcctctccaataacgacggctgcgtgattgctcgttctgcagaagcaaaagctctagggattcccatggggatccccttcttcaaagtcaaagacctgatatcacaacatcagattcaggtcttctccagcaactacgccctctacggcgacatgagccagcgagtgatgcaaaccctggcaacactctgtcctgatctagaggtctattccattgatgaagccttcttagacttctcaggatttcaagcccagcccctgcagcaaggtcaattgattcgtcaaaccgtcgggcagtggacaggcatccccgtctcgatcggcattgctgccaccaaggtactcgccaaagtagccaacaaactcgccaagcaaaatggtggtgtctttgtcctgtcgccatcaaaagtgcaagccgtcctcatgactctgcccgttgaagaagtttggggcatttccagtcgttggggtcagcggcttcgggctttgaacatcagtaccgccgccgaactccaggccactaaccttaatctgatgcgtcagcagttcaacatagttctcgagcggattgtgcgagagctacggggggaatcctgcttacccctcgaatccattgtcaatccgcagcaaagcttggtagtctctcgttccttcgggcagccaattacaacgctgccagagcttaaacaagccgtagcgacctacgtcagtcgagccgccgagaaactacggagccggcaactaacgaccagctatctaaccgtctttgtaagaacaaatcggtttcaagagaactatgaagcgcccaatgctagtcagggcttactcacgcccaccaatcacacggggaaattactggaaattgccctgcgttgcacagaatcgctctatcaaccaggacgagcctacaagaaagctggagtcctgtttcaagggttagggtcagcgcagtcaatccagcagagcctgtttgaggagtccgacagcgagaaaggagcagcgctgatggtgacgatggaccggcttaaccggcggtatggtcggcagtccctgcactatggagccacaggaactcgacaaccttgggccatgcgctccgaccagcgatcgccgcaatacacaactcgatggcaagacttacccgaagtccatgcaagagctcgagagatttga

SEQ ID NO: 66541 - protein, 418 aa, Synechococcus elongatus PCC 7942
MFALIDCNNFYVSCERVFDPKLQGQPVVVLSNNDGCVIARSAEAKALGIPMGIPFFKVKDLISQHQIQVFSSNYALYGDMSQRVMQTLATLCPDLEVYSIDEAFLDFSGFQAQPLQQGQLIRQTVGQWTGIPVSIGIAATKVLAKVANKLAKQNGGVFVLSPSKVQAVLMTLPVEEVWGISSRWGQRLRALNISTAAELQATNLNLMRQQFNIVLERIVRELRGESCLPLESIVNPQQSLVVSRSFGQPITTLPELKQAVATYVSRAAEKLRSRQLTTSYLTVFVRTNRFQENYEAPNASQGLLTPTNHTGKLLEIALRCTESLYQPGRAYKKAGVLFQGLGSAQSIQQSLFEESDSEKGAALMVTMDRLNRRYGRQSLHYGATGTRQPWAMRSDQRSPQYTTRWQDLPEVHARAREI

SEQ ID NO: 66542 - DNA, 1116 bp, Pseudomonas syringae pv. syringae B728a
  CDS (1)..(1116)
atgggtgcaccgtactttcagatcaaggacgttttgcgtcagaacggcgtgattgccttcagcagcaattacgccctgtatggcgacatgagtgagcgggttatgacgatcatcgagtcgatggtgcccgcctcggaggtttatagcatcgatgaagcgtttgccgatctgacgggcataccgggcgacatgacagaatttggccggcgcatccggtcgaaaatcctcaaatgcaccggtataccagttggcgttggcattgggcctaccaagacgcttgccaagctggcgaaccacaccgctaagagactgctggcccaaacaggtggagtcgttgacatctgcgacctgcacaagcgcaactgggtgctgcgcaatacgtgtgtgtcagaggtgtggggagtgggaaagaagatgaaagcgcatctagaggccatgaacatccgaagcgcaatggatttggccaatgctgacgcgcgcaccctacgcaccaagttcagtgtcgtcattgaaaagactgcgcgagagctggccggcacgtcgtgtttggaaatgagcgaagctgatccgcccaaacaggaaatctgcagcagtcgaatgtttgggcagcgcctgaccactatcgagccgatcaaggaagcggtggccacctacacgcagcgcgccgctgaaaaactgcgtgcccagaattcactgtgcaagaagatgcgcgtcagtatccgcacaggtatgttcaacccggatgaacctaaatatgcgaatggtgcgctggtcgagctgccgtatcccaccaatgacgtgcgcttgctgacgaagggtgcaactgaggcggtcaaccgacttttccgcccagggtacaagtacagcaaggccgaagtgctgctgctggatcttcgccaacctggcgagtttacggatgacctgtttgcggagtcgcagccagcggcggtagaaaaggtgatgggcgtgctcgacgaaatcaatgcactctgggggagggggacattgagggccgggagcgtaccgtccgatccagactgggcaatgcgcagggacatgatgagccagagctacacgactcgattggatcaactgtgggtagtcagggcgtactga

SEQ ID NO: 66543 - protein, 371 aa, Pseudomonas syringae pv. syringae B728a
MGAPYFQIKDVLRQNGVIAFSSNYALYGDMSERVMTIIESMVPASEVYSIDEAFADLTGIPGDMTEFGRRIRSKILKCTGIPVGVGIGPTKTLAKLANHTAKRLLAQTGGVVDICDLHKRNWVLRNTCVSEVWGVGKKMKAHLEAMNIRSAMDLANADARTLRTKFSVVIEKTARELAGTSCLEMSEADPPKQEICSSRMFGQRLTTIEPIKEAVATYTQRAAEKLRAQNSLCKKMRVSIRTGMFNPDEPKYANGALVELPYPTNDVRLLTKGATEAVNRLFRPGYKYSKAEVLLLDLRQPGEFTDDLFAESQPAAVEKVMGVLDEINALWGRGTLRAGSVPSDPDWAMRRDMMSQSYTTRLDQLWVVRAY

SEQ ID NO: 66544 - DNA, 1425 bp, Desulfovibrio desulfuricans G20
  CDS (1)..(1425)
atggctgtggatgtgaccgtactgggcagagctgcctgttcccgcgtgcggcatgacgggggaacaccgtccgcacccgcggcacagcggcaggggcgtccgttgtatgcgcttgtggactgcaacagtttttatgtttcctgcgagcgggttttcaggcccgaccttgtccgccgccccgtggttgtgctgtccaacaacgacggctgcatcattgcacgctcggcagaggctaaagctctgggtattcccatgggggccccgtggttcaaggtgcgcagacatgctgagtccgcgggggtgaccgtgttttcgtccaattatgccttgtacggtgatatgtcgtcacgcgtcatgcgggtgctggagcgtttctgtccggatgtgcatgtgtattccattgatgaggcttttatgcggctggacagcctgatcatgccgccgggtatgtcgccggagcggtatgcggcgtgtctgcggcgcgaggtgtaccggcgtacaggcattcccgtgtcggtggggctgggctgcaccaagactcttgccaagctggcaaacaggctgagcaaacagcagaatgccggagcgcgggccatggtgccggcggctttccggtatgccggagtattcaactttggagcagtgacagatcctgacgttatggatgcgttgctggaaacgctggacgtgacggatgtgtggggtgtgggggcgcgccatgcggggcgtctgcggacatggggcatacgcaccgcgcgggcgctgcgtgatgcaccggatgacagggtgcgcagatacatgagcgtgaccggtctgcacaccgtgctggaactgcgcggcatttcgtgtctgcctctggatgatgcgccgccgtcgcgcaggtcggttgtctcttcgcggtcattcggcacactggtgacgcacaaggagcatatgctcgaagctgtcacggcctatatgacacgggccgccgaaaaactgcggcgcgaacagcttgaagcgcactgcgtgggggttatgatcagcaccccgcgccacggcgacgggccgcgctatgccgacagcgcacaggtgcagcttgcggtgcccaccagccatacgccgcagctgatagtccgcgcccgcgccctgctggagagtatatggcgcgacggctaccggtaccagaaggccggcgtgatgctttcggggcttgaatctgcggtatcccgtcaggtttccatgctgcctgccctgcaggggacagggcggggactggaacggggaaggcggctcatggcggcggccgatgcggtgaatgcacgtttcggaaggggaacgctggaatacgcggcggccggtctgggaaggccgtggagcatgaaacaggaacacctgtcgccccgctacacttcggactggaaaaaactgccgcttgtgcgctga

SEQ ID NO: 66545 - protein, 474 aa, Desulfovibrio desulfuricans G20
MAVDVTVLGRAACSRVRHDGGTPSAPAAQRQGRPLYALVDCNSFYVSCERVFRPDLVRRPVVVLSNNDGCIIARSAEAKALGIPMGAPWFKVRRHAESAGVTVFSSNYALYGDMSSRVMRVLERFCPDVHVYSIDEAFMRLDSLIMPPGMSPERYAACLRREVYRRTGIPVSVGLGCTKTLAKLANRLSKQQNAGARAMVPAAFRYAGVFNFGAVTDPDVMDALLETLDVTDVWGVGARHAGRLRTWGIRTARALRDAPDDRVRRYMSVTGLHTVLELRGISCLPLDDAPPSRRSVVSSRSFGTLVTHKEHMLEAVTAYMTRAAEKLRREQLEAHCVGVMISTPRHGDGPRYADSAQVQLAVPTSHTPQLIVRARALLESIWRDGYRYQKAGVMLSGLESAVSRQVSMLPALQGTGRGLERGRRLMAAADAVNARFGRGTLEYAAAGLGRPWSMKQEHLSPRYTSDWKKLPLVR

SEQ ID NO: 66546 - DNA, 1323 bp, Rubrivivax gelatinosus PM1
  CDS (1)..(1323)
atgtacgccctcgtcgacggcaacaacttctactgctcggtcgagcgcgttttccggccgtcgctgacgggccggcccgtggtggtcatgggctcgaacgacggctgtgtcattgcccggtccaacgaggcgaaggcgctgggcgtgaagatgggggagccctggtttcaatgtcgacacctcgagaaggaccagggcctcgtggcgctgtcggccaacttcaccctctacggcgacatgtccgagaggatgatgaccgtggccggttccttcgcgccacgccaagaggtttacagcatcgacgagtgcttcctggacttcgccggcatgccgggcggaccaggttccctcgtcgaaactggccgcgcgctgcgtgagaaggttcttcggtggaccggcattcccacctgcgtcggcttcggcccgaccaagacgctcgcgaagctggcgaaccacatcgccaagtcggccgagcgcaagccggggtcctaccctgagcagcttgctcaggtctgcaatctgggcgagctggcagatgaagtccggcgggagctcctggtcaagacggaggtcaaggaagtctggggcgtagggccgcgcatcggcgcccagctcaacgcggctggagtctcgaccgtgctcgacctagtccggctggaccccgcggctgtccggcgacgcttctcggtggtgctcgagaagaccgtgctcgaactgcgcggcatcagctgcctgacgctcgaagacgcgccggcgagccggcagcagatcatgtgttcgcgctccttcgggcggccggtgctcgagatggagggactggtcgaggcgttgagcgacttcgcggcgcgcgcggccgagaagctgcgcaagcaggagaacctcgccggcgccgtgcacgtcttcatcaccacgagccccttccgcaaggaggaccggcagtacagccgttcggtcaccgtgccgctggtccgaccgacaggagacacgcgggtgctggtcagcgccgccatcctcgctctgcgggcggtgttcaagcctggctaccgctacgcgaaagcgggggtcatgctcatggaactgcagcccgagtcggtgcaccaggccgagctcgacctgggagagcccgagcccggcactgtcccgcgcgaccgcagcaagctgatgtccgcggtcgacgctgtgaaccggcgccacggccgcggctcactaatggtggcgagcgccggtctcgcaactgcgcgacgcgagttcgtgccgaaacaggagcggcgaacgccccactacacaacgtcttgggacgacatgccggtggcgcgcgcctga

SEQ ID NO: 66547 - protein, 440 aa, Rubrivivax gelatinosus PM1
MYALVDGNNFYCSVERVFRPSLTGRPVVVMGSNDGCVIARSNEAKALGVKMGEPWFQCRHLEKDQGLVALSANFTLYGDMSERMMTVAGSFAPRQEVYSIDECFLDFAGMPGGPGSLVETGRALREKVLRWTGIPTCVGFGPTKTLAKLANHIAKSAERKPGSYPEQLAQVCNLGELADEVRRELLVKTEVKEVWGVGPRIGAQLNAAGVSTVLDLVRLDPAAVRRRFSVVLEKTVLELRGISCLTLEDAPASRQQIMCSRSFGRPVLEMEGLVEALSDFAARAAEKLRKQENLAGAVHVFITTSPFRKEDRQYSRSVTVPLVRPTGDTRVLVSAAILALRAVFKPGYRYAKAGVMLMELQPESVHQAELDLGEPEPGTVPRDRSKLMSAVDAVNRRHGRGSLMVASAGLATARREFVPKQERRTPHYTTSWDDMPVARA

SEQ ID NO: 66548 - DNA, 1263 bp, Cytophaga hutchinsonii
  CDS (1)..(1263)
atgtatgcattaattgactgcaataatttctacgcaagctgtgaaagagtattcaatccttcactgaacggaaagcccatagtcgtattaagtaataacgatggctgtgtgattgcaagaagcaacgaagcaaaggctctgggcattgacatgggaggagcgtattttatgattgaagaagcattaaaaaaacataatgtatttgtgttctcttctaattatactttgtacggtgatatgtcacaacgggtaatgaatacattggctgaatttacacccgagattgaagtatacagtatcgacgaatcttttctaaactttgaaggctttgaattgcttggggatttaaagatttatggtacaacaatccgtaatacagtttttcgcaatacaggtattccggtatcaataggcattgcccctacaaaagctcttgccaaattatccaataggatcgcaaagaagaataaggaatataatcatgtttgtgtgcttgattcacaggagaaaataatggcagccttaaagattacaactgtagataatatctggggaataggtcgtgcatatcataattttcttttgaatcatggaatacaaactacttatgattttgttcagcagcccgaagagtgggttagaaaaaatatgtcagtggtcggattaagacttcacaaggaattgaagggtgaaaaatgcctagagctagagttagtagctatggcaaaacagaatatttgtacttccagaagctttggcagatacttaacggatattgacccaataaaagaagcaatgagcaattttgcatcacgctgcgctttaaagcttagaaaagataagtctgtatgcacgttggtacaaatcctattacataccaataagcataagcctgatcagccacaatattttgttaataaagtaatcacattgcctgtgccaactaatagcaccatcgaacttatacaggcatcattgcgcgcattggatttggtttataaaccaggatacagatatatgaaatgcggagtgatcgtgtcaggtattgttccggaagatcgtgttcaacaaaatcttttcgatacagtagatagaagcaagcacaacaaggttactacgatcatggacaagttaaataagtccttaggtgcagattttgtaaaagtaggatcgttaggtgttacaaagcaatggcatcttaaggctgaaaaattgagtcaatgctacagcacaaggtgggatgagataattgtaattaagtaa

SEQ ID NO: 66549 - protein, 420 aa, Cytophaga hutchinsonii
MYALIDCNNFYASCERVFNPSLNGKPIVVLSNNDGCVIARSNEAKALGIDMGGAYFMIEEALKKHNVFVFSSNYTLYGDMSQRVMNTLAEFTPEIEVYSIDESFLNFEGFELLGDLKIYGTTIRNTVFRNTGIPVSIGIAPTKALAKLSNRIAKKNKEYNHVCVLDSQEKIMAALKITTVDNIWGIGRAYHNFLLNHGIQTTYDFVQQPEEWVRKNMSVVGLRLHKELKGEKCLELELVAMAKQNICTSRSFGRYLTDIDPIKEAMSNFASRCALKLRKDKSVCTLVQILLHTNKHKPDQPQYFVNKVITLPVPTNSTIELIQASLRALDLVYKPGYRYMKCGVIVSGIVPEDRVQQNLFDTVDRSKHNKVTTIMDKLNKSLGADFVKVGSLGVTKQWHLKAEKLSQCYSTRWDEIIVIK

SEQ ID NO: 66550 - DNA, 1260 bp, Cytophaga hutchinsonii
  CDS (1)..(1260)
atgtacgcattaatcgactgcaactgtttctacgtttcctgtgaacgtgtcttccgtcccgacctgcggcagcagccggttgttgtgctttctaacaacgacggctgtgtgatctcgcgttccgatgaagctaaagcaatcggtgttaaaatgggtgaaccattttttaaaatgaaagagctggtgcgtaatggtaaggtgactgctttctcttcaaactatacgctgtatggggatctgtctgatcgtgtaatgaaaacgcttgcttccattgtgccggatatagaagtctattccattgatgaagcatttttgcatctgaatgagagccatacggatttagaaacacttggccataccattcgcaatacagttaaacagcataccggaatcccggtaggcgtgggcattgcgccaaccaagacactcgccaagctggcgaaccgtctttcaaaaaaaacaggcggcgtacatattatttatccggataatattcaggaaaagctgaatgcgtgcgcactgcaggatgtatggggcatcggcaggcggaatgcgaaacggctgcaggcaaattatgttgataccattgagcagtttgtgaatcagcgcgaagaatgggtacgccagcatttttcagtgatcgggctgcgtacatataaggaattaaaaggaattccgtgcattgatatggaagatgaattgacggaaaaaaaatccatctgtacttcacgttcattcggtgaactgcagaatacatttgcctctatccaggaagctatagccacacacgctgccagctgtgccgagaaattacgcaaacaaaaatgtgccgcagccggtatgtatgtgtccttatcaaaaagccgctttaccgaccaggaaggcgataaatattttggcacctacattaaattaccacaggcaaccaacaatacagccacgttgattcaatatgcttcaaaagggttagagctcttgtttaagaaagatgtctattataaaaaatgtggcgtaaccgttattgatattgttcccgaagaaaagatccagttaaatttattcgaaccccaaaagaatgcgcggttgcatgcattggaagacacgattgataaactgaatcagaaactgggaaagaatgtccttcggcaagccatacaaggtaatgataacaatacctggaagctgcgctgtgaaaacatgtcgcccaactatacgaccaggataggggagatactggtcgtgcatgtaggtaataagtaa

SEQ ID NO: 66551 - protein, 419 aa, Cytophaga hutchinsonii
MYALIDCNCFYVSCERVFRPDLRQQPVVVLSNNDGCVISRSDEAKAIGVKMGEPFFKMKELVRNGKVTAFSSNYTLYGDLSDRVMKTLASIVPDIEVYSIDEAFLHLNESHTDLETLGHTIRNTVKQHTGIPVGVGIAPTKTLAKLANRLSKKTGGVHIIYPDNIQEKLNACALQDVWGIGRRNAKRLQANYVDTIEQFVNQREEWVRQHFSVIGLRTYKELKGIPCIDMEDELTEKKSICTSRSFGELQNTFASIQEAIATHAASCAEKLRKQKCAAAGMYVSLSKSRFTDQEGDKYFGTYIKLPQATNNTATLIQYASKGLELLFKKDVYYKKCGVTVIDIVPEEKIQLNLFEPQKNARLHALEDTIDKLNQKLGKNVLRQAIQGNDNNTWKLRCENMSPNYTTRIGEILVVHVGNK

SEQ ID NO: 66552 - DNA, 1314 bp, Arthrobacter sp. FB24
  CDS (1)..(1314): transl_table=11
atgtctgagtcgcgggcgcctgagaagcgggcgcaggacacggtccggcagattgccttggtggacgtcaactgcttctatgcctcagccgagcgggcattcgatccctcgctggaaggccgccccctcgtggtcctctcgaataacgatggctgcgcggtcacccggtcccccgaagccaaggcgctgggcatccccgtcggcgagccgtggttcaagatcgcgccccgggccaaggaatgggggctggtggccaagtccagcaactatgagctgtacggggatatcagcgcccgcgtgatggagcttctagggcgctactcggcctggctggaggtttacagcatcgatgaagccttcctgggagtcaaagggaccccggatgagctcctgcgtctgggacaaaccatcaagacggctgtccgccgcaacgtcggggtgccggtctgcgtgggaattgccaataccaagactctcgcgaagctggccaacaagtgggcgaagaacaaccccggcctcaacggcgtgtgccactgggactccatgccgcccccggcccgcgaagcgctgatgggccgggtatccgtcatcgaactctggggcgtggctggccggctgacaaaacgcctgaacaacatgggcatccattccatcctggaccttgcccgcgccgatcccgtccggatccgtgaccgcttctcggtggtgctgatgcgcacggtcctggaactgcagggcaccgcgtgcatccccatggaagcagagcgcattgggcgtgaccagctcatcttcagccgctcgttttccacgcccatcaccaccgccgcggacctgcgacaggtcatgagcgtctacggccagcaagccagcgcccgcctggccaagcacagcctgcaggccaaggtcctcacggccttcgccggcacctcccactacaacccgctggacacgtcctacccctcggtctgcgtcaccctgcccatgcccaccgcggatccggtgctgttgaccagggccgcgcatgccctgctcccccggatccaggaagggaccaaatacgtccgcgcgggcatcatggtcaccgacctgcgcccctcgggccagcagtcacccctgccggtgtttgccaacccgcacgaagaacgcggcatcggccccctgctggaggacatcacccgccgctacggacgcggatccgtgggcctcggccatgccggaatccggggcgggccggactggtccatgcagcgcaccatgctctcgcccaggtacaccacgcactggaacgagcttcccgtggtcaaggcagcctga

SEQ ID NO: 66553 - protein, 437 aa, Arthrobacter sp. FB24
MSESRAPEKRAQDTVRQIALVDVNCFYASAERAFDPSLEGRPLVVLSNNDGCAVTRSPEAKALGIPVGEPWFKIAPRAKEWGLVAKSSNYELYGDISARVMELLGRYSAWLEVYSIDEAFLGVKGTPDELLRLGQTIKTAVRRNVGVPVCVGIANTKTLAKLANKWAKNNPGLNGVCHWDSMPPPAREALMGRVSVIELWGVAGRLTKRLNNMGIHSILDLARADPVRIRDRFSVVLMRTVLELQGTACIPMEAERIGRDQLIFSRSFSTPITTAADLRQVMSVYGQQASARLAKHSLQAKVLTAFAGTSHYNPLDTSYPSVCVTLPMPTADPVLLTRAAHALLPRIQEGTKYVRAGIMVTDLRPSGQQSPLPVFANPHEERGIGPLLEDITRRYGRGSVGLGHAGIRGGPDWSMQRTMLSPRYTTHWNELPVVKAA

SEQ ID NO: 66554 - DNA, 1308 bp, Chromohalobacter salexigens DSM 3043
  CDS (1)..(1308): transl_table=11
atgtcattcacgcactgcccgccgagggcgaggaataggcgctcgttcatgttcgcgctgatcgactgcaacaacttctatgccgcctgcgagcgcctgttcgagccgcgcctggaaggcgttcccctgggtgtgctgtccaacaacgacggctgcgtcatcgcgcgctccgaggagttcaaggcgctcgacatcccgatgggcatcccgacccacaagatcgccccgcatctgcgccggcgcatcgtgctgaaatcctccaactacacgctctatggcgacctctcggcacgcgtgcagcaggtgctggcacagcaggttcccacgctggagccctactccatcgacgaatgcttcctggatctgcgcggcatgcgcgaggactggcacgccctcggcgcgaccctggtgcgcagcgtgcaacgccaggtcggcctgccggtgtccatcggcatcgcgccgacgcgcaccctggccaagctcgccaatcgccaggccaagacacagccgacacgccctcaggtatgcgtgtggcaaagcgccgacgcgcccgaactggcagcccacctggcccggctgtcgccccgcgaggtctggggcgtgggcgagcgcctcaacgcacgcctggccggcatgggcatcgtgaccgccgccgccctgcgcgagacgccggacagcgtattgcggcggcgcttcagcgtggtactggcgcgcaccgccgccgaactcaacggccaggcctgcctgtcgatgggcgacctggaaacgccacgccgcagcatcctctgttcgcgctcgttcggtcagccactgcgcgaccgcgcctccctggccggcgccttgcgccatcattgccagcgcgccggcgaaaagctgcggcgcgatgccatgcaagcctcggccatcggcgtatacatgcgtaccaacccgcatcatgccgacagtttccaccaggcctgcgaatgggcggcgctgcccttccccagcgccgacacccagcaactcaaccgcgcggcacaacgcctgctcgcacggctctggcagcctgcggcctatcaaaaactgggggtgatgctcaccgagctgacgccccgtcgacagagccagacaacgctcttcgacggcgccgagccggcacggcaggaggcgctgatgcatgcctgggataccattcgcgcccgctacggccgccaggcgctgaccctgggtccgcagcccgccgacgccccctggcagatgaacagcgcctaccgttcggcctgctataccacgcgctgggacgagctgcctcgggcacgcgccaggtga

SEQ ID NO: 66555 - protein, 435 aa, Chromohalobacter salexigens DSM 3043
MSFTHCPPRARNRRSFMFALIDCNNFYAACERLFEPRLEGVPLGVLSNNDGCVIARSEEFKALDIPMGIPTHKIAPHLRRRIVLKSSNYTLYGDLSARVQQVLAQQVPTLEPYSIDECFLDLRGMREDWHALGATLVRSVQRQVGLPVSIGIAPTRTLAKLANRQAKTQPTRPQVCVWQSADAPELAAHLARLSPREVWGVGERLNARLAGMGIVTAAALRETPDSVLRRRFSVVLARTAAELNGQACLSMGDLETPRRSILCSRSFGQPLRDRASLAGALRHHCQRAGEKLRRDAMQASAIGVYMRTNPHHADSFHQACEWAALPFPSADTQQLNRAAQRLLARLWQPAAYQKLGVMLTELTPRRQSQTTLFDGAEPARQEALMHAWDTIRARYGRQALTLGPQPADAPWQMNSAYRSACYTTRWDELPRARAR

SEQ ID NO: 66556 - DNA, 1320 bp, Chromohalobacter salexigens DSM 3043
  CDS (1)..(1320): transl_table=11
atggggggtggtgcgctcggtcatccacgagttcgtcgtatgattgggctcgtggactgcaacaacttctacgtcagctgcgagcgcgtcttccaaccacggctagagggcgtaccggtgggggtgatgtcgaacaacgacggctgtgtgatcgcccgctccaacgaactcaaggctctgggcgtcgagatgggcaccccagccttcgagctgcaggagtgggtaaaccaaggccgcatccatctgctctcgtccaactacgagctctatggcgacatgagcgcccgggtgcgtgaagtcctcgaggagttctccgccggcgtcgagccctactccatcgacgagatgttcgtgcgcttcgacggcttcgacgccgccaccacccaggccttggcccgcacgctctaccgcaacgtgcgccaattcaccggcatccccgtctgcgtgggcgttgcacccacccgtaccctggccaagctagccaaccgcgccgccaaaaagctgccggagtacggcggtacctgcgtcatgcatgccaacggtgatgacactcgccgtctactcgagcacaccgccctgggggacatctggggcgtgggccagcggcttgttgaacggctcgctctccagggcatcaagaccgcctgggatctccgacaggccgatcccaaagccatccgccaacgcttctccgtcacactcgagcgcaccgtgcgcgagcttcagggcacgccctgcattgagctccacgacgccgatcggccccgtgatcgcatcatgacctcgcgatccttcggccgcctcactggcgacctgggcgacctgcaggacgccatccgtcagcacgcccaacgcggcgccgagaaactgcgccggcaggacagccacgctcgcgccgtgctcgtcttcctcaagactaaccgtcaccggcccgacctgccccagtactcgcccagcatcgtcatagagctgcccgagcccaccgacgacagccggccgatcctcgccgccgcccgccaagggctcgagacgatctatcgccgtgggtaccgattcatgaagggcggcgtgatgctgctcgacctggtggacgccaaccgcgagcagctctcactactcgatacccccgagcgggaagcccagcgcgaacgcgaccacaagctaatggccgccttggacgcgctcaacgggaagatgggcaagggcactgtgcgcctgggcgtgccacgccagaacgccgcctggcacctacgctgcgcgcaccgcacgccacggtggacaacgcagtggcgagaattgcctcgcattgcgacccgttag

SEQ ID NO: 66557 - protein, 439 aa, Chromohalobacter salexigens DSM 3043
MGGGALGHPRVRRMIGLVDCNNFYVSCERVFQPRLEGVPVGVMSNNDGCVIARSNELKALGVEMGTPAFELQEWVNQGRIHLLSSNYELYGDMSARVREVLEEFSAGVEPYSIDEMFVRFDGFDAATTQALARTLYRNVRQFTGIPVCVGVAPTRTLAKLANRAAKKLPEYGGTCVMHANGDDTRRLLEHTALGDIWGVGQRLVERLALQGIKTAWDLRQADPKAIRQRFSVTLERTVRELQGTPCIELHDADRPRDRIMTSRSFGRLTGDLGDLQDAIRQHAQRGAEKLRRQDSHARAVLVFLKTNRHRPDLPQYSPSIVIELPEPTDDSRPILAAARQGLETIYRRGYRFMKGGVMLLDLVDANREQLSLLDTPEREAQRERDHKLMAALDALNGKMGKGTVRLGVPRQNAAWHLRCAHRTPRWTTQWRELPRIATR

SEQ ID NO: 66558 - DNA, 1299 bp, Polaromonas sp. JS666
  CDS (1)..(1299): transl_table=11
gtgtatgcattggtggatgggaacaacttctacgtgagctgtgagcgcgtattccagcccaggctggagggcgtgccagtcgtcgtcttgagcaacaacgacggatgtgcggtggccagaagcaacgaagccaaggccttgggcatcgccatgggagctccctggttcaagatcaagcactttgccgatgaagcggggctggtcgcccattcggcaaatttcgcgctctacggagacatgtcagatcgcatgatgcgtctggccgccggcatggggccccggcaggagatttactccatcgatgagtcctttatcgaactcggcggcgtccagggtgacctggtggaacgaggccacaaaattcgtgaccgcatcctccagggcataggcataccgtgcggtattggcattggtgccaccaagacacttgcaaagctcgcaaatcacgtcgccaagaccgcggagcgcaagccgggcagctacccggatcacttggcccaggtgtgcaaccttgaggcgttaagcaagggtgagcttgaggcggtcatggccagaacggacgtgggggaggtttggggagtgggtcgtcagatcggcaagcagctggtcgccggcggcatcaagagcgtgctggatctggtgcgcatggattcagggacggttcggcgcagatggtccgtggtactggaacgcacagtgctggagctgcagggggtctcatgcatcgaactggaaaatgccccggccccaaaacaggaaatcgcgtgcacgcgctcgtttgggcatccggtcaccagtcagcatcaccttgccgaggcggtaaccgactttgcgtccagagcggccgaaaagctgcgcaagcagcacagcctggctggccaagtgctggtcttcatccgtacgagcccgttccggcagtgcacgcagtacagccgatcggtgaccgtacccatgcgccgccccagctgcgacagcgccgtgatcgtgaatgcagccttgctgggcctgcaggccatttaccgcgaggggttcaactatgccaaagccgggatcatgctgctggacctgcaagggaacacaaaccggcaaggtgagctggacttggagggcgacgaagcacaagaccgctccacattgatgctggccatggatgaactcaataagcgctttggcaagggaacggtgcttctgggttgcgcggggctgggcggcaaccggcgcgcatggtcaatgaaacaggaacgccgcacgccggggtacaccacttgttgggaagacatacccgttgcgaaaagctga

SEQ ID NO: 66559 - protein, 432 aa, Polaromonas sp. JS666
MYALVDGNNFYVSCERVFQPRLEGVPVVVLSNNDGCAVARSNEAKALGIAMGAPWFKIKHFADEAGLVAHSANFALYGDMSDRMMRLAAGMGPRQEIYSIDESFIELGGVQGDLVERGHKIRDRILQGIGIPCGIGIGATKTLAKLANHVAKTAERKPGSYPDHLAQVCNLEALSKGELEAVMARTDVGEVWGVGRQIGKQLVAGGIKSVLDLVRMDSGTVRRRWSVVLERTVLELQGVSCIELENAPAPKQEIACTRSFGHPVTSQHHLAEAVTDFASRAAEKLRKQHSLAGQVLVFIRTSPFRQCTQYSRSVTVPMRRPSCDSAVIVNAALLGLQAIYREGFNYAKAGIMLLDLQGNTNRQGELDLEGDEAQDRSTLMLAMDELNKRFGKGTVLLGCAGLGGNRRAWSMKQERRTPGYTTCWEDIPVAKS

SEQ ID NO: 66560 - DNA, 1272 bp, Chlorobium limicola DSM 245
  CDS (1)..(1272): transl_table=11
atgttcgccctgatcgactgcaataacttctacgtttcctgcgaaagggttttcaacccggcgctgacaggaaagcccgtggtagtgctctcgaataacgacggctgttttatcgcacgttcgaacgaagcgaaagctcttggcctgccgatgggcggcccggcgttcaaattccgggacatcctcaaaaaacatcatgtcagggtcttttcggcgaacttcccgctctacggcgacatgtcctcacgggtgatggtcacgcttgccgaccttgctcctgaaatagagatctactccatcgacgaagcctttgtcgacctcggcggcttcagccggttcggcgcctccggatacgcggcacaaatcaggaaaaccctcaccagacacaccggaatcccggtcagcatcggcattggctcaacgaaaaccctggccaaggcggccaaccggatggcgaaaaaaaaacccgggtacgatggaatctgcatactctctgcaccggaagagattcatgaggcccttgccgcattaaaagttgaagatatctggggaataggtcggcaatggagcaaactgctcgaagcgggaaacatccggactgcgctcgactactcccgagctccggcgccgtggatccggaaacacctgcacctccccggcatccgcattcaggaggaactgaacggccattcgtgcctgcctctggaacaggtccgcccaccgaagcagagcatctgcacctcccgttcattcggccgcacgattaccgcattggatgaactgcagcaggctgtggcaacctttgccggaaaatgcgccgaaaaactcagaaaggaaaactccgcaacgtcgatgatcactgtcttcatctgcagcagcccgttcaatgaaccgcaactgaaatactggggaacccgaaccatggccatgtccagaccgtctcaggacagcatcgccgtcatccgggctgctgatcttgctctcgcatcgatcttccggcagggatacaactacaaaaaggcgggtgtgatcgtcagcggcctcattccggcacaatcagccgagaaagaactgctcctgttccccgacgatacatcgaccgggaataatcggcaaaagcgcctcatggaagcaatggaccgcatcaaccaccagtacggcccaggagcgatccggatcgccgccgaaaatgccgagacctggaagccgaatcaggcaaacctctccgaacactataccacctcctggagcggcattatcactgtcggttaa

SEQ ID NO: 66561 - protein, 423 aa, Chlorobium limicola DSM 245
MFALIDCNNFYVSCERVFNPALTGKPVVVLSNNDGCFIARSNEAKALGLPMGGPAFKFRDILKKHHVRVFSANFPLYGDMSSRVMVTLADLAPEIEIYSIDEAFVDLGGFSRFGASGYAAQIRKTLTRHTGIPVSIGIGSTKTLAKAANRMAKKKPGYDGICILSAPEEIHEALAALKVEDIWGIGRQWSKLLEAGNIRTALDYSRAPAPWIRKHLHLPGIRIQEELNGHSCLPLEQVRPPKQSICTSRSFGRTITALDELQQAVATFAGKCAEKLRKENSATSMITVFICSSPFNEPQLKYWGTRTMAMSRPSQDSIAVIRAADLALASIFRQGYNYKKAGVIVSGLIPAQSAEKELLLFPDDTSTGNNRQKRLMEAMDRINHQYGPGAIRIAAENAETWKPNQANLSEHYTTSWSGIITVG

SEQ ID NO: 66562 - DNA, 1281 bp, Chlorobium phaeobacteroides DSM 266
  CDS (1)..(1281): transl_table=11
atgtttgctctggtggactgcaataacttctatgtctcatgcgagcgggtctttaatcccggattgcaaaaccgcccggttgtggtactctccaacaacgacggctgttttattgcccgttcggaagaggcaaaggcaataggccttgcaatgggagaccctgcatataaaaaccgtgaactgctcaggcagcacaacgtagctgtctattccgccaacttcccgctttatggcgacatgtcggcaagagtcatgaaaaccctcgaaacgcttgcgcctgatcttgagatctactccattgatgaatgttttcttgatctcggcggcttcggaaagttcaaccttgccgactacgcagcagcaacaagaaaaacagtacaccgaaacaccggcattccggtcagcataggcatcggagcaacaaaaaccattgccaaggcggcaaaccgcatggcaaaaaaaaacctctccctcggaggcgtctgcattctttccaccgcagcggcaacaagggaggctctcggcgccatggcggttgaacacatctggggcatcggcagccagtacgccgcactgctgcacaagcagcacatccatactgctctcgactttgccgacgcaccgacgcactgggtacagaaacacctccacatcaccggcgcaagagtgcagcaggagctgaacggacactcctgtttgcctcttgagctggttcggtcgagaaagcagagcatctgcacctcccgttctttcggctcactggtaagctcatacgaagaaatcggctatgccatagctcactttacctcaacatgcgcattcaagctccgtcgagaaggttcccgggcatcgctgctcactgtttttctgtataccagcccatttatcgaaaaagaaaaccgctaccggggaacaagaacctttgcgctccccttcccttcaaacaacacccttgagctccagaaagctgctcaactgctgcttgcctcgatctaccgatccggatacggctacaaaaaagccggcgtgctggtttccggtattaccgatgaaaaaggagccgcaatgacaacactctccctgtttgacaacgatccgttaccccggaaccagaagcgggacatgaaacttatggaaacgcttgacgcgataaactcacgatttggtcagggcacactccgcacagcatccgacaccaactccggctggaaacaacgacaggaaaagctttcaccgcactataccacacgatggaacgacattatcgaaatacacgcatga

SEQ ID NO: 66563 - protein, 426 aa, Chlorobium phaeobacteroides DSM 266
MFALVDCNNFYVSCERVFNPGLQNRPVVVLSNNDGCFIARSEEAKAIGLAMGDPAYKNRELLRQHNVAVYSANFPLYGDMSARVMKTLETLAPDLEIYSIDECFLDLGGFGKFNLADYAAATRKTVHRNTGIPVSIGIGATKTIAKAANRMAKKNLSLGGVCILSTAAATREALGAMAVEHIWGIGSQYAALLHKQHIHTALDFADAPTHWVQKHLHITGARVQQELNGHSCLPLELVRSRKQSICTSRSFGSLVSSYEEIGYAIAHFTSTCAFKLRREGSRASLLTVFLYTSPFIEKENRYRGTRTFALPFPSNNTLELQKAAQLLLASIYRSGYGYKKAGVLVSGITDEKGAAMTTLSLFDNDPLPRNQKRDMKLMETLDAINSRFGQGTLRTASDTNSGWKQRQEKLSPHYTTRWNDIIEIHA

SEQ ID NO: 66564 - DNA, 1272 bp, Chlorobium phaeobacteroides BS1
  CDS (1)..(1272): transl_table=11
atgtttgctcttatggactgcaacaacttctatgtctcctgtgaacgggtgttcaatccggcactttacggccgtccggttgttgtgctgtccaacaatgatggatgctttatttcacgttcccgggaagccaaggctctcggcttgccgatgggggcaccggttttcaaatacagggagctgattaaaaagcatgatgtggcgatgttttccccgaacttcccgctctatggggacatgtcgtcacgggtgatgcacacccttggcgaactgctgccggatatcgagatatattccattgatgaagcctttgccgatctgcaggaattcggtcgatacgatcttgagcaattggcgcaaaaggtctgtttgacgatcagaaggaataccggtattccggtcagtgtcggggtaggcccgaccaagacccttgccaaggctgccaactatcttgccaagaaagacacgcggtatcacggggtgtgcgtgcttgagaacggtatctctgttcgcgaggctctcggcaacgttcctgttgaggatgtctgggggatcggcagagcctacggtcgctttttgcgtacccattcgctcactactgcccttgatttctccagggctcgacctgcatgggtgcggcgtcatatgcatagtacaggagcgagggttcagcaagaactgaacggcgaatcctgccttgctctggaacaggtacgtccttccaaacagagcatctgtacatcccgttctttcgggacaatggtgaggacgcgtgaagatctggagcatgcggtaggcagtttcgcgtcgaaatgtgctctgaagttgcgcagggagggggtttatgccggtcttgttacggtgtttctctgcactgacgcatgtgaccggcgttcagatcactacagagagagccgtacagcggcaatgccttttgcaacgcagagtaccttacgaatagttcgttatgcgctggatatcctgaaggtgatattccgggatggttatgcctacaagaaggcgggagtgattctggacgggttttcgcctgcgttcccatcatcagttacaccgtcgctttttgacggtgatggaacctcagcagctgattcacaggctcttatgcaggcgatcgacacgataaatttccgctatggttcaggaacgttgaggctggcagttgaatcacagtcgggatggaagcagcgtcaggaaaaactctcacagcgttacacgacatgctgggaggaaattatccaggtgagagcgtag

SEQ ID NO: 66565 - protein, 423 aa, Chlorobium phaeobacteroides BS1
MFALMDCNNFYVSCERVFNPALYGRPVVVLSNNDGCFISRSREAKALGLPMGAPVFKYRELIKKHDVAMFSPNFPLYGDMSSRVMHTLGELLPDIEIYSIDEAFADLQEFGRYDLEQLAQKVCLTIRRNTGIPVSVGVGPTKTLAKAANYLAKKDTRYHGVCVLENGISVREALGNVPVEDVWGIGRAYGRFLRTHSLTTALDFSRARPAWVRRHMHSTGARVQQELNGESCLALEQVRPSKQSICTSRSFGTMVRTREDLEHAVGSFASKCALKLRREGVYAGLVTVFLCTDACDRRSDHYRESRTAAMPFATQSTLRIVRYALDILKVIFRDGYAYKKAGVILDGFSPAFPSSVTPSLFDGDGTSAADSQALMQAIDTINFRYGSGTLRLAVESQSGWKQRQEKLSQRYTTCWEEIIQVRA

SEQ ID NO: 66566 - DNA, 1266 bp, Desulfuromonas acetoxidans DSM 684
  CDS (1)..(1266): transl_table=11
atgacaagctacgctctggtcgactgcaataatttttatgtcagttgtgagaggctgttctgcccacaactcaagcggcgtcctgttgttatcctgtccaacaatgacggctgtgttgtgtcacgcagtcaggaagccaaagcactcaaaatccccatggcaacgccgctgttcaaggttcattctttgctcaaacggcatcaggtggccatcttttcatcgaattacaccctctatgccgacatctcctcccgggttatgcaaacccttgaattgttttcccccgaggtggaggaatactccatagatgaagcttttctcaacctgaccgggttggttaaaagcgaagatcgtctggactatggtcaaaaaattcgtcagaccgtgcatcaacatgtcggcatcccggtttgcgttggcctggccccgaccaaaaccctggctaaattagccaactatgcggcaaaaaactacccggcaaccaacggcgttgtcgatctgcactcacctcagcgtcgccaacgcttgctccatctcaccccggttggtgaaatctggggcattggtcggcgcacggccttacgtctgcaacagatgggcattcataccggctggcaactgacccagatgccgctgaagcaggctcggcaccgcttttccatcgtcatggagcgattgattcgggaactgcatggggaaaactgcctggaggtcgaccatcaaccggcgcctcagcaacaggtgatctgttcgcgctcctttggagaaaaaattgtttctttcgatgagttacgtgagacggtttgtgaattttccgcgcgagccgccgaaaagttacgtcacaatcaacaggcagctcggctgattaatgtctcgattcgcaccagtgcgtattgtgctgcggaaccgtgctatgccaattccgccagtggcatgttgcaacaacataccagtgattcacgtcagattgtcgccaaagccactcagcttcttgaggggttgtggaaagagggttatcgttatgccaaagctggagttatgctgagtgatctgtgcctggaaaacaacattcagcccggactgtttgatgatgtaaaccagaagaataaaagcaaagccctcatgcaagcaatggatcacatcaatgaacagtgtggttccatctggttgggcgggcaacggccgcaacgcgattggttcatgaaccagaattatctgtcccccgcctataccacacgctgggactgcctgccggtagtctcctga

SEQ ID NO: 66567 - protein, 421 aa, Desulfuromonas acetoxidans DSM 684
MTSYALVDCNNFYVSCERLFCPQLKRRPVVILSNNDGCVVSRSQEAKALKIPMATPLFKVHSLLKRHQVAIFSSNYTLYADISSRVMQTLELFSPEVEEYSIDEAFLNLTGLVKSEDRLDYGQKIRQTVHQHVGIPVCVGLAPTKTLAKLANYAAKNYPATNGVVDLHSPQRRQRLLHLTPVGEIWGIGRRTALRLQQMGIHTGWQLTQMPLKQARHRFSIVMERLIRELHGENCLEVDHQPAPQQQVICSRSFGEKIVSFDELRETVCEFSARAAEKLRHNQQAARLINVSIRTSAYCAAEPCYANSASGMLQQHTSDSRQIVAKATQLLEGLWKEGYRYAKAGVMLSDLCLENNIQPGLFDDVNQKNKSKALMQAMDHINEQCGSIWLGGQRPQRDWFMNQNYLSPAYTTRWDCLPVVS

SEQ ID NO: 66568 - DNA, 1257 bp, Shewanella baltica OS155
  CDS (1)..(1257): transl_table=11
atgtttgcgctagtcgatgccaatagcttctactgtagcgcggaacaggtgttccggcctgattggcgtggtaagcctgttgttgtactcagtaataacgatgggatgattgttgctgctaatagacaggctaaagaagcgggtattcagaagtttgtgccttactttcaagtcaaagcactctgtgcagagcgtggtgttattgcctgttcgtctaacaatgaactgtatgctgatttgtctagcaagatgatggatatcattggccgatttgcgcctgagcaacatgtctacagtatcgatgaaaccttcctgtcgtttaagaactgctaccctgccataaagtgcctacatacccaagggcaattgataagacgcgctgtatggaaagaagcccgtttacctgtttgtgtggggattgctaaaaccctgacgctggcgaaactagctaaccatgctgctaagaagatagagggctataaaggtgtctgtgttatcgacaatgaccaagaccgaatcgctattttaaaacagcttgcagtgggtgatgtttgggggattggacgcaggcttagtacgaagctcgaactgatgaatatccgtactgcgtttgacctcgctaacatgccagcaggattagcccgtaaacagttcagcattgaagtcgagcgcacagtacgcgagcttaacggccaagtatgcaaggtgtgggatgaagcgagggctgataagaagcagatattctcgacaagaagcatgggtgagcgcatcacagattttgagtcattattgcaagcattgagtaagcacgtggggattgcggcggctaaagcgcgtaagcaaggctcagtctgcaagactatgctgttatttgccactaactctccccatgatgagcgccctgtaaactataaaacagtggtgcactttctttgtccaactaactgtacggtcgagctgactaaggccatatgtgaagccgcacctaagctatttcgtgaagatgtacgctattacaagataggcgtaggtttgattgacttagcgagcgagaaacatagccaactagacctgttcaatccaccgacagcaaaaccagcgctaatgcttacactcgatcacattaaccaacgatatggtagtgatactctgtttattgctgctcaaggcatagagcataaatgggcaatgcggagggacttattgactcctcaatatacgactaagtggcgaagtgtaccgcgtatcaagtgctaa

SEQ ID NO: 66569 - protein, 418 aa, Shewanella baltica OS155
MFALVDANSFYCSAEQVFRPDWRGKPVVVLSNNDGMIVAANRQAKEAGIQKFVPYFQVKALCAERGVIACSSNNELYADLSSKMMDIIGRFAPEQHVYSIDETFLSFKNCYPAIKCLHTQGQLIRRAVWKEARLPVCVGIAKTLTLAKLANHAAKKIEGYKGVCVIDNDQDRIAILKQLAVGDVWGIGRRLSTKLELMNIRTAFDLANMPAGLARKQFSIEVERTVRELNGQVCKVWDEARADKKQIFSTRSMGERITDFESLLQALSKHVGIAAAKARKQGSVCKTMLLFATNSPHDERPVNYKTVVHFLCPTNCTVELTKAICEAAPKLFREDVRYYKIGVGLIDLASEKHSQLDLFNPPTAKPALMLTLDHINQRYGSDTLFIAAQGIEHKWAMRRDLLTPQYTTKWRSVPRIKC

SEQ ID NO: 66570 - DNA, 1275 bp, Shewanella baltica OS155
  CDS (1)..(1275): transl_table=11
atgacgccctcactattcgcactcgtcgattgcaataatttttatgcctcctgtgagcggatgtttaggccagatttagctggcaggccgattgtagtgttatccaataacgatggctgcgtcgtcgcccgctcggcagaggcaaaacaacttggcatcaagatggcggtgcctgtgtatcaaatcgcaaaccaactccgccagcatcacgtcgcggtattctcctccaactatgcactctatgccgacatatcaaatagagtcatgaccaccttagaacaaatggtgccgaaagtagaagtgtatagtattgatgaagcgtttttagacctttctcgtctcgataaatgcattgatattcatcagcttgcacttgatatttatcaacgaataccacagtggattgggatcagtgtttgcgtcggcattggaccgacaaaaaccctcgctaaactggcaaaccatgccgcgaaacgttatcccgcgacgcagggcgtggttgacttgcgcgaccgtgaacgccaacgacggctgatggcgcttatccctgtcgacgaagtctggggaataggccgtaggcttacaaaacgcttgaacatcatgggcataaataccgcgttgcaattggcggatgcgcatccaaagcttatccgcgacaccttttctgtcaccgttgagcgcacggtacgcgaacttaacggcattgcctgtgatgacatacaagaggtcgccgccactaagcaacaaattattagctcccgctcctttggcagtcgtattgataatttagaagcgatgcaacaggcaatcaatgaatacacttttagggcctgtgaaaaactgcgctccgagcgccagtacgctaaagcgatgtcagtatttgtgcgtactagcccttttagcgatacaactccccagtacagcaaatcactgtcgggcagtttagttcgccccagcaatgatacgcgtgattttgtcacccttggccaaagcctactgcaacgcatttggcgtgaaggtcatgcctatgcaaaggccggtgtcatgttaggggatttttttggtgcaggcgtgtttcagctcggattattcgatgacgtcacgcctaggcctaaaagcaaggagttgatgcaattactcgataaagtgaaccacagcggtcatggaaaaatttggtttgcaggacaaggtattgacccgacttggggaatgaagcgagagcagctttcccctcgctacaccacccaatgggcacaattgcccatagtgaaataa

SEQ ID NO: 66571 - protein, 424 aa, Shewanella baltica OS155
MTPSLFALVDCNNFYASCERMFRPDLAGRPIVVLSNNDGCVVARSAEAKQLGIKMAVPVYQIANQLRQHHVAVFSSNYALYADISNRVMTTLEQMVPKVEVYSIDEAFLDLSRLDKCIDIHQLALDIYQRIPQWIGISVCVGIGPTKTLAKLANHAAKRYPATQGVVDLRDRERQRRLMALIPVDEVWGIGRRLTKRLNIMGINTALQLADAHPKLIRDTFSVTVERTVRELNGIACDDIQEVAATKQQIISSRSFGSRIDNLEAMQQAINEYTFRACEKLRSERQYAKAMSVFVRTSPFSDTTPQYSKSLSGSLVRPSNDTRDFVTLGQSLLQRIWREGHAYAKAGVMLGDFFGAGVFQLGLFDDVTPRPKSKELMQLLDKVNHSGHGKIWFAGQGIDPTWGMKREQLSPRYTTQWAQLPIVK

SEQ ID NO: 66572 - DNA, 1281 bp, Pelodictyon phaeoclathratiforme BU-1
  CDS (1)..(1281): transl_table=11
atgtttgcactggtcgattgcaacaacttctacgtctcatgcgagagagtctttaatcccgccctgcgaggccgccctgtagtagtgctctccaacaatgacggctgcttcattgcccgctccgaagaggcgaaagccattggtcttgctatgggcgccccggcattcaaaaacagggagctgctgaaaaggcataaggttgtcgtttactctgcaaacttccccttgtatggagacatgtcatcaagggtcatgacaacccttgccgatcttgctcctgatcttgagatctattcgatcgatgaagcctttcttgacatgagcggcttccagcgatacgatctcgaccactatgcccgtttcatccgcaaaaccgtcacgcagcataccggtattccggtttgtatcggcattgctcccacaaaaacccttgccaaggttgccaatcgtcttgccaaaaagaatccctgctatgcgggggtctgtctgctcaacaccgacaaggaacagcgcgcagcgctcgccataacccaggttgaagatatctgggggataggtcgccagtggagtaaatttctccatacccaaaacatccacaccgctcttgaccttgccgaggcatcgctaggcttgattcgcaaacatctgcatatcaccggagcccgtgttcaggcagagctgaacggaaaatcatgcctctcactcgaaatggtgaggccagcaaaacagagcatatgcacctcacgttcatttggccgcagtgtcaccacttttgatgaactgcatcaggcagtctcaacctttaccggaaaatgcgccatcaaactgcgcaaagagggatcagcagcatcccttctgacactctttatctgcacaagcccattcaatgctcctgaaaaaaaatactggggcaccagaaccgtcaccatgcctcaccacacccaggactccatcgtcctgattcgaacggcaggagcgcttcttgaatcactctttcgggcaggctacgaatacaaaaaagcaggagttattgtcagcagactgataccggcagcatcttccacggcaacacttccactctttccgcaggagttcccggttccggacgaccgccaaaaaaagctcatgacagtaatggacagcatcaaccagcgctatggcagcggttctatccaaatcgctgccgaaaactccgcaggatggaaaccccaccagaaactgctctctccgcgctacacgaccgcctggaaagaacttatcgaggtgagaaccttgcagtaa

SEQ ID NO: 66573 - protein, 426 aa, Pelodictyon phaeoclathratiforme BU-1
MFALVDCNNFYVSCERVFNPALRGRPVVVLSNNDGCFIARSEEAKAIGLAMGAPAFKNRELLKRHKVVVYSANFPLYGDMSSRVMTTLADLAPDLEIYSIDEAFLDMSGFQRYDLDHYARFIRKTVTQHTGIPVCIGIAPTKTLAKVANRLAKKNPCYAGVCLLNTDKEQRAALAITQVEDIWGIGRQWSKFLHTQNIHTALDLAEASLGLIRKHLHITGARVQAELNGKSCLSLEMVRPAKQSICTSRSFGRSVTTFDELHQAVSTFTGKCAIKLRKEGSAASLLTLFICTSPFNAPEKKYWGTRTVTMPHHTQDSIVLIRTAGALLESLFRAGYEYKKAGVIVSRLIPAASSTATLPLFPQEFPVPDDRQKKLMTVMDSINQRYGSGSIQIAAENSAGWKPHQKLLSPRYTTAWKELIEVRTLQ

SEQ ID NO: 66574 - DNA, 1275 bp, Prosthecochloris aestuarii DSM 271
  CDS (1)..(1275): transl_table=11
atgttcgctctggttgactgcaataatttttacgcttcgtgcgagcgggtgttcaatccggcgcttgtcgggcggccggtcgttgtgctgtcgaacaacgacgggtgcgttattgcccgttcagaggaggcgaaggtcctggggatcgggatgggcgccccggagttcaagtgccgcgaactgctgctgcgccacggggttgctgtcttttcatccaactatccgctctatggcgatatgtcttcgcgggtgatgacgacgctggcaggttttgcgccgtcgatcgaggtgtattcgatcgacgaatcttttctcgatctcagcggtttcgggcgctttgaccttgagcgctacgggagcgagatccgaaggacagtacggaggcataccggtattcctgtgggggtcgggattgccgcaaccaaaacgcttgccaagattgccaaccggattgccaagaagcacctggagtatgatggggtatgcgtgcttgagcgcgatgcggagattcagcgtgcgctgaagctgatcgcggttggtgatatctggggcgtcggacggcagtgggcgagtttcctgcagacgaacggtattggtacggcagctgattttgccgctgcatcgcccgcctggatcaggcagcatatgcatgtgaccggggcacgggttcaggctgagctgaacgggcactcatgtctggctctggaagcggtgaggccggtgaagaaaagcatctgcacctcccgctcgttcgggcggacggtgagatcgaaagaggatctgcgacaggcggtggcgacctttgccggacggtgcgctctcaagctgcgccgtgaaggtctccgaacttcgcttgttacggtctttgccgcaacgagccgtttcaatcacgagagcgagcgctactgggggacgagaactcttgctctgcaggagccgtcgcaggattccattgtcctgctcaacgccgcggagcagctgctcgatgcactctatcagcccggctatgagtaccggaaagcgggcgttctcctcgccggtctgaaccctgcagacgctcccggagcagcgctgtcactgtttcctgaagctccttgcactcgtgacgggcagcaccgtaaactcatgcagattatggacgccgtcaaccggcgttacggccacggcaccatccatctcgcagcagaagagaccgaagcatggaaacccctgcagaaacggctttcgccacgttacaccacccggtggtcggagattctggaggttcatagctga

SEQ ID NO: 66575 - protein, 424 aa, Prosthecochloris aestuarii DSM 271
MFALVDCNNFYASCERVFNPALVGRPVVVLSNNDGCVIARSEEAKVLGIGMGAPEFKCRELLLRHGVAVFSSNYPLYGDMSSRVMTTLAGFAPSIEVYSIDESFLDLSGFGRFDLERYGSEIRRTVRRHTGIPVGVGIAATKTLAKIANRIAKKHLEYDGVCVLERDAEIQRALKLIAVGDIWGVGRQWASFLQTNGIGTAADFAAASPAWIRQHMHVTGARVQAELNGHSCLALEAVRPVKKSICTSRSFGRTVRSKEDLRQAVATFAGRCALKLRREGLRTSLVTVFAATSRFNHESERYWGTRTLALQEPSQDSIVLLNAAEQLLDALYQPGYEYRKAGVLLAGLNPADAPGAALSLFPEAPCTRDGQHRKLMQIMDAVNRRYGHGTIHLAAEETEAWKPLQKRLSPRYTTRWSEILEVHS

SEQ ID NO: 66576 - DNA, 1278 bp, Prosthecochloris aestuarii DSM 271
  CDS (1)..(1278): transl_table=11
atgtttgccctggttgactgcaacaatttctacgtttcctgtgaacgggtgttcaatccgtcactgaacggccggccggtcgttgttctgtcgaacaatgacggatgcattatcgcgcgttcgaatgaggccaaagctctcggcatcgcgatgggaacacctgaattcaggtgcaggaagctgctgaagcagaacaacgttgctgtcttctcctccaattatccgctgtacggtgacatgtcttcccgggtgatgttgactttggctgagtttacgccggccatcgaggtctactccatcgatgaatccttcctcgatctcagtggattcaaccgcttcgatctgaaagactattgccaggatatccgcaaaacggcgggtcgttttaccggcatcccggtcagtatcggcatcggtccgaccaagaccctcgccaagattgccaaccgttttgccaagaagtacagtgggtttgaaggcgtgtgcatacttcagaaaaaggaggacatccgcaaagcgctggaacagacagctgtcggggatatctggggtatcgggagacagtggagccggctgctgcaggtgggaaggatcctttccgctgaacagtttgcatcgacatcgccggtatgggtccgtcgtcatcttcacgtgaccggtgccaggatccaggcggaactgaacgggcattcctgcctgcctctcgaggaggtcaggccggcaaaacagagtatctgtacatcccgttcatttggcagaagtgttaacagtgagcccgaactggaacaggctgtcgccacattctccggaagatgcgcccggaagcttcgtaaggaagggttgtgtgcgtccctcatcactgtgtttgcgggcacaagtccgtttgatccggctgctcagcggtactgggggtcccgaactgcagccctgactgtgccatcgcaggattcaataacgctgggaaaggcagcaagggctgtattggcgtcagtttatcagcctgattacggatacagaaaagcaggtgtgatggtaagcggtatggtgccggcagatcaggcgggaggaaaagagctgtccctttttgatgagcaggacactctgcaggatgataagacccggaagctaatgaaggctatggatgctctcaatgagcagtatggccagggaacggtgtatcttgcatcggaaaatgccgatgcctggaaaccgcatcaggagtggctgtcgccttgttatactacccgatggtcggatatcatagaggtgaatgcgtaa

SEQ ID NO: 66577 - protein, 425 aa, Prosthecochloris aestuarii DSM 271
MFALVDCNNFYVSCERVFNPSLNGRPVVVLSNNDGCIIARSNEAKALGIAMGTPEFRCRKLLKQNNVAVFSSNYPLYGDMSSRVMLTLAEFTPAIEVYSIDESFLDLSGFNRFDLKDYCQDIRKTAGRFTGIPVSIGIGPTKTLAKIANRFAKKYSGFEGVCILQKKEDIRKALEQTAVGDIWGIGRQWSRLLQVGRILSAEQFASTSPVWVRRHLHVTGARIQAELNGHSCLPLEEVRPAKQSICTSRSFGRSVNSEPELEQAVATFSGRCARKLRKEGLCASLITVFAGTSPFDPAAQRYWGSRTAALTVPSQDSITLGKAARAVLASVYQPDYGYRKAGVMVSGMVPADQAGGKELSLFDEQDTLQDDKTRKLMKAMDALNEQYGQGTVYLASENADAWKPHQEWLSPCYTTRWSDIIEVNA

SEQ ID NO: 66578 - DNA, 1266 bp, Magnetococcus sp. MC-1
  CDS (1)..(1266): transl_table=11
atgagctatgcgctggtggattgcaacaatttttatgcctcctgcgagcgcctttttcaaccgcacctggagggcaagccggtcgttgtgctctccaataacgatggctgcgccatcgcccgctccaacgaagccaaacagctgggcattgccatgggggcccccctgcatcagatccaggcactcatcaagcagcaccaagtggcgctcttctcctccaactatcccctctatggggatctctccgcccgcgtcatgcgcaccctggaacagttggcaccgcgcgttgaaatctactccattgacgaagcctttttagatctccaaggcatgcctgcgccccaacgccaaatcctcggcagaacgatccatcaacaggttaaacgctggacgggtatccctgtttcggtgggcattggccccaccaaaaccctggctaaagtggccaaccgtttcgccaaaaaatcgcccaagaccgagggtgtactggaccttagcgacccccaatggtgccgcaaggcgctacaccagctccccgttggcgaggtgtggggggtggggccgcgctgggccaaacggcttaaccaagcaggtattgataccgccctacagcttagccgcatgcccccacccttggcacgccaacagtttaatgtggtgctggaacgcaccgtgcgagagctgcgtggtgaatcggttatcccctttgcggcgctgcctgccgcccgtcaatccatcgccaccacccgcacctttggtcaaaaaatccatacgcatgacgaaattaaagaggcgatctccagctttaccgtacgcgccgctgaaaaattgcggaagcaggggttgctggccgccgccctgcacctgtttatcaccaccaaccgttttagcgagcaggacctccagtataaaaacagcctcacctggagcttccaacaaccccaggatgacaccctaaccctgctgaccggggcacacgccgcgctggatgccatctaccggcccggctaccgctaccaaaaggccggggtgatcctgttggggctggtttcggcccagcattttcaaccttccctgtttgcgcccccacccaggctgcccaacagtcgcgccctgatgcgcaccctcgacggccttaaccaaaagatggggcgcggtaccgtgcgttttggtgccgaaggcccccccaagccctcctggggcatgcgccagttgcagagatctcccgcctacaccacccgctggagcgatctaccccaagtttag

SEQ ID NO: 66579 - protein, 421 aa, Magnetococcus sp. MC-1
MSYALVDCNNFYASCERLFQPHLEGKPVVVLSNNDGCAIARSNEAKQLGIAMGAPLHQIQALIKQHQVALFSSNYPLYGDLSARVMRTLEQLAPRVEIYSIDEAFLDLQGMPAPQRQILGRTIHQQVKRWTGIPVSVGIGPTKTLAKVANRFAKKSPKTEGVLDLSDPQWCRKALHQLPVGEVWGVGPRWAKRLNQAGIDTALQLSRMPPPLARQQFNVVLERTVRELRGESVIPFAALPAARQSIATTRTFGQKIHTHDEIKEAISSFTVRAAEKLRKQGLLAAALHLFITTNRFSEQDLQYKNSLTWSFQQPQDDTLTLLTGAHAALDAIYRPGYRYQKAGVILLGLVSAQHFQPSLFAPPPRLPNSRALMRTLDGLNQKMGRGTVRFGAEGPPKPSWGMRQLQRSPAYTTRWSDLPQV

SEQ ID NO: 66580 - DNA, 1257 bp, Shewanella denitrificans OS-217
  CDS (1)..(1257): transl_table=11
atgtttgcccttgttgatgctaactcattctactgcagcgcggagcaagtgttccgccctgactggcgtggtaagcccattatcgtgttaagtaataatgatggctgtattgtggctgctaatcgtcaggccaaggcacttggtatccctaaattttcaccttactttaaagttaaaaacctctgcattaagcaaggcgtgatcgcttgctctagtaactatgagctctatgccgacttatcgagcaagatgatgagtattattggccgctttgctcctgaacaacatgtgtattccatagatgaaagcttcttatcttttgcccattgctatcccgctattaaatgcctgcagacacaaggccagttaattcgccgcgcggtctggaaagaggtacgccttccagtctgtgttggtatagcagcgacgctcacactggctaaaattgctaaccacgcggcaaagaagattgagggttatcaaggtgtatgtgtaatcaataccgaccatgagcgagtagctattctaaaacaactttcgacagaggacgtgtgggggattggtcgcagaataagcaaaaagcttgagttaatgaacatcaaaactgcgttcgaccttgctaatatgccggcaggcttagccagaaaacaattcagcatagagatagagcgtaccgttcgtgagttaaatggccaggcatgtaaggtttgggatgaagcaagagctgataagaagcagatattcagcactcgaagcgttggcgaacggatcaccgattataactcactgcttcaagctttaagtaagcatgtgggtatcgcagccgccaaggctcgttctcaaggttcaagttgtaagactatgatgttatttgctagtaactcgccctttgatgagcagtctagaagcttcaaagccatagttcattttgcaagcccaaccaactgcagcgctgaaataactaaagccatgacacaggccgccacacagctgttccgtgaaggcgttcgttactacaaaattggggttgggttaatcgacttagcaagtgataaacacaggcaacttgatttattcagttcatccagagccaacccctcattgatgttggttttagataatctgaatcaacgctatggccgtgataccttatttcttgtggctcaaggcatagaacaaaagtggagcatgcgccgtgaactactcaccccccaatacaccacagactgggtaagcttacctcggataaagtgctag

SEQ ID NO: 66581 - protein, 418 aa, Shewanella denitrificans OS-217
MFALVDANSFYCSAEQVFRPDWRGKPIIVLSNNDGCIVAANRQAKALGIPKFSPYFKVKNLCIKQGVIACSSNYELYADLSSKMMSIIGRFAPEQHVYSIDESFLSFAHCYPAIKCLQTQGQLIRRAVWKEVRLPVCVGIAATLTLAKIANHAAKKIEGYQGVCVINTDHERVAILKQLSTEDVWGIGRRISKKLELMNIKTAFDLANMPAGLARKQFSIEIERTVRELNGQACKVWDEARADKKQIFSTRSVGERITDYNSLLQALSKHVGIAAAKARSQGSSCKTMMLFASNSPFDEQSRSFKAIVHFASPTNCSAEITKAMTQAATQLFREGVRYYKIGVGLIDLASDKHRQLDLFSSSRANPSLMLVLDNLNQRYGRDTLFLVAQGIEQKWSMRRELLTPQYTTDWVSLPRIKC

SEQ ID NO: 66582 - DNA, 1257 bp, Shewanella frigidimarina NCIMB 400
  CDS (1)..(1257): transl_table=11
atgtttgctctagttgacgcgaatagcttctattgcagtgcagaacaagtctttcgccctgattggcgtggtaagcctgttattgtgttgagtaacaacgatgggatgattgttgctgctaatcgtcaagctaaagaggctggaattgggaagtttctaccttactttcaagttaaagccttatgcgccaaacgtggtgttattgtctgttcctcaaactatgaactttatgctgacttatctagcaaaatgatggatatcattggccgctttgcccctgagcaacatgtctactctattgatgaaagcttcctctcttttaaaaactgctatcccgctatcaaatgcctccttacgcaaggccagttaatccgccgtgctgtgtggaaagaagcgcggctagcagtctgtgtgggtattggtgaaacgcttactctttctaaaatagccaaccatgcagctaagaagattgagggctacaaaggagtttgtttcattagtaatgagcaagagcgtatagctattttaaagcagcttgctgtaggggatgtatgggggataggccgccgaataagtaagaagcttgaattaatgaatatccgtactgcgtttcaacttgcgtctatgccgccgacactggcaagaaagcaatttagtattgaaatagaacgtaccgttcgtgagcttaacggccaagcctgtaaaatatgggatgagtcgagggcagataaaaagcagatattttcgactagaagcgtaggtgagcgcatcacagattattcgtcgttattacaagcattgagtaagcatgttgctatcgcagcgagtaaagcacgtaagcaaggttcaaactgcaagaccttgctgatttttgccagtaattcaccccatgatgaacggcctgtaagctataaagctattgtacattttccatgtccaaccaactgcactgttgagctaaccaaagctatgagtgaggccgcaccaaagctatttcgtgagttcgtacattattacaaaatcggtatagggcttatcgatttagctagcgaaaaacataaccaattcgatttatttaacccttcaaaggctaatcccgctttgatgaatacgctagatgacattaaccaacgctatggcagtgatacgatgtttctagcagctcaaggcatagagcacaagtggtcaatgcgccgtgatttgctaacgccacaatacacaaccaaatggttcagtgtacccagcattaagtgctaa

SEQ ID NO: 66583 - protein, 418 aa, Shewanella frigidimarina NCIMB 400
MFALVDANSFYCSAEQVFRPDWRGKPVIVLSNNDGMIVAANRQAKEAGIGKFLPYFQVKALCAKRGVIVCSSNYELYADLSSKMMDIIGRFAPEQHVYSIDESFLSFKNCYPAIKCLLTQGQLIRRAVWKEARLAVCVGIGETLTLSKIANHAAKKIEGYKGVCFISNEQERIAILKQLAVGDVWGIGRRISKKLELMNIRTAFQLASMPPTLARKQFSIEIERTVRELNGQACKIWDESRADKKQIFSTRSVGERITDYSSLLQALSKHVAIAASKARKQGSNCKTLLIFASNSPHDERPVSYKAIVHFPCPTNCTVELTKAMSEAAPKLFREFVHYYKIGIGLIDLASEKHNQFDLFNPSKANPALMNTLDDINQRYGSDTMFLAAQGIEHKWSMRRDLLTPQYTTKWFSVPSIKC

SEQ ID NO: 66584 - DNA, 1257 bp, Shewanella frigidimarina NCIMB 400
  CDS (1)..(1257): transl_table=11
atgtttgccttagtcgatgccaatgctttttattgcagtgcagaacaggtttttcgccctgactggcgcggcagacctattattgtgctgagcaataacgatggctgtattgttgctgctaatcggcaagcaaaagaggcgggtattgagaagtttttgccttactttcaagctaaagcattatgcgttcagcgcaatgtcattgtgtgctcatctaattatgaattgtatgccgatttatcggcaaagatgatggcaataataggtcgttttgcgccagaacaacatgtgtactccatcgatgaaagctttctgtcttttaaacattgttatcctgctatcaaatgcctgtatacccagggtcagttaattcgtcgcgcagtttggaaagaagcccgcctggcggtttgtgtgggcatggggcaaacgttaaccttagctaaaatagccaatcacgccgctaaaaaaatcccgggataccaaggagtgtgcgttatcgacactgcgcaactacgtaatgacattttacgccaacttgccgtaaaagaggtgtgggggattggcaggcgcatcagtaaaaagcttgaattgatgaatattcgcagcgcatacgatctcgcctctatgccacccagtttggccagaaaacaatttagtattgaaattgaacgcacggtacgcgaacttaacggcgaagtgtgtaaacaatgggatgaggctagggcagataaaaaacaaattttctccacccgcagtgtgggcgaacgtatttgtgattttgaatcgctattacaggcattgagtaaacatgttggcatcgcagcaagtaaagctcgtcaacaaggctcacattgtaaaaccatgttgttatttgccagtaattcgccccatgacgaacggcctgtgagttataaagttatcgtccattttccatgtccaaccaattgcaccattgaactcaccaaagccatgaccgacgccgccccgagattatttagcaatggtgttcgttattacaaaattggtgtaggcctagttgatttaaccagcgagaaacattttcaatttgatttatttaataccgcgaaggttaattatgccttaatggacacgcttgacggcatcaaccaacgatacggccgcgatacagtgtttttggctgcacaagggatacaacaaaaatgggccatgcgccgtgatttactcacacctcaatattcaacccaatggaaatgcttacctagcattaaatgctaa

SEQ ID NO: 66585 - protein, 418 aa, Shewanella frigidimarina NCIMB 400
MFALVDANAFYCSAEQVFRPDWRGRPIIVLSNNDGCIVAANRQAKEAGIEKFLPYFQAKALCVQRNVIVCSSNYELYADLSAKMMAIIGRFAPEQHVYSIDESFLSFKHCYPAIKCLYTQGQLIRRAVWKEARLAVCVGMGQTLTLAKIANHAAKKIPGYQGVCVIDTAQLRNDILRQLAVKEVWGIGRRISKKLELMNIRSAYDLASMPPSLARKQFSIEIERTVRELNGEVCKQWDEARADKKQIFSTRSVGERICDFESLLQALSKHVGIAASKARQQGSHCKTMLLFASNSPHDERPVSYKVIVHFPCPTNCTIELTKAMTDAAPRLFSNGVRYYKIGVGLVDLTSEKHFQFDLFNTAKVNYALMDTLDGINQRYGRDTVFLAAQGIQQKWAMRRDLLTPQYSTQWKCLPSIKC

SEQ ID NO: 66586 - DNA, 1296 bp, Nitrosomonas eutropha C71
  CDS (1)..(1296): transl_table=11
atgaagttatttgccttgatcgatggcaacaatttttattgtagttgtgaacgtgtgtttcaaccacaattacagaataagccacttatcgtattgtcaaataacgatggctgtgcaatcgcccgcagcgaacaagcaaaagcgctgggggttaaaatgggacatccatggttccaggttaaacacctggagaaatctgccggattgatttcactttccgccaatttcgcactgtacggcgatatgagcaatcgcatgatgagcctggcatccgagctgggcgattcccaggaaatctattccattgacgagtgtttccttggcttgcaaggcattccagatgtgactcaacgtgccaaagatacgcgcgccaagattctgcaatggatcggtattcctacatgcattggaataggcgcgagtaaaaccctggccaagcttgccaatcatattgccaaggatgcagaacgaaagcccggcagctaccctccccgtttggcgcaggtttgcaacctggttgaactcactgaacgccagagaatgtatctttttggtatcactgatattggtgaaatctggggaataggtaggcggatcggccagcagctcaaggacgctggtattaagacagtaaaagatttcgtagagcttgatcctggaacagttagaaaacgattcagtgtaacgctggaacgtacctggcgcgagttacacggccaaagctgcatcgatctggaagaaatcccggcaccaaagaaagaaattgcttacacccgtacttttggccagcctgtacgagatctcgtatcacttaccgaagcggttacagaattcacctcacgcgcggcagaaaagctgcgtagacaacaaagttttgcttcggcaattctggtattcatacataccagcaaacatcgcgccggcccgcaatatgctcgttcaatcactgtgccattggtacgccctgcatctgatactaatagcctgttatcggcggctatacgcggtctaagaacgatttacaagcctgggtatgattttataaaggctggtgtgattcttatggatctatccactacaacggttcagcagatcgagctggatttcggctcctcgatgtcaaacaaagccgatcagttaatgcaggcaattgaccagattaatagccagtttggaagagggacaatcatttacggcagcacaggtactggcaagaaaacatggtctatgagccagcagcgtaaaacgccttcctatactgcgaaaatcagagatatcccgattgctgtgggataa

SEQ ID NO: 66587 - protein, 431 aa, Nitrosomonas eutropha C71
MKLFALIDGNNFYCSCERVFQPQLQNKPLIVLSNNDGCAIARSEQAKALGVKMGHPWFQVKHLEKSAGLISLSANFALYGDMSNRMMSLASELGDSQEIYSIDECFLGLQGIPDVTQRAKDTRAKILQWIGIPTCIGIGASKTLAKLANHIAKDAERKPGSYPPRLAQVCNLVELTERQRMYLFGITDIGEIWGIGRRIGQQLKDAGIKTVKDFVELDPGTVRKRFSVTLERTWRELHGQSCIDLEEIPAPKKEIAYTRTFGQPVRDLVSLTEAVTEFTSRAAEKLRRQQSFASAILVFIHTSKHRAGPQYARSITVPLVRPASDTNSLLSAAIRGLRTIYKPGYDFIKAGVILMDLSTTTVQQIELDFGSSMSNKADQLMQAIDQINSQFGRGTIIYGSTGTGKKTWSMSQQRKTPSYTAKIRDIPIAVG

SEQ ID NO: 66588 - DNA, 1296 bp, Nitrosomonas eutropha C71
  CDS (1)..(1296): transl_table=11
atgtttgcgctgatcgacggcaataacttttactgctcgtgtgaacgaatttttcagcctcgtctgcaaaaagtacctttggttgtactgtctaataacgatggatgcgctattgcccgcagtgaagaagccaaggcgctgggtatcaaaatggggcaaccgtggtttcagatcaagcatctggagcaatcagccgggctggtttctctttcacccaattttccactctacggagacatgagcctgcgcatgatgcgcctggcttctgaactgggtgacaaacaggaaatttactcgattgacgagtgttttatcgggttacaggggatctccaatgtgacacacagggcaagtgagattcgcgccaaaattttgcagtggactggaataccaacctgtattggtatcggccacaccaaaacattggccaaactcgccaatcatattgccaaggatgcagacagaaagccaggcagctaccctacccggctggcacaagtttgcaatctggctgaattaaatgaacgtcaacgccagttccttttcgagatgacagatgtgggggaagtatggggcatcggcagacgcatcagtcagcagctcaaggaagcaggtattaaaacagtaaaagatttcgtagaacttgaccctggaaccgttagaaaacgtttcagcgttgtcctggaacgtacctggcgagaattgcgcggacaaagctgcattgaattggaggaagtaccgacaccaaagaaagaaattgcttatacccgcacatttggccagccagtgcacaatcttgcttccttgatagaagccgttacggagttcacttcacgggcagccgagaagctgcgcaagcaacaaagcaagacttcaaccattctggtatttattcataccagcaaacaccgttcaagaccgcaatatgcccgatcaatcaccgtgccgttggttcgtccagtatccgataccaaaaatttgataaatgctgctttacatggcctcaagaagatctataaaccaggattcgatctcaccaaagcgggcattgttttaatggatctgaccaacgctcaaaccagacaggcagagctggattttggtgagacagtacttgatagcgacgagcggttaatgcacgctattgatgagatcaatgaccgcttcggcagaggaacaatcatttatggcagtgctggagtgggcagcgaaaaaaaggtatggacgatgaaccagcagcgacgtaccccttcttatacaacgactcttggagaaattccaaccgccttaacctga

SEQ ID NO: 66589 - protein, 431 aa, Nitrosomonas eutropha C71
MFALIDGNNFYCSCERIFQPRLQKVPLVVLSNNDGCAIARSEEAKALGIKMGQPWFQIKHLEQSAGLVSLSPNFPLYGDMSLRMMRLASELGDKQEIYSIDECFIGLQGISNVTHRASEIRAKILQWTGIPTCIGIGHTKTLAKLANHIAKDADRKPGSYPTRLAQVCNLAELNERQRQFLFEMTDVGEVWGIGRRISQQLKEAGIKTVKDFVELDPGTVRKRFSVVLERTWRELRGQSCIELEEVPTPKKEIAYTRTFGQPVHNLASLIEAVTEFTSRAAEKLRKQQSKTSTILVFIHTSKHRSRPQYARSITVPLVRPVSDTKNLINAALHGLKKIYKPGFDLTKAGIVLMDLTNAQTRQAELDFGETVLDSDERLMHAIDEINDRFGRGTIIYGSAGVGSEKKVWTMNQQRRTPSYTTTLGEIPTALT

SEQ ID NO: 66590 - DNA, 525 bp, Rhodoferax ferrireducens DSM 15236
  CDS (1)..(525): transl_table=11
gtgtacgccctcgttgattgcaataatttttatgccagctgtgaacgcgtgtttcgccccagtttgcggggcatacctgtggtcgtgctcagcaacaacgatggcgcgtgcgtagcgcgcagcgatgaggctaaaaaccttggaatcaagatgggcgagccttggttcaaggtccgtcacctggcggagtcccatggattggtcgcgttgtccgccaactttgcactctacggcgacatcagcgatcgcgtgatgagtctggcggccgggctcggagtcaaaactgaaatctattccatcgacgaatgcttcgtcaccgtggatgggattccccggcgacctggtcgcgcgagcccacaaaattcgcgcacggatactccagtgggtcggaattccctgtgggataggcatcggaccgaccaaaaacgcttgcgaagctggccaatcatgtcgccaagagtgccgaaaggaagccaggcagctaccccgtgcacctggcccaggtgtgcgacctttctggactga

SEQ ID NO: 66591 - protein, 174 aa, Rhodoferax ferrireducens DSM 15236
MYALVDCNNFYASCERVFRPSLRGIPVVVLSNNDGACVARSDEAKNLGIKMGEPWFKVRHLAESHGLVALSANFALYGDISDRVMSLAAGLGVKTEIYSIDECFVTVDGIPRRPGRASPQNSRTDTPVGRNSLWDRHRTDQKRLRSWPIMSPRVPKGSQAATPCTWPRCATFLD

SEQ ID NO: 66592 - DNA, 1269 bp, Escherichia coli HS
  CDS (1)..(1269)
atgtttgctctctgtgatgtaaacgcgttttatgccagctgtgagacggtgtttcgccctgatttatggggtaaaccggtggttgtgctatcgaataatgacggttgcgttatcgcccgaaacgctgaggcaaaggcgctgggtgttaaaatgggcgatccctggttcaaacaaaaagatctgtttcgtcgctgtggtgtggtttgctttagcagcaattatgagctttacgcagacatgagcaatcgggtgatgtcgacgctggaagagctatcgccccgcgtcgagatttacagtattgatgaggcattctgcgatctgacaggtgtgcgtaattgtcgcgatctgactgattttggcagagaaattcgcgcaacggtgctacaacgtacccatcttactgttggcgtggggatcgcccagaccaaaacgctggctaagcttgccaatcatgcggcaaaaaaatggcagcggcagacgggtggggtggtggatttatcaaatctggaacgccagcgtaaattaatgtctgctctccccgtggatgacgtctgggggattggacggcggatcagcaaaaaactggacgcgatggggatcaaaaccgttctcgatttggcggatacagatatccggtttatccgtaaacattttaatgtcgtgctcgaaagaacggtgcgtgaactgcgcggcgaaccctgttttcaactggaagagtttgcaccgacgaagcaggaaattatctgttcccgctcgtttggtgaacgcatcacggattatccgtcgatgcggcaggccatttgtagttacgctgcccgggcggcggaaaaacttcgcagcgagcatcaatattgtcggtttatctccacgtttattaagacgtcaccatttgcgctcaatgaaccttattacggcaatagcgcgtcggtaaaactgctgacgcccactcaggacagcagggatatcattaacgctgctacgcgatctctggatgccatctggcaagcgggccatcgttaccaaaaagcgggcgtgatgctgggggatttcttcagtcagggagtcgcgcagctcaatttattcgatgacaacgcaccgcgccccgggagtgagcaattgatgacggtaatggatacactgaatgctaaagagggcagaggaacactctattttgccgggcaggggatccagcaacaatggcagatgaagcgagccatgctttcaccacgttatacaacgcgaagttctgatttactgagggtcaaataa

SEQ ID NO: 66593 - protein, 422 aa, Escherichia coli HS
MFALCDVNAFYASCETVFRPDLWGKPVVVLSNNDGCVIARNAEAKALGVKMGDPWFKQKDLFRRCGVVCFSSNYELYADMSNRVMSTLEELSPRVEIYSIDEAFCDLTGVRNCRDLTDFGREIRATVLQRTHLTVGVGIAQTKTLAKLANHAAKKWQRQTGGVVDLSNLERQRKLMSALPVDDVWGIGRRISKKLDAMGIKTVLDLADTDIRFIRKHFNVVLERTVRELRGEPCFQLEEFAPTKQEIICSRSFGERITDYPSMRQAICSYAARAAEKLRSEHQYCRFISTFIKTSPFALNEPYYGNSASVKLLTPTQDSRDIINAATRSLDAIWQAGHRYQKAGVMLGDFFSQGVAQLNLFDDNAPRPGSEQLMTVMDTLNAKEGRGTLYFAGQGIQQQWQMKRAMLSPRYTTRSSDLLRVK

SEQ ID NO: 66594 - DNA, 1041 bp, Escherichia coli B7A
  CDS (1)..(1041)
atgtttgcactggctgatatcaacagtttctacgcctcatgtgaaaaagttttccgcccggaccttcgcaacgaaccggtcatcgtactcagcaataacgatggctgtgtgatcgcgcgcagcccggaggcaaaagctcttggcatcagaatggggcagccctggtttcaggtgagacagatgcgcctggagaagaaaatacatgtattttccagcaattatgcgctgtaccacagcatgagccaacgggtcatggctgttctggagtcgctttctcccgcagttgagccctactcaattgatgaaatgtttattgatttgcgggggataaatcattgcatctctccggagttttttggtcatcagctcagggaacaggtaaagagctggacaggactcaccatgggggtgggcattgcgcctacaaaaacgctggctaaaagtgcacagtgggcaacaaagcaatggccacagttttccggtgtggtcgcgctgacggcagaaaaccgtaatcggatcttgaagctactgggactgcagccagttggtgaggtctggggagtaggacgcagactgacggaaaagctgaatgcgctgggtattaacacagcactgcagctggcgcaggctaacacggcattcatccggaaaaacttcagcgtcattcttgagcgtacggtacgcgaactcaacggcgagtcctgcatatccctggaagaagcaccaccggcaaaacagcagattgtctgtagtcgcagttttggtgaacgaatcacagacaaagatgccatgcaccaggctgttgttcagtatgcagagcgggccgcagagaaactacgtggggagcgtcagtattgccggcaggtgacgacatttgtacggacatccccctttgcagtaaaagaaccctgttacagcaatgccgctgtggaaaagcttccattgcccacacaggacagccgggacattattgccgccgcatgcagagccttaaaccatgtctggcgtgaaggtgtcagcgccaatgatataagacagtaa

SEQ ID NO: 66595 - protein, 346 aa, Escherichia coli B7A
MFALADINSFYASCEKVFRPDLRNEPVIVLSNNDGCVIARSPEAKALGIRMGQPWFQVRQMRLEKKIHVFSSNYALYHSMSQRVMAVLESLSPAVEPYSIDEMFIDLRGINHCISPEFFGHQLREQVKSWTGLTMGVGIAPTKTLAKSAQWATKQWPQFSGVVALTAENRNRILKLLGLQPVGEVWGVGRRLTEKLNALGINTALQLAQANTAFIRKNFSVILERTVRELNGESCISLEEAPPAKQQIVCSRSFGERITDKDAMHQAVVQYAERAAEKLRGERQYCRQVTTFVRTSPFAVKEPCYSNAAVEKLPLPTQDSRDIIAAACRALNHVWREGVSANDIRQ

SEQ ID NO: 66596 - DNA, 1269 bp, Escherichia coli E110019
  CDS (1)..(1269)
atgtttgctctctgtgatgtaaacgcgttttatgccagctgtgagacggtgtttcgccctgatttatggggtaaaccggtggttgtgctatcgaataatgacggttgcgttatcgcccgaaacgctgaggcaaaggcgctgggtgttaaaatgggcgatccctggttcaaacaaaaagatctgtttcgtcgctgtggtgtggtttgctttagcagcaattatgagctttacgcagacatgagcaatcgggtgatgtcgacgctggaagaactatcgccccgcgtcgagatttacagtattgatgaggcattctgcgatctgacaggtgtgcgtaattgtcgcgatctgactgattttggcagagaaattcgcgcaacggtgctacaacgtacccatcttactgttggtgtggggatcgcccagaccaaaacgctggctaagcttgccaatcatgcggcaaaaaaatggcagcggcagacggggggggtggtggatttatcaaatctggaacgccagcgtaaattaatgtctgctctccccgtggatgaagtctgggggattggacggcggatcagcaaaaaactggacgcgatggggatcaaaaccgttcttgatttggcggatacagatatccggtttatccgtaaacattttaatgtcgtgctcgaaagaacggtgcgtgaactgcgcggcgaaccctgtttgcaactggaagagtttgcaccgacgaagcaggaaattatctgttcccgctcgtttggtgaacgcatcacggattatccatcgatgcggcaggccatttgtagttacgctgcccgggcggcggaaaaacttcgcagcgagcatcaatattgtcggtttatctccacatttattaagacgtcaccatttgcgctcaatgaaccttattacggcaatagcgcgtcggtaaaactgctgacgcccactcaggacagcagggatatcattaacgctgctacgcgatctctggatgccatctggcaagcgggccatcgctaccaaaaagcgggcgtgatgctgggggatttcttcagtcagggagtcgcgcagctcaatttattcgatgacaacgcaccgcgccccgggagtgagcaattgatgacggtaatggatacactgaatgctaaagagggcagaggaacactctattttgccgggcaggggatccagcaacaatggcagatgaagcgtgccatgctttcaccacgttatacaacgcgaagttctgatttactgcgggtcaaataa

SEQ ID NO: 66597 - protein, 422 aa, Escherichia coli E110019
MFALCDVNAFYASCETVFRPDLWGKPVVVLSNNDGCVIARNAEAKALGVKMGDPWFKQKDLFRRCGVVCFSSNYELYADMSNRVMSTLEELSPRVEIYSIDEAFCDLTGVRNCRDLTDFGREIRATVLQRTHLTVGVGIAQTKTLAKLANHAAKKWQRQTGGVVDLSNLERQRKLMSALPVDEVWGIGRRISKKLDAMGIKTVLDLADTDIRFIRKHFNVVLERTVRELRGEPCLQLEEFAPTKQEIICSRSFGERITDYPSMRQAICSYAARAAEKLRSEHQYCRFISTFIKTSPFALNEPYYGNSASVKLLTPTQDSRDIINAATRSLDAIWQAGHRYQKAGVMLGDFFSQGVAQLNLFDDNAPRPGSEQLMTVMDTLNAKEGRGTLYFAGQGIQQQWQMKRAMLSPRYTTRSSDLLRVK

SEQ ID NO: 66598 - DNA, 993 bp, Escherichia coli F11
  CDS (1)..(993)
atgtttgcactggctgatatcaacagtttctacgcctcatgtgaaaaagttttccgcccggaccttcgcaacgaaccggtcatcgtactcagcaataacgatggctgtgtgatcgcgcgcagcccggaggcaaaagcccttggcatcagaatggggcagccctggtttcaggtgagacaaatgcgcctggagaagaaaatacatgtattttccagcaattatgcgctgtaccacagcatgagccaacgggttatggctgttctggagtcgctttctcccgcagttgagccctactcaattgatgaaatgttcattgatttgcgggggataaatcattgcatctctccggagttttttggtcatcagctcagggaacaggtaaagagctggacaggactcaccatgggggtgggcattgcgcctacaaaaacgctggctaaaagtgcacagtgggcaacaaagcaatggccacagttttccggtgtggtcgcgctgacggcagaaaaccgtaatcggatcttgaagctactggggctgcagccagttggtgaggtctggggagtaggacgcagactgacggaaaagctgaatgcgctgggtattaacacagcactgcaactggcgcaggctaacacggcattcatccggaaaaacttcagcgtcattcttgagcgtacggtacgcgaactcaacggcgagtccagcatatccctggaagaagtaccaccggcaaaacagcagattgtctgtagtcgcagttttggtgaacgaatcacagacaaagatgccatgcaccaggctgttgttcagtatgcagagcgggccgcagagaaactacgtggggagcgtcagtattgtcggcaggtgacgacatttgtacggacatccccctttgcagtaaaagaaccctgttacagcaatgccgctgtggaaaagctttcattgccacacaggacagccgggacattattgccgccgcatgcagagtcttaa

SEQ ID NO: 66599 - protein, 330 aa, Escherichia coli F11
MFALADINSFYASCEKVFRPDLRNEPVIVLSNNDGCVIARSPEAKALGIRMGQPWFQVRQMRLEKKIHVFSSNYALYHSMSQRVMAVLESLSPAVEPYSIDEMFIDLRGINHCISPEFFGHQLREQVKSWTGLTMGVGIAPTKTLAKSAQWATKQWPQFSGVVALTAENRNRILKLLGLQPVGEVWGVGRRLTEKLNALGINTALQLAQANTAFIRKNFSVILERTVRELNGESSISLEEVPPAKQQIVCSRSFGERITDKDAMHQAVVQYAERAAEKLRGERQYCRQVTTFVRTSPFAVKEPCYSNAAVEKLSLPHRTAGTLLPPHAES

SEQ ID NO: 66600 - DNA, 1269 bp, Escherichia coli F11
  CDS (1)..(1269)
atgtttgccctctgtgatgtaaacgcgttttatgccagctgtgagacggtgtttcgccctgatttatggggtaaaccggtggttgtgctatcgaataatgacggttgcgttatcgcccgaaacgctgaggcaaaggcgctgggcgttaaaatgggcgatctctggttcaaacaaaaagatctgtttcgtcgctgtggcgtggtttgctttagcagcaattatgagctttacgcagacatgagtaatcgggtgatgtcgacgctggaagaactatcgccccgcgtcgagatttacagtattgatgaggcattctgcgatctgacaggtgtgcataattgtcgcgatctgactgattttggcagagaaattcgcgcaatggtgctacaacgtacccatcttactgttggtgtggggatcgcccagaccaaaacgctggctaagcttgccaatcatgcggcaaaaaaatggcagcggcagacgggcggggtggtggatttatcaaatctggaacgccagcgtaaattaatgtctgctctccccgtggatgaagtctgggggattggacggcggatcagcaaaaaactggacgcgatggggatcaaaaccgttctcgatttggcggattcagatatccggtttatccgtaaacattttaatgtcgtgctcgaaagaacggtgcgtgaactgcgcggtgaaccctgtttgcaactggaagagtttgcaccgacgaagcaggaaattatctgttcccgctcgtttggtgaacgcatcacggattatccgtcgatgcggcaggccatttgtagttacgctgcccgggcggcggaaaaacttcgcagcgagcatcaatattgtcggtttatctccacgtttattaagacgtcaccatttgcgttcaatgaaccttattacggcaatagcgcatcggtaaaactgctgacgcccactcaggacagcagggatatcattaacgccgctacgcgatctctggatgccatctggcaagcgggccatcgctaccaaaaagcgggcgtgatgctgggggatttcttcagtcagggagtcgcgcagctcaatttattcgatgacaacgcaccgcgccccgggagtgagcaattgatggcggtaatggatacgctgaatgctaaagagggcagaggaacactctattttgccgggcaggggatccagcaacaatggcagatgaagcgtgccatgctttcaccatgttatacaacgcgaagttctgatttactgcgggtcaaataa

SEQ ID NO: 66601 - protein, 422 aa, Escherichia coli F11
MFALCDVNAFYASCETVFRPDLWGKPVVVLSNNDGCVIARNAEAKALGVKMGDLWFKQKDLFRRCGVVCFSSNYELYADMSNRVMSTLEELSPRVEIYSIDEAFCDLTGVHNCRDLTDFGREIRAMVLQRTHLTVGVGIAQTKTLAKLANHAAKKWQRQTGGVVDLSNLERQRKLMSALPVDEVWGIGRRISKKLDAMGIKTVLDLADSDIRFIRKHFNVVLERTVRELRGEPCLQLEEFAPTKQEIICSRSFGERITDYPSMRQAICSYAARAAEKLRSEHQYCRFISTFIKTSPFAFNEPYYGNSASVKLLTPTQDSRDIINAATRSLDAIWQAGHRYQKAGVMLGDFFSQGVAQLNLFDDNAPRPGSEQLMAVMDTLNAKEGRGTLYFAGQGIQQQWQMKRAMLSPCYTTRSSDLLRVK

SEQ ID NO: 66602 - DNA, 1275 bp, Escherichia coli E22
  CDS (1)..(1275)
atgtttgcactggctgatatcaacagtttctacgcctcatgtgaaaaagttttccgcccggaccttcgcaacgaaccggtcatcgtactcagcaataacgatggctgtgtgatcgcgcgcagcccggaggcaaaagcccttggcatcagaatggggcagccctggtttcaggtgagacagatgcgcctggagaagaaaatacatgtattttccagcaattatgcgctgtaccacagcatgagccaacgggttatggctgttctggagtcgctttctcccgcagttgagccctactcaattgatgaaatgttcattgatttgcgggggataaatcattgcatctctccggagttttttggtcatcagctcagggaacaggtaaagagctggacaggactcaccatgggggtgggcattgcgcctacaaaaacgctggcaaaaagtgcacagtgggcaacaaagcaatggccacagttttccggtgtggtcgcgctgacggcagaaaaccgtaatcggatcttgaagctactggggctgcagccagttggtgaggtctggggagtaggacgcagactgacggaaaagctgaatgcactgggtattaacacagcactgcagctggcgcaggctaacacggcattcatccggaaaaacttcagcgtcattcttgagcgtacggtacgcgaactcaacggcgagtcctgcatatccctggaagaagcaccaccggcaaaacagcagattgtctgtagtcgcagttttggtgaacgaatcacagacaaagatgccatgcaccaggctgttgttcagtatgcagagcgggccgcagagaaactacgtggggagcgtcagtattgccggcaggtgacgacatttgtacggacatcaccctttgcagtaaaagaaccctgttacagcaatgccgctgtggaaaagcttccattgcccacacaggacagccgggacattattgccgccgcatgcagagccttaaaccatgtctggcgtgaagggtaccgctatatgaaggcaggtgtcatgctggctgatttcacaccatcgggtatagcgcagccgggattatttgatgagatccagccccgtaaaaacagcgaaaagttaatgaaaacactcgatgaactgaaccagtctggaaaagggaaagtgtggtttgcggggcgaggaaccgcccctgaatggcaaatgaaacgggaaatgttgagtcagtgttatacaactaaatggcgagatattcccctggccaggctgggttag

SEQ ID NO: 66603 - protein, 424 aa, Escherichia coli E22
MFALADINSFYASCEKVFRPDLRNEPVIVLSNNDGCVIARSPEAKALGIRMGQPWFQVRQMRLEKKIHVFSSNYALYHSMSQRVMAVLESLSPAVEPYSIDEMFIDLRGINHCISPEFFGHQLREQVKSWTGLTMGVGIAPTKTLAKSAQWATKQWPQFSGVVALTAENRNRILKLLGLQPVGEVWGVGRRLTEKLNALGINTALQLAQANTAFIRKNFSVILERTVRELNGESCISLEEAPPAKQQIVCSRSFGERITDKDAMHQAVVQYAERAAEKLRGERQYCRQVTTFVRTSPFAVKEPCYSNAAVEKLPLPTQDSRDIIAAACRALNHVWREGYRYMKAGVMLADFTPSGIAQPGLFDEIQPRKNSEKLMKTLDELNQSGKGKVWFAGRGTAPEWQMKREMLSQCYTTKWRDIPLARLG

SEQ ID NO: 66604 - DNA, 1257 bp, Vibrio cholerae RC385
  CDS (1)..(1257)
atgtttgctttagttgatgctaactcgttttactgtagtgctgaacaagtctttcgtccggattggcgaggaaagcccatcatagtgttatcaaacaatgatggttgcgttgtggccgcgaaccgccaagcaaaggaagcgggtgttgagaagtttaaaccctactttcaggttaaagcgctttgtgagcaaaaaggcgttattgcactttcatcaaactatgagttgtatgccgacttatcgtcaaagatgatgcaggtgatcgggagattcgcgcccgagcaacacatatacagtattgatgagtcgtttttatcttttgagcaagtttatcctgctatctcgtgttttagaaaattaggaatggaactcagacgcacagtatggcgtgagtgccgtcttcctgtaagtgttggctttgggagtacattaacactcgcgaaagtggctaaccatgccgcaaaaaaattggatgcttatcagggtgtttgtgtacttgataatgaaaaagagcgtcaaatagtgttatctcaattacgagcagttgatgtgtggggcatcggccgtaaacttggacagcgcctacagctaatgggcattaaaaccgctttacaactggctaactatcctcccgccctcattaggaaagagtttaacgttgaggttgaacgtaccgttcgtgagctgaatggacaaaaatgcaaaggatgggatgtagctcgagccgataagaaacaaattttttctacgcgtagtgcagggcagcgaatcacagatattgagtcgttgaagcaagccttgtgtaaacatgccaatattgcctcttataaggcccgtcaacaaaaatcactctgccgagtcatgctctgttttgcaaatagctctccgtttgacgagtattcggttgtacgtagagcgattcatagatttgcttatccgacatctgatgtgacgcaattgacccagattgcctctttactggctgagcaattgtttcaggaggatattcggttttataagattggcgtgggtttgcttgaccttgttgatggacaacatgaacaagcagatttattcaatcctaatccgaacaaccctgcgttgatgcatgtctacgataccctaaatgaccggtatgggagtgataccctttttttggcggcgcagggtatcactcagaaatgggcaatgcggcgtgatatgttgaccccgcagtacaccacgcgttggcaagatttacccaaaatcaaatgctga

SEQ ID NO: 66605 - protein, 418 aa, Vibrio cholerae RC385
MFALVDANSFYCSAEQVFRPDWRGKPIIVLSNNDGCVVAANRQAKEAGVEKFKPYFQVKALCEQKGVIALSSNYELYADLSSKMMQVIGRFAPEQHIYSIDESFLSFEQVYPAISCFRKLGMELRRTVWRECRLPVSVGFGSTLTLAKVANHAAKKLDAYQGVCVLDNEKERQIVLSQLRAVDVWGIGRKLGQRLQLMGIKTALQLANYPPALIRKEFNVEVERTVRELNGQKCKGWDVARADKKQIFSTRSAGQRITDIESLKQALCKHANIASYKARQQKSLCRVMLCFANSSPFDEYSVVRRAIHRFAYPTSDVTQLTQIASLLAEQLFQEDIRFYKIGVGLLDLVDGQHEQADLFNPNPNNPALMHVYDTLNDRYGSDTLFLAAQGITQKWAMRRDMLTPQYTTRWQDLPKIKC

SEQ ID NO: 66606 - DNA, 1266 bp, Pseudoalteromonas atlantica T6c
  CDS (1)..(1266): transl_table=11
atgttcgctctatgtgatgccaacagcatgtacgcgagttgcgaaaaagtgtttgatccaagtattcgcaataagccagtggtggtgttgaccaacaacgatggctgtatttgtgcagcgtgtggcattgccaaacgaatgggtgtcgggaagaagttcgtaccttattttcaggtcaaaaaagagctagaagcggcaggtgtcgttattcgctcaagtaattacgagctttatgccgacctgagtcaacgcatgatggatacgtgcgcgcgctttgcccctgacatcaatgtgtactctatcgatgaatgttttttatattatggtaaagacgcaactgcgccccaagatggttggaataaccttgctaacagtattcgaaaaaccgtgtggcgggaagtgaggttgcctatctgtgttggcatagggccgacgcctacattggctaaagtggccaatcacgcggctaaaaatgtgagtggttttatcggcgtggcagtgctggataacgaagatgcgcgtaagcatgtgctgaagcaactggctgtgactgacgtgtggggcataggaaaacgtttaggtgttaaattgaatgcgctggggatccacacagcgtgggagcttgcaaaccgtgacccgtcgcacatcagaaaggcgttttcgattatcgtggaaaacacggtgcgagagctaaatggcgagattcgtcactgctgggaaaccgtaagaggggccaaaaaagaaatatacagtacgcgcagttttggcagtcgcgtgactgattatgatgaattgcgagcggcgcttgctggtcatgctgaaactgtaagtgtgaaactgcgtaaacaaaaaagcgtgaccagtagtatgacgctttttgccactaattctccccatgataatggcgggtatgtgcggcgctctttctttcatcgcttcactgtgcccacaaatgacacgcgtaatatacttcatgtgattgacagtgcaatgtctcagctttttcaaccgggtgtacattattacaaatgtggtgtcgggttgatggacttacatgagcaggatttatatcagtatgatttatttaacccgtcgaatgacaactcaaggttgatggcatgtatggacaatattaactcgcgctacggacgttcaaccgtgcaaatggcggccaaaggctttgagcaacgtttttctatgaagcgggcgtttttgtccccgcagtacacgacgcagtggcgagatataccaaaaattaagtgctag

SEQ ID NO: 66607 - protein, 421 aa, Pseudoalteromonas atlantica T6c
MFALCDANSMYASCEKVFDPSIRNKPVVVLTNNDGCICAACGIAKRMGVGKKFVPYFQVKKELEAAGVVIRSSNYELYADLSQRMMDTCARFAPDINVYSIDECFLYYGKDATAPQDGWNNLANSIRKTVWREVRLPICVGIGPTPTLAKVANHAAKNVSGFIGVAVLDNEDARKHVLKQLAVTDVWGIGKRLGVKLNALGIHTAWELANRDPSHIRKAFSIIVENTVRELNGEIRHCWETVRGAKKEIYSTRSFGSRVTDYDELRAALAGHAETVSVKLRKQKSVTSSMTLFATNSPHDNGGYVRRSFFHRFTVPTNDTRNILHVIDSAMSQLFQPGVHYYKCGVGLMDLHEQDLYQYDLFNPSNDNSRLMACMDNINSRYGRSTVQMAAKGFEQRFSMKRAFLSPQYTTQWRDIPKIKC

SEQ ID NO: 66608 - DNA, 1293 bp, Marinobacter aquaeolei VT8
  CDS (1)..(1293): transl_table=11
atgcgctctgacatgaaacaggtgttcgctctttgtgacatgaacagcttttacgccagctgcgagcagttattcaatccagcgtttcgtggccggccggtcgtggtcgccagtaacaacgatggctgtgccgttgcacgatcaccggaggcgaaagcgctcggtataaagatgggccaacccatttttgagttgcgggagtacgtcgaaaagcacggcctgattgtttgctcatccaactatgcactctacggagatatgtcccatcgattcatgcttgccctggcggaatgcgcaccacgggtcatgccctacagtattgatgaagcctttcttgatctgaccggtatcgattccgttgtgtcgtatctggatttcggccaccacgtcaaagagctggtgcgaatatggacgggcttacctatctgtgtcggaatcgctccaagtccgacattggcaaaattagctaaccacgccgcaaaacactatcccgccacccggggtgtcgtggatctgactgaccgagaccggcaacgacgtcttatgcacctgacaccggtggaagaagtatggggaatcggcaggaaactgagcaaacgactggatgccctgggaataaagactgctctggatctagccgattccgatcctaaatggatacgagatcacttttcagtcgtggtcgagcgcaccgtcagggagctgaacggcataccatgtcattcagaccttctcgaagtagcaccagcaaagcagcagattctctgttcaaagtccttcggggcacccgtcaccgatctgaattccatgcttgccgcgattaccgctcacgcatcccgagcgtcggagaagctgcgtcgcgaaaaccgggattgcgggtatctagccgcgttcatgtcaacgagccggtttcgaaccggtagccactacgccaaccagcaagggattactctgccattcccgacctcagacacccgggaaatcgtacgacatgcggtcagtattgcccggtcgttgtggcgggaggggtaccggtacaacaaagcgggcattgtactgacagacttccgggtgcctggtgcttgccaatccgattttttcagccaggtcgaggacgacgagcgcaaccgaaagctgatgcggaccttagacaagatcaacagcatcgctggcaaaaacacgatccagtttggccggcagattcacaaaaaccaaagctggcaaatgcgaagagaaaatctttcgcctgcttacacgactcgatgggctgacatccccgtggcgatcagttaa

SEQ ID NO: 66609 - protein, 430 aa, Marinobacter aquaeolei VT8
MRSDMKQVFALCDMNSFYASCEQLFNPAFRGRPVVVASNNDGCAVARSPEAKALGIKMGQPIFELREYVEKHGLIVCSSNYALYGDMSHRFMLALAECAPRVMPYSIDEAFLDLTGIDSVVSYLDFGHHVKELVRIWTGLPICVGIAPSPTLAKLANHAAKHYPATRGVVDLTDRDRQRRLMHLTPVEEVWGIGRKLSKRLDALGIKTALDLADSDPKWIRDHFSVVVERTVRELNGIPCHSDLLEVAPAKQQILCSKSFGAPVTDLNSMLAAITAHASRASEKLRRENRDCGYLAAFMSTSRFRTGSHYANQQGITLPFPTSDTREIVRHAVSIARSLWREGYRYNKAGIVLTDFRVPGACQSDFFSQVEDDERNRKLMRTLDKINSIAGKNTIQFGRQIHKNQSWQMRRENLSPAYTTRWADIPVAIS

SEQ ID NO: 66610 - DNA, 1269 bp, Yersinia intermedia ATCC 29909
  CDS (1)..(1269)
atgtttgctctcgttgacgtgaactcattttatgccagttgtgaaacggtattcaggcctgatctgtatggtcgccctgtggtggtgttatccaataacgatggctgcgtgattgcccgtagccgggaggctaaggtcgtgggtattccaatgggggcaccctatttcaagatacagcaagttatccatcagcatcgtgtcgtcgcgtttagcagtaattacgcactctacagtgatatgtctgcacgggtcatgactattcttgaacaactggccccagggattgaaatttactcaatcgatgaagcatttctcaatattactggtgtgcagcattgcattacactggaagagtttggtcagggcgtgcgtgataaaatacgcaaattgactggcctaaatgtcggtgtaggcatcgcaccaagcaagactctcgccaagctggcaaaccatgctgctaagttatggcataaaacgggtggtgtagtcgatttgtccaatcccatacgtcaacgcaaattgctggcgctgatgccagcggcgcaggtatggggcgtgggccagcgtaccgcaaaaaagctggcagtgatggggataaccaccgcccttcaattatcagaggccagccccccgcttattcgcaaaaactttagcgtcgtactggaacggacagtgcgagaattgcgcggagaagcttgtctggcggtggctgaattcgcacctacaaaacaacaaataatctgttcgcgctcatttagtaaacacattacagaatatcaaagtatgcatgaagccgtttgtagctatgccgagaaagcagcagaaaagctacgcaaagagcaccaatactgttgccatgtatcaacttttatcaaaaccagcccttttgccagtaacgaggtctattacagtaacctcgccagcactcgcctcaactttccgaccttggactcaagggatattattgccgcagccctcaaatggctggcagcaatttggcgacccggtcaccattacctgaaagcaggtattatgttgggagatttttcaagtcagggtatcgcgcaattgggtctatttgatgagagcaaaccgcgcattaacagtgaatcattgatggcggctatcgacaaaattaatcaatccggtaaaagtaaaattgcgtttatcgggcaaggagttaatcaacaatggcagatgaaacgtgaaatgttatcacctgcatatactacccgaattcaagattgtcctattgcggttattcggtaa

SEQ ID NO: 66611 - protein, 422 aa, Yersinia intermedia ATCC 29909
MFALVDVNSFYASCETVFRPDLYGRPVVVLSNNDGCVIARSREAKVVGIPMGAPYFKIQQVIHQHRVVAFSSNYALYSDMSARVMTILEQLAPGIEIYSIDEAFLNITGVQHCITLEEFGQGVRDKIRKLTGLNVGVGIAPSKTLAKLANHAAKLWHKTGGVVDLSNPIRQRKLLALMPAAQVWGVGQRTAKKLAVMGITTALQLSEASPPLIRKNFSVVLERTVRELRGEACLAVAEFAPTKQQIICSRSFSKHITEYQSMHEAVCSYAEKAAEKLRKEHQYCCHVSTFIKTSPFASNEVYYSNLASTRLNFPTLDSRDIIAAALKWLAAIWRPGHHYLKAGIMLGDFSSQGIAQLGLFDESKPRINSESLMAAIDKINQSGKSKIAFIGQGVNQQWQMKREMLSPAYTTRIQDCPIAVIR

SEQ ID NO: 66612 - DNA, 1251 bp, Shewanella sp. ANA-3
  CDS (1)..(1251): transl_table=11
atgagcagcataatagcgttatgcgatgggaataagttttacagctcatgcgaacagatttttaacccgcagtatcgtggtaagcctctaattgtggtctcgaacaatgacggcatgacagtgacgttaagccctgaagcggctgcgttggggcttaaaaaattcacgccttactttcaagttgctgagttctgtagggcgaatggcgtggttgtttgctcgagcaattacgccttgtattcagaaatcagctctcagtttatgaaagtcgcatcgagagagtgtttttcgtattttccctattcgatagacgagatttttgctgaatttgggaatgatgacacaccacagaacctctcaatattaggccgcaagctcaggcacgatgtctggcgcgaggtccgattgcctattggtgtcgggctaggggataccttaacgctggcgaaagccgcaaatcatgcagcgaagcgcttaggctatcgcggtgtttgcgtgattaaagcgcacaatcgcgaagccatcttaggggcgatgttgactaccgatgtgtggggagtgggtaaacgaattggtcagcggctaagttcgatggggattcatactgcgctgcagttggcccaaatgaagactaagaccgcgaggaaaatgtttggcgttaacatcgaaagaacaattttcaaattgaatgggacaaaggcgtttaactgggacgatatgcccgttaataagcgacagatattctccacacgctcagttggccagcgaataacgacgatagaggggttaaaagaggcgttgtcattccatgcgtgtgaagcggctcgaaagctaaggggtcaaaaatcggtagcacgttgcttggtattttttgctcaaacatccgcgtatgacaagcatggtgttagtggtttcagtcggacaattcatttaccagcccccaccagtgacagcatgattatcagtcagcaaattacctctgcggttgagtcattttatgccgcagtgccgtactatcgcgttggggtagggctattagatatagaaccaggcttgcagctcgatatgttcaacgacaacctgggaaaaccagcgttgatgtcagtcatggacagattaaacgagcaaatgggcaaaggtgccgtgttcgtcgctgccaatggcattgagaaaaaatggcagatgcggcgagcgttcttgagtccatcttatctaacaaattggaatgaaattccaaccattcactgttag

SEQ ID NO: 66613 - protein, 416 aa, Shewanella sp. ANA-3
MSSIIALCDGNKFYSSCEQIFNPQYRGKPLIVVSNNDGMTVTLSPEAAALGLKKFTPYFQVAEFCRANGVVVCSSNYALYSEISSQFMKVASRECFSYFPYSIDEIFAEFGNDDTPQNLSILGRKLRHDVWREVRLPIGVGLGDTLTLAKAANHAAKRLGYRGVCVIKAHNREAILGAMLTTDVWGVGKRIGQRLSSMGIHTALQLAQMKTKTARKMFGVNIERTIFKLNGTKAFNWDDMPVNKRQIFSTRSVGQRITTIEGLKEALSFHACEAARKLRGQKSVARCLVFFAQTSAYDKHGVSGFSRTIHLPAPTSDSMIISQQITSAVESFYAAVPYYRVGVGLLDIEPGLQLDMFNDNLGKPALMSVMDRLNEQMGKGAVFVAANGIEKKWQMRRAFLSPSYLTNWNEIPTIHC

SEQ ID NO: 66614 - DNA, 1257 bp, Shewanella sp. ANA-3
  CDS (1)..(1257): transl_table=11
atgtacgccttagtcgatgccaactcgttttattgctccgctgagcaagtgttccgccccgattggcgcggcaaaccgattatcgtactaagcaataacgatggctgtatcgtggcagccaaccgtcaggccagagaactcggcatccccaaatttgcgccgtattttcatgtcaaagaacaatgcgccaaactgggggtaatagtgtgttctagcaactacgagctctatgccgatttgtcggcaaaaatgatggaaatcatcggccgcttcgctccagaccaacatatttactccattgatgaatcatttttatccttcaagcactgccacaccagcatcccctgcttaaaaacacacggcctgcgcatccgccaaaccgtttggaaagaagcgcgcatccccgtttgcgttggcataggtgcaacactcacactggctaaaatcgctaatcatgccgctaaaaaattacccggctatcatggtgtttgcctgatagataatgaacctcaacgaattgaaattcttaaacaactcttagtcagtgatgtatggggtattgggcgccgcctcagcaaaaaactggtgagtatgggcattcacaccgcttacgatctggcacaaatgccaacaggtcttgctcgcaagcaattcagcatagagatagagcgaaccgtccgagagcttaatggcacagcctgtaaacaatgggatcacacacgggcagataaacaacagatattttccactcgctccgtgggtgagcgcatcatggattttgaggcgttactacaagcattgagcaaacacgttgggattgcagcggcaaaagccagagcgcagggttcatgctgcaaatcgatgctgatttttgccaataactccccttacgatgaacaacccgttggttttaaatcccttatccatttccccactgcaaccaattgcaccattgagatgacgcaagcagcgtctttagcagcaccaagattatttcgaccaggagttaagtactacaagataggaataggcctgataaatctcgaacaaaataggtatcaacaactcgatttgttcaatttatctaaaactaaacccacactaatgaacgcatttgatggaataaatgcccgttatgggcgagataccttatttttagccgcacaaggcatagaacagaaatgggcaatgcgccgcgcattactcacaccacaatacaccacgctgtggggtggcatacctagagtaaaatgctag

SEQ ID NO: 66615 - protein, 418 aa, Shewanella sp. ANA-3
MYALVDANSFYCSAEQVFRPDWRGKPIIVLSNNDGCIVAANRQARELGIPKFAPYFHVKEQCAKLGVIVCSSNYELYADLSAKMMEIIGRFAPDQHIYSIDESFLSFKHCHTSIPCLKTHGLRIRQTVWKEARIPVCVGIGATLTLAKIANHAAKKLPGYHGVCLIDNEPQRIEILKQLLVSDVWGIGRRLSKKLVSMGIHTAYDLAQMPTGLARKQFSIEIERTVRELNGTACKQWDHTRADKQQIFSTRSVGERIMDFEALLQALSKHVGIAAAKARAQGSCCKSMLIFANNSPYDEQPVGFKSLIHFPTATNCTIEMTQAASLAAPRLFRPGVKYYKIGIGLINLEQNRYQQLDLFNLSKTKPTLMNAFDGINARYGRDTLFLAAQGIEQKWAMRRALLTPQYTTLWGGIPRVKC

SEQ ID NO: 66616 - DNA, 1257 bp, Shewanella sp. MR-7
  CDS (1)..(1257): transl_table=11
atgtacgccttagtcgatgccaactcgttttactgctcggctgagcaagtgttccgccccgattggcgcggtaaaccgattatcgtcctaagcaataacgatggctgtatcgtggcagccaaccgccaggccagagaacttggggtccccaaatttgcgccgtactttcatgtcaaagagcagtgcgccaaactaggggtgatagtgtgctcaagcaactacgagctttatgccgatttgtcagcaaaaatgatggaaatcatcggccgcttcgctcccgagcaacatatttactccattgatgaatcgtttttatccttcaagcactgccactccagcattcccagcttaaaaacgcaaggactgcgtatccgtcaaaccgtttggaaagaagctcgcttacccgtttgtgttggtataggtgcaacactcacattggctaaaatcgccaatcatgctgccaaaaaactacctggttatcatggcgtttgcctgattgataatgacccacaacggattgaaattctcaagcaactctcagtcggtgacgtgtggggaattggacgacggctcagcaaaaagctggcgagtatgggcattcagaccgcttacgaccttgcgcaaatgccagcaggccttgcacgcaagcaattcagcatagagatagagcgaacagtccgagaacttaatggcactgcctgtaaacaatgggaccacacacgggcggataaacaacagatattttccactcgctccgtgggtgagcgcatcatggattttgattcgttactacaggcattgagcaaacacgttggaattgcagcggcaaaagctagggcgcaaggttcgtgctgcaaatcgatgctgatttttgccaataactccccttacgacgaacaacccgtcggttttaaatcccttatccatttccccacggcaaccaattgcacgattgaaatgacgcaggcaatgtctttggctgccccaaaattatttcgaccaggaattaggtactacaagataggtgtaggcttgattaatctcgaacaggatagatatcagcaactcgatttgttcaatcgtcctaaaaccaaacccatactaatgaacgcactggatggaataaattcccgctatggacaagacaccttatttttggcagcacaaggcatagaacaaaaatgggcaatgcggcgggcattactaacgccacaatacaccactctgtggggcggcataccgagagtcaagtgctaa

SEQ ID NO: 66617 - protein, 418 aa, Shewanella sp. MR-7
MYALVDANSFYCSAEQVFRPDWRGKPIIVLSNNDGCIVAANRQARELGVPKFAPYFHVKEQCAKLGVIVCSSNYELYADLSAKMMEIIGRFAPEQHIYSIDESFLSFKHCHSSIPSLKTQGLRIRQTVWKEARLPVCVGIGATLTLAKIANHAAKKLPGYHGVCLIDNDPQRIEILKQLSVGDVWGIGRRLSKKLASMGIQTAYDLAQMPAGLARKQFSIEIERTVRELNGTACKQWDHTRADKQQIFSTRSVGERIMDFDSLLQALSKHVGIAAAKARAQGSCCKSMLIFANNSPYDEQPVGFKSLIHFPTATNCTIEMTQAMSLAAPKLFRPGIRYYKIGVGLINLEQDRYQQLDLFNRPKTKPILMNALDGINSRYGQDTLFLAAQGIEQKWAMRRALLTPQYTTLWGGIPRVKC

SEQ ID NO: 66618 - DNA, 1257 bp, Shewanella sp. MR-4
  CDS (1)..(1257): transl_table=11
atgtttgcgctagtcgatgccaacagcttttactgtagtgcggaacaagtattccggcctgattggcgtggtaagcctgttgttgtgctaagtaataatgatgggatgattgttgccgccaataggcaggctaaagaggcgggtattcagaagtttgtgccttactttcaagtcaaagcacaatgtgctgagcgtggtgtgattgcgtgttcatctaattatgaactgtatgctgacttgtctagcaagatgatggatatcattggccgctttgcgcctgagcagcatgtctatagcatcgatgaaacgttcctctcgtttaagaactgctatccagcaataaaatgcctccacacccaaggtcaattaataagacgcgctgtatggaaagaagctcgcttgccagtttgtgtgggaattgcggaaaccctgacgttggcaaaactggctaaccatgcagctaagaagattgagggttataaaggggtttgtgttattgacaatgaccaagaccgaaccgctattctaaagcagctagcagtaggtgatgtttggggaattgggcgcaggattagtgcaaagcttgaactgatgaatatccgtactgcatttgacctagcgaacatgccagcagggctagcccgtaaacagttcagcattgaagtcgagcggacagtacgagagcttaacggccaagcatgcaaggtgtgggatgaagcgagagctgataagaagcagatattctcgacaagaagcatgggtgagcgtatcactgattttgaatcgttactccaagcactgagcaagcatgtgggaattgcggctgctaaagcacgtaagcaaggctctgtttgcaagacgatgctgctatttgcgagtaactcaccccatgatgagcgccctgttagctataaaactgtggtgcacttcccttgtccgacgaactgtacgatagagctgactaaagcagtatgtgaagccgcacccaagctgtttcgtgaaggagtacgctattacaagataggcgtaggtttgattgatttagcgagcgagaaacacagccaattagacttgttcaatccaccgaccacaaagccgacgctaatgcttacactcgatcacattaaccaacgctacggtagtgatactctgtttgttgcagctcaaggcatagagcaaaaatgggcaatgcggagggaattactgacgccacaatatacgactaagtggcgaagtgtgccgtgtattaagtgctaa

SEQ ID NO: 66619 - protein, 418 aa, Shewanella sp. MR-4
MFALVDANSFYCSAEQVFRPDWRGKPVVVLSNNDGMIVAANRQAKEAGIQKFVPYFQVKAQCAERGVIACSSNYELYADLSSKMMDIIGRFAPEQHVYSIDETFLSFKNCYPAIKCLHTQGQLIRRAVWKEARLPVCVGIAETLTLAKLANHAAKKIEGYKGVCVIDNDQDRTAILKQLAVGDVWGIGRRISAKLELMNIRTAFDLANMPAGLARKQFSIEVERTVRELNGQACKVWDEARADKKQIFSTRSMGERITDFESLLQALSKHVGIAAAKARKQGSVCKTMLLFASNSPHDERPVSYKTVVHFPCPTNCTIELTKAVCEAAPKLFREGVRYYKIGVGLIDLASEKHSQLDLFNPPTTKPTLMLTLDHINQRYGSDTLFVAAQGIEQKWAMRRELLTPQYTTKWRSVPCIKC

SEQ ID NO: 66620 - DNA, 1266 bp, IncL
  CDS (1)..(1266): transl_table=11
gtgtacgccttaatcgatgtcaattcgatgtactgcagctgcgaagaagcgttccgccctgatttacgaggtcgcccagtggtcgttctcagcaacaacgacggggcgcttgttgcggtcaatcgcgcggcgaaagcgcttggcgtgcgccgcggggagccctatttccgctgccgccgcctgctggaacagcataacgttgccgtattcagttccaactacaccctttacgcctcattctccgccagatttgcaaccgtggtggagagtctggcgccgcggacatttgtttactcaattgatgagctctttgcggatgcctctcatatggagggagtgatgacgccgcaggcgtttggccagcttttgcgggctgaagtgctgcgccagacaacgctcacctgtggagtcggcgtcgcgccaacgaagacgctggccaagctgtgcaaccatgccgcaaagacgtggcctgctaccgggggggttgtggcgctcagtgatcctgtaagactgaaaaagctgatgagcctggtggcggccggcgatgtgtggggcgttggccatcgtaccgaaaaagggctggcggcaatggggatcaaaacggcgctggcgctcgcagagatggatatccgtcttgcacgccggctgtacggtgtgacgctggaaaggaccattcgtgagctgcgtggcgaggcctgctttgccctggaggaaggaaccggcgcgaaacagcagcttgttgtatcccgttcgtttggagcacgggtcacgcaactggcgcagatgcagcaggcggtgactaaatatgccacacgggcaggggaaaagttgcgccaggaaaaccgcctggcgaaggtggtaacggtctttatccgcagcagtgcttatgacgccggcggtgtgccctacagtaaccaggctacggaagtgcttcccgtgccaagccaggatacccgcgacatcatcgccgcggcgcagctgggactgtcgcgtatctggcgtgagggcgtgcggtatgcaaaagccggcgtgatgctcagcgatctgcagggatatgaaacccagctggatctgttttcgccggctgctgtgcggccgggcagcgaaaaactgatggccaccatcgacaaaataaacagggaaggaaggtcaaggatcttcttcgccggagaaggtattgatccggaatatgccatgcgccgtgaaatgttgtccccggcctacaccacgcagtggaaggatattcccgcggcgtttatgcgataa

SEQ ID NO: 66621 - protein, 421 aa, IncL
MYALIDVNSMYCSCEEAFRPDLRGRPVVVLSNNDGALVAVNRAAKALGVRRGEPYFRCRRLLEQHNVAVFSSNYTLYASFSARFATVVESLAPRTFVYSIDELFADASHMEGVMTPQAFGQLLRAEVLRQTTLTCGVGVAPTKTLAKLCNHAAKTWPATGGVVALSDPVRLKKLMSLVAAGDVWGVGHRTEKGLAAMGIKTALALAEMDIRLARRLYGVTLERTIRELRGEACFALEEGTGAKQQLVVSRSFGARVTQLAQMQQAVTKYATRAGEKLRQENRLAKVVTVFIRSSAYDAGGVPYSNQATEVLPVPSQDTRDIIAAAQLGLSRIWREGVRYAKAGVMLSDLQGYETQLDLFSPAAVRPGSEKLMATIDKINREGRSRIFFAGEGIDPEYAMRREMLSPAYTTQWKDIPAAFMR

SEQ ID NO: 66622 - DNA, 1266 bp, IncL
  CDS (1)..(1266): transl_table=11
gtgtacgccttaatcgatgtcaattcgatgtactgcagctgcgaagaagcgttccgccctgatttacgagggcgccctgtggtcgttctcagcaacaacgacggggcgcttgttgcggtcaatcgcgcggcgaaagcgctgggcgtgcgccgcggggagccctatttccgctgccgccgcctgctggaacagcataacgtcgccgtattcagttccaactacaccctttacgcctcattctccgcccgatttgcaaccgtagtggaaagtctggcgccgcggacgtttgtttactcaattgatgagctctttgctgatgcgtctcacatggagggcgtgatgtcgccgcaggcgtttggccagcttttgcgggctgaagtgctgcgccagacaacgctcacctgtggagtgggcgtcgcgccaacgaagacgctggccaagctgtgcaaccacgccgcaaagacgtggcctgccaccgggggggttgtggcgctcagtgatcctgtgagactgaaaaggctgatgagcctggtgtcggccggcgatgtgtggggggttggccatcgtaccgaaaaagggctggcgacaatggggatcaaaacggcgctggcgctcgcagagatggatatccgacttgcacgccggctgtacggtgtgacgctggaacggaccatccgtgagctgcgtggcgaggcctgctttgccctggaagaaggtaccggcgcgaaacagcagcttgttgtatcccgctcgtttggatcgcgggtcacgcaactggcgcagatgcagcaggcggtgactaaatatgccacacgggcaggggaaaagttgcgccaggaaaaccgtctggcgaaggtggtaacggtctttatccgcagcagtgcttatgacgccggcggtgtgccctacagtaaccaggctacggaagtgctttccgtgccaagccaggatacacgcgacatcatcgccgcggcgcagctggggctgtcgcgtatctggcgtgagggtgtgcggtatgcaaaagccggcgtgatgctcagcgatctgcagggacatgaaacccagctggatctgtttgcgccggctgcagtgcggccgggcagcgaaaaactgatggccaccatcgacaaaataaacagggaaggaaggtcaagggtcttcttcgccggggaaggtattgatccggaatatgccatgcgccgtgaaatgttgtctccggcctacaccacgcagtggaaggatattcccgcggcgtttatgcgataa

SEQ ID NO: 66623 - protein, 421 aa, IncL
MYALIDVNSMYCSCEEAFRPDLRGRPVVVLSNNDGALVAVNRAAKALGVRRGEPYFRCRRLLEQHNVAVFSSNYTLYASFSARFATVVESLAPRTFVYSIDELFADASHMEGVMSPQAFGQLLRAEVLRQTTLTCGVGVAPTKTLAKLCNHAAKTWPATGGVVALSDPVRLKRLMSLVSAGDVWGVGHRTEKGLATMGIKTALALAEMDIRLARRLYGVTLERTIRELRGEACFALEEGTGAKQQLVVSRSFGSRVTQLAQMQQAVTKYATRAGEKLRQENRLAKVVTVFIRSSAYDAGGVPYSNQATEVLSVPSQDTRDIIAAAQLGLSRIWREGVRYAKAGVMLSDLQGHETQLDLFAPAAVRPGSEKLMATIDKINREGRSRVFFAGEGIDPEYAMRREMLSPAYTTQWKDIPAAFMR

SEQ ID NO: 66624 - DNA, 1269 bp, IncJ plasmid R391
  CDS (1)..(1269): transl_table=11
atgcctgtatttgccttggtggactgcaacaacttttacgccagttgtgagaagctgtttcgtcctgatttaaaagatacaccggttgtggtgctgtccaataacgacggctgcgtggttgcacggtcacgtgaagctaagtcactcggtattaaaatgggcgtacccgtctttcagatcaaagctgaaatgcagcgccatggtattttggcattctcgtccaactatgcgctgtacgcagatttgagcagtcgagtgatgcgcactttggaagagatggcaccacgagtagaggtttactcgattgacgaagcgtttttggacttaaccggtattgagtctgccatatctcttgtcgagttcggacaacaagtgcgagagcgcataggtcactggattgggatcagcgtctgtgtaggcattgcaccgactaaaacactcgccaagctggctaaccatgccgctaagaaatatcccgctactcaaggggttgtagacctgaccaatccagatcggcaacgtcgattgctcgcattagtcccggttgatgatgtttggggcgttggtaggcggctttctaagcgattaaatgcgttgggtatcactacagccttagacctagccaatgcctcacctagagccatcagagaccagttttcggtggttttagagagaaccgtcagagagctcaatggtgagtcgtgcattgaacttgaagagatcccgccaactaagaaacaaattgtctgtagccgttcatttggcgtaaaagtgacgcactttgaattcttacgtgaagccatatgcgaatacgcaacccgcgccacggagaagcttcgcaaagaacagcagcaagccaaagtgatgaccgtgtttatacgtaccagcccctttaaggacaacgagccgcagtacagcaactctgcatcgggtgagttgctgatccccagttgcgatacgcgggactttatcgagctggccaatcacttactcaagcggatttggaaggatggttttcgttatgccaaagcgggcgtcatgctgtctgacttttacgatcctggtatgtttcaaccaggactattcgatgacgtatcgacccgctctaatagccagcagttaatgtctgtattggacaccattaaccaaagcggtgccggaaaggttttctttgctggacaaggtacgaagaaagattggtcgatgaagcgagagcatttatctcccgcttatacaacacgctgggaccaattaccgcgagttaagtag

SEQ ID NO: 66625 - protein, 422 aa, IncJ plasmid R391
MPVFALVDCNNFYASCEKLFRPDLKDTPVVVLSNNDGCVVARSREAKSLGIKMGVPVFQIKAEMQRHGILAFSSNYALYADLSSRVMRTLEEMAPRVEVYSIDEAFLDLTGIESAISLVEFGQQVRERIGHWIGISVCVGIAPTKTLAKLANHAAKKYPATQGVVDLTNPDRQRRLLALVPVDDVWGVGRRLSKRLNALGITTALDLANASPRAIRDQFSVVLERTVRELNGESCIELEEIPPTKKQIVCSRSFGVKVTHFEFLREAICEYATRATEKLRKEQQQAKVMTVFIRTSPFKDNEPQYSNSASGELLIPSCDTRDFIELANHLLKRIWKDGFRYAKAGVMLSDFYDPGMFQPGLFDDVSTRSNSQQLMSVLDTINQSGAGKVFFAGQGTKKDWSMKREHLSPAYTTRWDQLPRVK

SEQ ID NO: 66626 - DNA, 1284 bp, Pseudomonas syringae pv
  CDS (1)..(1284): transl_table=11
atggaaaagcatgaggttgtcttcgcgcttatcgattgcaattgcttctatgccagctgcgagcgtgtttttcgtccagatctggagaaaacgcccatcgtggtactcagcaataacgacggttgcgtcatcgcccgtagctacgacgccaagccatttgtgaaaatgggggctccctattttcagatcaaagaggtgttgcgccgccacggcataaaggtgttcagcagcaactacgcgctctatggcgacatgagcgagcgtgtcatgtcgatcatcgagtcgatggtgccagcctccgaggtctacagcatcgatgaggcgtttgcagacctcaccggggtccctggcgatctcacagcgttcggtcgacgcatccgggcgaacattcttaaatgcactggtattcctgtgggggtgggtatcggtcctacgaaaacgctcgctaagctggcaaaccacactgctaagcgactgctatcccatacaggcggtgttgtagacatttgcgacctgcataaccgcaactgggtactgcgtaatacggcagtatctgaggtctggggggtagggaagaagataaatgcccacctggaggctatgaagatccgcacagcaatggaccttgcaaccgccgacccgcgtactctgcgcgaccggttcagcgtggtcattgaaaagaccgcacgtgagctggcaggtacttcgtgcctggagctgggcgaagctgcaccacccaagcaggagatctgttgcagccgaatgttcggcaaacggctaaccaccattcagccaatcaaagaggcggtggccacctacactcagcgtgcggccgagaagctccgttttcaaaactcgctgtgcaagaagatccgcgtcagcatccgtaccggcatgttcaatccggaagaagccaagtacgccaacggcgctttggttgaattgccataccccaccaacgacgtccgcttgatgaccagggcggcgactgaggcagtgaatcgtttgtttcgaccggggttcaagtacagcaaagctgaggttctgttgctggatctgagacagcctggcgaatttacggatgacatgttcgctgcttcgcagcctgcatcttcggagaaggtgatgggagtcctggacgagatcaatacacgctggggcagagggactttaagagctgggagtgttccttccaatccggaatgggctatgcgtcgcgagctgatgagtcaaagttatacaaccaggctcgatcagttgtgggaggtgaaaagtctcttgtag

SEQ ID NO: 66627 - protein, 427 aa, Pseudomonas syringae pv
MEKHEVVFALIDCNCFYASCERVFRPDLEKTPIVVLSNNDGCVIARSYDAKPFVKMGAPYFQIKEVLRRHGIKVFSSNYALYGDMSERVMSIIESMVPASEVYSIDEAFADLTGVPGDLTAFGRRIRANILKCTGIPVGVGIGPTKTLAKLANHTAKRLLSHTGGVVDICDLHNRNWVLRNTAVSEVWGVGKKINAHLEAMKIRTAMDLATADPRTLRDRFSVVIEKTARELAGTSCLELGEAAPPKQEICCSRMFGKRLTTIQPIKEAVATYTQRAAEKLRFQNSLCKKIRVSIRTGMFNPEEAKYANGALVELPYPTNDVRLMTRAATEAVNRLFRPGFKYSKAEVLLLDLRQPGEFTDDMFAASQPASSEKVMGVLDEINTRWGRGTLRAGSVPSNPEWAMRRELMSQSYTTRLDQLWEVKSLL

SEQ ID NO: 66628 - DNA, 1263 bp, Pseudomonas cichorii
  CDS (1)..(1263): transl_table=11
atgcccgtgttcggtctcgtggactgcaactgtttctacgcaagctgtgagcgtgtgtttcggccggatctggctaagatccccattgttgtgctcagcaataacgatggctgcgttatagctcgaagctacgacgccaaaccgttcgtgaaaatgggcgcgccctattttcagattaaggacgtattgcgccggcacggcatcaaggccttcagcagcaattttgcgctctacggagacatgagccaaagagtcatggccatcatcgaatcgatggtgcctgccgtcgaggtctacagcatcgatgaggcttttgccgagttaaccggcatgccaggcaatctaaccgagttaggtagagcaatccggtcaaaggtctaccgctgcacgggcatccctgtgggtgtagggattgctccgactaaaaccctggcaaagcttgccaattacacagcaaagcgtctccaggcgcacacaggcggcgtagtggatatctgcgaccctttgaagcgtgactgggtgctgcgcaatacctcagtcggtgaagtttggggtatcggtcgaaagctgaaagcacaccttgagggcatgcatatcctttccgcgaaggatcttgcagctgcagacccgtggatgctgcgcaagaaattcagcgtggtcgtggagaagacggcgcgagagctgtcaggcaccgtgtgcctggagctggatgaggtagagccaccaaagcaagagatctgctgcagcagaatgttcggcaagcgactgaccgagcttggaccgatcaaagaggcggtggccacctacatgatgcgtgcttcagagaaactgcgagcccagggatcagtatgcaaaaaaatcagggtcagcatccgtaccggcatgttcagtcctgacgaggccaagtatgcgaacggtgcgcttgtccagctgccctaccctacaaacgacgtgcggctgatgacaaaatatgcgaccgaggcagtgtcgcgcatctatcgtcccgggtccaggtacagcaaagcagaggttatgttgatggacatttgtcagccgggtgagtttaccgacgacctgttctcggccgtgcagccgctgagctctgatcgtctgatgaccgcattggacttgatcaacgaaaagtggggccgcggcacgctgcgtactggatctgtcccagttgtcccggattggggtatgcggcgcgagaatatgagccagagctacacgacgcgacttgatcagctgtgggttgtaaagtaa

SEQ ID NO: 66629 - protein, 420 aa, Pseudomonas cichorii
MPVFGLVDCNCFYASCERVFRPDLAKIPIVVLSNNDGCVIARSYDAKPFVKMGAPYFQIKDVLRRHGIKAFSSNFALYGDMSQRVMAIIESMVPAVEVYSIDEAFAELTGMPGNLTELGRAIRSKVYRCTGIPVGVGIAPTKTLAKLANYTAKRLQAHTGGVVDICDPLKRDWVLRNTSVGEVWGIGRKLKAHLEGMHILSAKDLAAADPWMLRKKFSVVVEKTARELSGTVCLELDEVEPPKQEICCSRMFGKRLTELGPIKEAVATYMMRASEKLRAQGSVCKKIRVSIRTGMFSPDEAKYANGALVQLPYPTNDVRLMTKYATEAVSRIYRPGSRYSKAEVMLMDICQPGEFTDDLFSAVQPLSSDRLMTALDLINEKWGRGTLRTGSVPVVPDWGMRRENMSQSYTTRLDQLWVVK

SEQ ID NO: 66630 - DNA, 1308 bp, Providencia rettgeri
  CDS (1)..(1308): transl_table=11
atgtggtgcgaaacatgcgccgtaagtcgtgacgatcccatgcctgtatttgccttggtggactgcaacaacttttacgccagttgtgagaagctgtttcgtcctgatttaaaagatacaccggttgtggtgctgtccaataacgacggctgcgtggttgcacggtcacgtgaagctaagtcactcggtattaaaatgggcgtacccgtctttcagatcaaagctgaaatgcagcgccatggtattttggcattctcgtccaactatgcgctgtacgcagatttgagcagtcgagtgatgcgcactttggaagagatggcaccacgagtagaggtttactcgattgacgaagcgtttttggacttaaccggtattgagtctgccatatctcttgtcgagttcggacaacaagtgcgagagcgcataggtcactggattgggatcagcgtctgtgtaggcattgcaccgactaaaacactcgccaagctggctaaccatgccgctaagaaatatcccgctactcaaggggttgtagacctgaccaatccagatcggcaacgtcgattgctcgcattagtcccggttgatgatgtttggggcgttggtaggcggctttctaagcgattaaatgcgttgggtatcactacagccttagacctagccaatgcctcacctagagccatcagagaccagttttcggtggttttagagagaaccgtcagagagctcaatggtgagtcgtgcattgaacttgaagagatcccgccaactaagaaacaaattgtctgtagccgttcatttggcgtaaaagtgacgcactttgaattcttacgtgaagccatatgcgaatacgcaacccgcgccacggagaagcttcgcaaagaacagcagcaagccaaagtgatgaccgtgtttatacgtaccagcccctttaaggacaacgagccgcagtacagcaactctgcatcgggtgagttgctgatccccagttgcgatacgcgggactttatcgagctggccaatcacttactcaagcggatttggaaggatggttttcgttatgccaaagcgggcgtcatgctgtctgacttttacgatcctggtatgtttcaaccaggactattcgatgacgtatcgacccgctctaatagccagcagttaatgtctgtattggacaccattaaccaaagcggtgccggaaaggttttctttgctggacaaggtacgaagaaagattggtcgatgaagcgagagcatttatctcccgcttatacaacacgctgggaccaattaccgcgagttaagtag

SEQ ID NO: 66631 - protein, 435 aa, Providencia rettgeri
MWCETCAVSRDDPMPVFALVDCNNFYASCEKLFRPDLKDTPVVVLSNNDGCVVARSREAKSLGIKMGVPVFQIKAEMQRHGILAFSSNYALYADLSSRVMRTLEEMAPRVEVYSIDEAFLDLTGIESAISLVEFGQQVRERIGHWIGISVCVGIAPTKTLAKLANHAAKKYPATQGVVDLTNPDRQRRLLALVPVDDVWGVGRRLSKRLNALGITTALDLANASPRAIRDQFSVVLERTVRELNGESCIELEEIPPTKKQIVCSRSFGVKVTHFEFLREAICEYATRATEKLRKEQQQAKVMTVFIRTSPFKDNEPQYSNSASGELLIPSCDTRDFIELANHLLKRIWKDGFRYAKAGVMLSDFYDPGMFQPGLFDDVSTRSNSQQLMSVLDTINQSGAGKVFFAGQGTKKDWSMKREHLSPAYTTRWDQLPRVK

SEQ ID NO: 66632 - DNA, 1272 bp, Shigella flexneri
  CDS (1)..(1272): transl_table=11
atgtttgcactggctgatatcaacagtttctacgcctcatgtgaaaaagttttccgcccggaccttcgcaacgaaccggtcatcgtactcagcaataacgatggctgtgtgatcgcgcgcagcccggaggcaaaagcccttggcatcagaatggggcagccctggtttcaggtgagacagatgcgcctggagaagaaaatacatgtattttccagcaattatgcgctgtaccacagcatgagccaacgggttatggctgttctggagtcgctttctcccgcagttgagccctactcaattgatgaaatgttcattgatttgcgggggataaatcattgcatctctccggagttttttggtcatcagctcagggaacaggtaaaaagctggacaggactcaccatgggggtgggcattgcgcctacaaaaacgctggctaaaagtgcacagtgggcaacaaagcaatggccacagttttccggtgtggtcgcgctgacggcagaaaaccgtaatcggatcttgaagctactggggctgcagccagttggtgaggtctggggagtaggacgcagactgacggaaaagctgaatgcgctgggtattaacacagcactgcagctggcgcaggctaacacggcattcatccggaaaaacttcagcgtcattcttgagcgtacggtacgcgaactcaacggcgagtcctgcatatccctggaagaagcaccaccggcaaaacagcagattgtctgtagtcgcagttttggtgaacgaatcacagacaaagatgccatgcaccaggctgttgttcagtatgcagagcgggccgcagagaaactacgtggggagcgtcagtattgccggcaggtgacgacatttgtacggacatccccctttgcagtaaaagaaccctgttacagcaatgccgctgtggaaaagcttccattacccacacaggacagccgggacattattgccgcagcatgcagagcgttaaaccatgtctggcgtgaagggtaccgctatatgaaggcaggagtcatgctggctgatttcacaccatcgggtatagcgcagccgggattatttgatgagatccagccccgtaaaaacagcgaaaagttaatgaaaacactcgatgaactgaaccagtctggaaaagggaaagtgtggtttgcggggcgaggaaccgcccctgaatggcaaatgaaacgggaaatgctctcgccttcgtatacaacacaatggactgagatccccattgcttcattctga

SEQ ID NO: 66633 - protein, 423 aa, Shigella flexneri
MFALADINSFYASCEKVFRPDLRNEPVIVLSNNDGCVIARSPEAKALGIRMGQPWFQVRQMRLEKKIHVFSSNYALYHSMSQRVMAVLESLSPAVEPYSIDEMFIDLRGINHCISPEFFGHQLREQVKSWTGLTMGVGIAPTKTLAKSAQWATKQWPQFSGVVALTAENRNRILKLLGLQPVGEVWGVGRRLTEKLNALGINTALQLAQANTAFIRKNFSVILERTVRELNGESCISLEEAPPAKQQIVCSRSFGERITDKDAMHQAVVQYAERAAEKLRGERQYCRQVTTFVRTSPFAVKEPCYSNAAVEKLPLPTQDSRDIIAAACRALNHVWREGYRYMKAGVMLADFTPSGIAQPGLFDEIQPRKNSEKLMKTLDELNQSGKGKVWFAGRGTAPEWQMKREMLSPSYTTQWTEIPIASF

SEQ ID NO: 66634 - DNA, 1275 bp, Salmonella typhimurium
  CDS (1)..(1275): transl_table=11
atgtttgcactggctgatatcaacagtttctacgcctcatgtgaaaaagttttccgcccggaccttcgcaacgaaccggtcatcgtactcagcaataacgatggctgtgtgatcgcgcgcagcccggaggcaaaagcccttggcatcagaatggggcagccctggtttcaggtgagacaaatgcgcctggagaagaaaatacatgtattttccagcaattatgcgctgtaccacagcatgagccaacgggttatggctgttctggagtcgctttctcccgcagttgagccctactcaattgatgaaatgttcattgatttgcgggggataaatcattgcatctctccggagttttttggtcatcagctcagggaacaggtaaagagctggacaggactcaccatgggggtgggcattgcgcctacaaaaacgctggctaaaagtgcacagtgggcaacaaagcaatggccacagttttccggagtggtcgcgctgacggcagaaaaccgtaatcggatcttgaagctactggggctgcagccagttggtgaggtctggggagtaggacacagactgacggaaaagctgaatgcgctgggtattaacacagcactgcagctggcgcaggctaacacggcattcatccggaaaaacttcagcgtcattcttgagcgtacggtacgcgaactcaacggcgagtcctgcatatccctggaagaagcaccaccggcaaaacagcagattgtctgtagtcgcagttttggtgaacgaatcacagacaaagatgccatgcaccaggctgttgttcagtatgcagagcgggccgcagagaaactacgtggggagcgtcagtattgccggcaggtgacgacatttgtacggacatcaccctttgcagtaaaagaaccctgttacagcaatgccgctgtggaaaagcttccattgcccacacaggacagccgggacattattgccgccgcatgcagagccttaaaccatgtctggcgtgaagggtaccgctatatgaaggcaggtgtcatgctggctgatttcacaccatcgggtatagcgcagccgggattatttgatgaaatccagccccgtaaaaacagtgaaaagttaatgaaaacactcgatgaactgaaccagtcgggaaaagggaaagtgtggtttgcggggcgaggaaccgcccctgaatggcaaatgaaacgggaaatgttgagtcagtgttatacaactaaatggcgagatattcccctggccaggctgggttag

SEQ ID NO: 66635 - protein, 424 aa, Salmonella typhimurium
MFALADINSFYASCEKVFRPDLRNEPVIVLSNNDGCVIARSPEAKALGIRMGQPWFQVRQMRLEKKIHVFSSNYALYHSMSQRVMAVLESLSPAVEPYSIDEMFIDLRGINHCISPEFFGHQLREQVKSWTGLTMGVGIAPTKTLAKSAQWATKQWPQFSGVVALTAENRNRILKLLGLQPVGEVWGVGHRLTEKLNALGINTALQLAQANTAFIRKNFSVILERTVRELNGESCISLEEAPPAKQQIVCSRSFGERITDKDAMHQAVVQYAERAAEKLRGERQYCRQVTTFVRTSPFAVKEPCYSNAAVEKLPLPTQDSRDIIAAACRALNHVWREGYRYMKAGVMLADFTPSGIAQPGLFDEIQPRKNSEKLMKTLDELNQSGKGKVWFAGRGTAPEWQMKREMLSQCYTTKWRDIPLARLG

SEQ ID NO: 66636 - DNA, 1263 bp, Escherichia coli
  CDS (1)..(1263): transl_table=11
atgtttgcgctgattgatgtcaatggcatgtacgccagctgtgagcaggcatttaggccagatctggcaaaccgagcagtggccgttttatccaacaatgacggcaacattgtggcccgtaattacctggcgaagaaagcgggcctgaaaatgggcgatccgtacttcaaagtcagacccataatcgagcgtcataacatcgctatttttagctctaattacactctttatgcctccatgtcggcccggttcgcggccgtagttgagtcccttgcaagccacgtcgaacagtattcaatcgacgagctttttgttgactgcaaagggataacggccgccatgagccttgacgctttcgggcgccaactgcgcgaggaagtcaggcgacacacaacgctggtatgcggggtcggtattgcccgtactaagacgctggcgaagctgtgtaaccacgctgcaaaaacatggcccgctactggcggggtggttgctctggacgatggcgccagactgaagaaattaatgagcatcctgccggttgcggaagtctggggcgtcggccatcgtacagagaaagcactcgccacaatggggatcaaaacggtgctggatttagccagggcagatacgcgcctaatccgtaaaacattcggcgttgtgcttgaaagaacggtacgggagttgcgcggcgaggcttgcttcagcctggaagaaaaccctcctgcgaagcagcagattgttgtgtcgcgctcattcggccaacgcgtagaaaccctgacggacatgcagcaggctgtcaccggatttgcagcgcgcgcagctgaaaaactgcgtaatgagaggcaatactgccgcgtcataagcgtctttatccgtaccagtccttattcagtgcgtgatacacagtatgccaatcaggcaaccgaaaaactgacggtggcaacccaggacagccgcacgataattcaggcagcacaagcgctggcgcggatctggcgggaagatattgcgtatgcaaaagcaggggtcatgctggcagattttagcgggaaggaggcccagcttgatttattcgactctgctacgccttcagctggcagcgaggctttaatggctgttcttgatggtataaaccggcgtggaaagaaccagcttttttttgcaggccagggcatcgataactcctttgccatgcgtcgtcagatgttgtcacctgattacacgacagactggcgctcaataccaatagccaccatcaaataa

SEQ ID NO: 66637 - protein, 420 aa, Escherichia coli
MFALIDVNGMYASCEQAFRPDLANRAVAVLSNNDGNIVARNYLAKKAGLKMGDPYFKVRPIIERHNIAIFSSNYTLYASMSARFAAVVESLASHVEQYSIDELFVDCKGITAAMSLDAFGRQLREEVRRHTTLVCGVGIARTKTLAKLCNHAAKTWPATGGVVALDDGARLKKLMSILPVAEVWGVGHRTEKALATMGIKTVLDLARADTRLIRKTFGVVLERTVRELRGEACFSLEENPPAKQQIVVSRSFGQRVETLTDMQQAVTGFAARAAEKLRNERQYCRVISVFIRTSPYSVRDTQYANQATEKLTVATQDSRTIIQAAQALARIWREDIAYAKAGVMLADFSGKEAQLDLFDSATPSAGSEALMAVLDGINRRGKNQLFFAGQGIDNSFAMRRQMLSPDYTTDWRSIPIATIK

SEQ ID NO: 66638 - DNA, 1266 bp, Salmonella typhimurium
  CDS (1)..(1266): transl_table=11
atgtttgcgctgattgatgtcaatggcatgtacgccagctgtgagcaggcatttaggccagatctggcaaaccgagcagtggccgttttatccaacaatgacggcaacattgtggcccgtaattacctggcgaagaaagcgggcctgaaaatgggcgatccgtacttcaaagtcagacccataatcgagcgtcataacatcgctatttttagctctaattacactctttatgcctccatgtcggcccggttcgcggccgtagttgagtcccttgcaagccacgtcgaacagtattcaatcgacgagctttttgttgactgcaaagggataacggccgccatgagccttgacgctttcgggcgccaactgcgcgaggaagtcaggcgacacacaacgctggtatgcggggtcggtattgcccgtactaagacgctggcgaagctgtgtaaccacgctgcaaaaacatggcccgctactggcggggtggttgctctggacgatggcgccagactgaagaaattaatgagcatcctgccggttgcggaagtctggggcgtcggccatcgtacagagaaagcactcgccacaatggggatcaaaacggtgctggatttagccagggcagatacgcgcctaatccgtaaaacattcggcgttgtgcttgaaagaacggtacgggagttgcgcggcgaggcttgcttcagcctggaagaaaaccctcctgcgaagcagcagattgttgtgtcgcgctcattcggccaacgcgtagaaaccctgacggacatgcagcaggctgtcaccggatttgcagcgcgcgcagctgaaaaactgcgtaatgagaggcaatactgccgcgtcataagcgtctttatccgtaccagtccttattcagtgcgtgatacacagtatgccaatcaggcaaccgaaaaactgacggtggcaacccaggacagccgcacgataattcaggcagcacaagccgcgctggcgcggatctggcgggaagatattgcgtatgcaaaagcaggggtcatgctggcagattttagcgggaaggaggcccagcttgatttattcgactctgctacgccttcagctggcagcgaggctttaatggctgttcttgatggtataaaccggcgtggaaagaaccagcttttttttgcaggccagggcatcgataactcctttgccatgcgtcgtcagatgttgtcacctgattacacgacagactggcgctcaataccaatagccaccatcaaataa

SEQ ID NO: 66639 - protein, 421 aa, Salmonella typhimurium
MFALIDVNGMYASCEQAFRPDLANRAVAVLSNNDGNIVARNYLAKKAGLKMGDPYFKVRPIIERHNIAIFSSNYTLYASMSARFAAVVESLASHVEQYSIDELFVDCKGITAAMSLDAFGRQLREEVRRHTTLVCGVGIARTKTLAKLCNHAAKTWPATGGVVALDDGARLKKLMSILPVAEVWGVGHRTEKALATMGIKTVLDLARADTRLIRKTFGVVLERTVRELRGEACFSLEENPPAKQQIVVSRSFGQRVETLTDMQQAVTGFAARAAEKLRNERQYCRVISVFIRTSPYSVRDTQYANQATEKLTVATQDSRTIIQAAQAALARIWREDIAYAKAGVMLADFSGKEAQLDLFDSATPSAGSEALMAVLDGINRRGKNQLFFAGQGIDNSFAMRRQMLSPDYTTDWRSIPIATIK

SEQ ID NO: 66640 - DNA, 1275 bp, Salmonella typhimurium
  CDS (1)..(1275): transl_table=11
atgttcgctttggctgacgtcaactcgttctatgccagttgcgaaaaggtctttcgccccgatttgcgtgacaggtctgtggtggtcctgagtaacaacgatggttgtgtaattccgcgcagcgctgaagcaaaaaaactgggcataaaaatgggggtgccgtggtttcaactgaggtcggcgaaatttccggagccggttatcgcgttctccagtaattacgccctctacgcatcaatgtcgaacagggtcatggttcacctggaagagctggcgccacgcgttgagcagtactccattgacgagatgtttctggatattcgcggtatagacagttgcatcgatttcgaggatttcggccgacagctgcgtgagcacgttcgttccggcacagggctgaccatcggcgtcggaatgggaccgaccaaaacgctggctaaaagcgcgcaatgggcatcgaaagaatggtcacagttcggaggcgtgcttgccctgacgttacacaatcagaaacgaacggagaaactgctgtcactgcaaccggtggaggaaatctggggtgtgggccgcaggatctcaaagaagctgaacacaatggggatcaccacagcactgcagctggcccgcgcgaatccaacgttcatcaggaaaaactttaatgtggttctggagagaacggtccgggaactcaatggagaaagctgtatttccctggaggaagcaccgccccccaaacagcagatagtctgcagcagaagctttggagaacgagtcacgacttatgaagcgatgcggcaggcagtctgtcagcacgctgaacgtgccgccgaaaagctgcgtggggaacggcagttctgcaggcatattgccgtgtttgtgaaaacatcgccgttcgccgtaactgagccctactacggtaatctggccagtgaaaaactgctcatccccacgcaggatacacgggacatcattgccgctgccgtcagagctctggacaggatctgggtggatggtcaccgttacgcaaaggcaggctgtatgctgaacgatttcacgccaaccggggtatcgcagcttaatttgtttgatgaagtacagccgcgggaacggagcgagcagctgatgcaagtcctggatgggattaaccatccgggcaaggggaaaatatggttcgccggtcgggggattgcccccgagtggcagatgaaaagggaactactttcgccagcttatacgacacgttgggcagatattcctgcagcgaaattgacttga

SEQ ID NO: 66641 - protein, 424 aa, Salmonella typhimurium
MFALADVNSFYASCEKVFRPDLRDRSVVVLSNNDGCVIPRSAEAKKLGIKMGVPWFQLRSAKFPEPVIAFSSNYALYASMSNRVMVHLEELAPRVEQYSIDEMFLDIRGIDSCIDFEDFGRQLREHVRSGTGLTIGVGMGPTKTLAKSAQWASKEWSQFGGVLALTLHNQKRTEKLLSLQPVEEIWGVGRRISKKLNTMGITTALQLARANPTFIRKNFNVVLERTVRELNGESCISLEEAPPPKQQIVCSRSFGERVTTYEAMRQAVCQHAERAAEKLRGERQFCRHIAVFVKTSPFAVTEPYYGNLASEKLLIPTQDTRDIIAAAVRALDRIWVDGHRYAKAGCMLNDFTPTGVSQLNLFDEVQPRERSEQLMQVLDGINHPGKGKIWFAGRGIAPEWQMKRELLSPAYTTRWADIPAAKLT

SEQ ID NO: 66642 - DNA, 1269 bp, Escherichia coli; identical to SEQ ID NO: 66414
  CDS (1)..(1269): transl_table=11

SEQ ID NO: 66643 - protein, 422 aa, Escherichia coli [sequence omitted]

SEQ ID NO: 66644 - DNA, 1269 bp, Salmonella typhimurium
  CDS (1)..(1269): transl_table=11
atgttcgcgctctgcgatgttaatagcttttacgcctcctgcgaaacggtctttcgtcctgatttatgtggccgaccggtggtggtgttatcaaacaatgatggctgcgttatcgcgtgtagcgccgaggcgaaacagctcggtatcgcaccaggtgagccatacttcaaacagaaagaacgcttccggcgatccggtgttgtttgcttcagcagtaattacgagctttacgctgatatgtcgaaccgggtaatgaccacactcgaggagatggtgccgcgggtagaaatttacagcattgatgaggccttttgtgatctgacgggggtacgaaactgccgggatctgacagatttcgggcgcgagataagagcgacggtcctgaagcgcacgcacctgactgtcggtgtaggcattgcccagacgaaaacccttgccaagctggctaaccatgctgcgaaaaagtggcagcgccagaccgacggggtggttgacttgtcgaacatcgatcgccagcgtcggctgctggccctgatacccgtggaggatgtctggggtgtcggcaggcgcatcagtaagaagctcaatgccctgggcatcaagactgctctcgatctctctgaacaaagtacctggatcatcaggaaacacttcaatgtcgtgctggagcgtaccgtgagagagcttcgcggagagccatgtctggagctcgaagagtttgcgccggcaaagcaggaaatcgtttgtagtcgctctttcggcgagcgggtcacagactatgaggaaatgcgccaggctgtttacagctacgctgcgcgcgcggcagaaaaactccgcggcgagcaccagtactgccgtttcatttcaacattcgtcaaaacatcaccctttgccctgaacgagccctactacggtaacagcgccgcggtgacgcttctcacccccacgcaggattcacgtgacattatcaatgcggctgtgaaatgcctggataaaatatggcgcgacggccatcgctaccagaaagcgggggtgatgctgggtgacttcttcagtcagggcgtagcgcaactcaaccttttcgacgataacgcgccgcgcgccggtagtgcgaagttgatggaagtactggaccatcttaacgcaaaagacgggaaggggacgctgtacttcgccgggcaggggatgtcgcaacagtgggctatgaagcgagaaatgctttcgcctcggtacaccacaagatactctgatctactgcgtgttaagtaa

SEQ ID NO: 66645 - protein, 422 aa, Salmonella typhimurium
MFALCDVNSFYASCETVFRPDLCGRPVVVLSNNDGCVIACSAEAKQLGIAPGEPYFKQKERFRRSGVVCFSSNYELYADMSNRVMTTLEEMVPRVEIYSIDEAFCDLTGVRNCRDLTDFGREIRATVLKRTHLTVGVGIAQTKTLAKLANHAAKKWQRQTDGVVDLSNIDRQRRLLALIPVEDVWGVGRRISKKLNALGIKTALDLSEQSTWIIRKHFNVVLERTVRELRGEPCLELEEFAPAKQEIVCSRSFGERVTDYEEMRQAVYSYAARAAEKLRGEHQYCRFISTFVKTSPFALNEPYYGNSAAVTLLTPTQDSRDIINAAVKCLDKIWRDGHRYQKAGVMLGDFFSQGVAQLNLFDDNAPRAGSAKLMEVLDHLNAKDGKGTLYFAGQGMSQQWAMKREMLSPRYTTRYSDLLRVK

SEQ ID NO: 66646 - DNA, 24 bp, Artificial sequence
  Primer sequence
atgtttgccctctgtgatgtaaac

SEQ ID NO: 66647 - DNA, 26 bp, Artificial sequence
  Primer sequence
ttatttgaccctcagtaaatcagaac

SEQ ID NO: 66648 - protein, 458 aa, Artificial sequence
  Consensus
  Variant (3)..(3): Xaa in position 3 is any amino acid
  Variant (5)..(5): Xaa in position 5 is any amino acid
  Variant (7)..(7): Xaa in position 7 is any amino acid
  Variant (10)..(10): Xaa in position 10 is any amino acid
  Variant (14)..(15): Xaa in position 14 to 15 is any amino acid
  Variant (17)..(17): Xaa in position 17 is any amino acid
  Variant (19)..(19): Xaa in position 19 is any amino acid
  Variant (21)..(23): Xaa in position 21 to 23 is any amino acid
  Variant (25)..(26): Xaa in position 25 to 26 is any amino acid
  Variant (35)..(36): Xaa in position 35 to 36 is any amino acid
  Variant (38)..(41): Xaa in position 38 to 41 is any amino acid
  Variant (44)..(44): Xaa in position 44 is any amino acid
  Variant (45)..(70): Xaa in position 45 to 70 is any or no amino acid
  Variant (72)..(72): Xaa in position 72 is any amino acid
  Variant (74)..(74): Xaa in position 74 is any amino acid
  Variant (76)..(88): Xaa in position 76 to 88 is any amino acid
  Variant (89)..(89): Xaa in position 89 is any or no amino acid
  Variant (94)..(94): Xaa in position 94 is any amino acid
  Variant (97)..(99): Xaa in position 97 to 99 is any amino acid
  Variant (101)..(101): Xaa in position 101 is any amino acid
  Variant (103)..(103): Xaa in position 103 is any amino acid
  Variant (105)..(111): Xaa in position 105 to 111 is any amino acid
  Variant (113)..(116): Xaa in position 113 to 116 is any amino acid
  Variant (122)..(122): Xaa in position 122 is any amino acid
  Variant (124)..(137): Xaa in position 124 to 137 is any amino acid
  Variant (138)..(144): Xaa in position 138 to 144 is any or no amino acid
  Variant (146)..(158): Xaa in position 146 to 158 is any amino acid
  Variant (160)..(162): Xaa in position 160 to 162 is any amino acid
  Variant (169)..(169): Xaa in position 169 is any amino acid
  Variant (172)..(174): Xaa in position 172 to 174 is any amino acid
  Variant (176)..(185): Xaa in position 176 to 185 is any amino acid
  Variant (186)..(218): Xaa in position 186 to 218 is any or no amino acid
  Variant (221)..(221): Xaa in position 221 is any amino acid
  Variant (223)..(228): Xaa in position 223 to 228 is any amino acid
  Variant (230)..(233): Xaa in position 230 to 233 is any amino acid
  Variant (235)..(239): Xaa in position 235 to 239 is any amino acid
  Variant (241)..(248): Xaa in position 241 to 248 is any amino acid
  Variant (250)..(253): Xaa in position 250 to 253 is any amino acid
  Variant (255)..(257): Xaa in position 255 to 257 is any amino acid
  Variant (259)..(261): Xaa in position 259 to 261 is any amino acid
  Variant (264)..(264): Xaa in position 264 is any amino acid
  Variant (266)..(267): Xaa in position 266 to 267 is any amino acid
  Variant (269)..(279): Xaa in position 269 to 279 is any amino acid
  Variant (280)..(281): Xaa in position 280 to 281 is any or no amino acid
  Variant (283)..(284): Xaa in position 283 to 284 is any amino acid
  Variant (290)..(300): Xaa in position 290 to 300 is any amino acid
  Variant (302)..(308): Xaa in position 302 to 308 is any amino acid
  Variant (310)..(311): Xaa in position 310 to 311 is any amino acid
  Variant (315)..(347): Xaa in position 315 to 347 is any amino acid
  Variant (348)..(349): Xaa in position 348 to 349 is any or no amino acid
  Variant (351)..(360): Xaa in position 351 to 360 is any amino acid
  Variant (362)..(364): Xaa in position 362 to 364 is any amino acid
  Variant (365)..(371): Xaa in position 365 to 371 is any or no amino acid
  Variant (373)..(374): Xaa in position 373 to 374 is any amino acid
  Variant (376)..(376): Xaa in position 376 is any amino acid
  Variant (378)..(378): Xaa in position 378 is any amino acid
  Variant (381)..(393): Xaa in position 381 to 393 is any amino acid
  Variant (394)..(398): Xaa in position 394 to 398 is any or no amino acid
  Variant (400)..(407): Xaa in position 400 to 407 is any amino acid
  Variant (408)..(414): Xaa in position 408 to 414 is any or no amino acid
  Variant (417)..(419): Xaa in position 417 to 419 is any amino acid
  Variant (421)..(422): Xaa in position 421 to 422 is any amino acid
  Variant (424)..(424): Xaa in position 424 is any amino acid
  Variant (425)..(426): Xaa in position 425 to 426 is any or no amino acid
  Variant (428)..(440): Xaa in position 428 to 440 is any amino acid
  Variant (441)..(444): Xaa in position 441 to 444 is any or no amino acid
  Variant (446)..(452): Xaa in position 446 to 452 is any amino acid
  Variant (454)..(455): Xaa in position 454 to 455 is any amino acid
ALXDXNXFYXSCEXXFXPXLXXXPXXVLSNNDGCXXAXXXXAKXXXXXXXXXXXXXXXXXXXXXXXXXXXGXPXFXXXXXXXXXXXXXXSSNYXLYXXXSXRXMXXXXXXXPXXXXYSIDEXFXXXXXXXXXXXXXXXXXXXXXRXXXXXXXXXXXXXGXXXTKTLAKXANXXXKXXXXXXXXXXXXXXXXXXXXXXXXXXXXXXXXXXXXXXXXXXXWGXGXXXXXXLXXXXIXXXXXLXXXXXXXXRXXXXVXXXRXXXELXGXXCXXXXXXXXXXXXXIXXSRSFGXXXXXXXXXXXAXXXXXXXAXXKLRXXXXXXXXXXXXXXXXXXXXXXXXXXXXXXXXXXXPXXXXXXXXXXAXXXXXXXXXXGXXYXKXGVXXXXXXXXXXXXXXXXXXFXXXXXXXXXXXXXXXLMXXXDXXNXXXGXXXXXXXXXXXXXXXXXWXXXXXXXSXXYTT

SEQ ID NO: 66649 - protein, 42 aa, Artificial sequence
  Consensus
  Variant (3)..(3): Xaa in position 3 is any amino acid
  Variant (5)..(5): Xaa in position 5 is any amino acid
  Variant (7)..(7): Xaa in position 7 is any amino acid
  Variant (8)..(8): Xaa in position 8 is Phe or Met
  Variant (10)..(10): Xaa in position 10 is Ala, Cys, Ser or Val
  Variant (12)..(12): Xaa in position 12 is Ala, Cys or Val
  Variant (14)..(15): Xaa in position 14 to 15 is any amino acid
  Variant (16)..(16): Xaa in position 16 is Phe, Ile, Leu or Met
  Variant (17)..(17): Xaa in position 17 is any amino acid
  Variant (19)..(23): Xaa in position 19 to 23 is any amino acid
  Variant (24)..(24): Xaa in position 24 is Ala, Pro or Ser
  Variant (25)..(25): Xaa in position 25 is Ile, Leu or Val
  Variant (26)..(26): Xaa in position 26 is Ala, Ile, Leu or Val
  Variant (27)..(27): Xaa in position 27 is Ile or Val
  Variant (28)..(28): Xaa in position 28 is any amino acid
  Variant (29)..(29): Xaa in position 29 is Gly, Ser or Thr
  Variant (30)..(30): Xaa in position 30 is Asn or Ser
  Variant (34)..(38): Xaa in position 34 to 38 is any amino acid
  Variant (39)..(39): Xaa in position 39 is Cys, Asn or Ser
  Variant (40)..(41): Xaa in position 40 to 41 is any amino acid
  Variant (42)..(42): Xaa in position 42 is Ala, Ser or Val
ALXDXNXXYXSXEXXXXPXXXXXXXXXXXXNDGXXXXXXXXX

SEQ ID NO: 66650 - protein, 14 aa, Artificial sequence
  Consensus
  Variant (5)..(5): Xaa in position 5 is Ala, Glu, Ser or Thr
  Variant (8)..(8): Xaa in position 8 is any amino acid
  Variant (9)..(9): Xaa in position 9 is Asp, Glu, Gly, Asn or Ser
  Variant (10)..(10): Xaa in position 10 is Phe, Ile, Leu, Met or Val
  Variant (12)..(13): Xaa in position 12 to 13 is any amino acid
  Variant (14)..(14): Xaa in position 14 is Phe, Ile, Leu, Met or Val
SSNYXLYXXXSXXX

SEQ ID NO: 66651 - protein, 7 aa, Artificial sequence
  Consensus
  Variant (6)..(6): Xaa in position 6 is any amino acid
YSIDEXF

SEQ ID NO: 66652 - protein, 17 aa, Artificial sequence
  Consensus
  Variant (2)..(2): Xaa in position 2 is Ala, Ile, Leu, Pro or Val
  Variant (3)..(3): Xaa in position 3 is Ala, Gly, Ser or Thr
  Variant (4)..(4): Xaa in position 4 is any amino acid
  Variant (6)..(7): Xaa in position 6 to 7 is any or no amino acid
  Variant (11)..(11): Xaa in position 11 is any amino acid
  Variant (12)..(12): Xaa in position 12 is Ala, Cys, Gly or Ser
  Variant (13)..(13): Xaa in position 13 is Ala, Asn, Gln or Thr
  Variant (14)..(15): Xaa in position 14 to 15 is any amino acid
  Variant (16)..(16): Xaa in position 16 is Ala, Cys, Ser or Thr
GXXXTXXLAKXXXXXXK

SEQ ID NO: 66653 - protein, 54 aa, Artificial sequence
  Consensus
  Variant (2)..(2): Xaa in position 2 is any or no amino acid
  Variant (4)..(4): Xaa in position 4 is any amino acid
  Variant (6)..(7): Xaa in position 6 to 7 is any amino acid
  Variant (9)..(22): Xaa in position 9 to 22 is any amino acid
  Variant (23)..(23): Xaa in position 23 is any or no amino acid
  Variant (25)..(25): Xaa in position 25 is any or no amino acid
  Variant (27)..(27): Xaa in position 27 is any amino acid
  Variant (28)..(28): Xaa in position 28 is Phe, Met or Val
  Variant (29)..(29): Xaa in position 29 is Ala, Gly or Ser
  Variant (30)..(37): Xaa in position 30 to 37 is any amino acid
  Variant (38)..(38): Xaa in position 38 is Ile, Leu or Met
  Variant (39)..(40): Xaa in position 39 to 40 is any amino acid
  Variant (41)..(41): Xaa in position 41 is Ala, Ser or Thr
  Variant (42)..(42): Xaa in position 42 is Ile, Leu, Met or Val
  Variant (43)..(44): Xaa in position 43 to 44 is any amino acid
  Variant (45)..(45): Xaa in position 45 is Phe, His or Tyr
  Variant (46)..(49): Xaa in position 46 to 49 is any amino acid
  Variant (50)..(50): Xaa in position 50 is Ala, Cys, Gly, Ser, Thr or Val
  Variant (51)..(53): Xaa in position 51 to 53 is any amino acid
EXLXGXXCXXXXXXXXXXXXXXXSXRXXXXXXXXXXXXXXXXXXXXXXXXXXXR

SEQ ID NO: 66654 - protein, 22 aa, Artificial sequence
  Consensus
  Variant (2)..(14): Xaa in position 2 to 14 is any amino acid
  Variant (15)..(15): Xaa in position 15 is any or no amino acid
  Variant (17)..(17): Xaa in position 17 is any amino acid
  Variant (18)..(19): Xaa in position 18 to 19 is any or no amino acid
  Variant (21)..(21): Xaa in position 21 is any amino acid
  Variant (22)..(22): Xaa in position 22 is Glu or Gly
AXXXXXXXXXXXXXXYXXXKXX

SEQ ID NO: 66655 - DNA, 1392 bp, Escherichia coli K12; identical to SEQ ID NO: 28298
  CDS (1)..(1392): transl_table=11

SEQ ID NO: 66656 - protein, 463 aa, Escherichia coli K12; identical to SEQ ID NO: 28299

SEQ ID NO: 66657 - DNA, 1428 bp, Aquifex aeolicus VF5; identical to SEQ ID NO: 28300
  CDS (1)..(1428): transl_table=11

SEQ ID NO: 66658 - protein, 475 aa, Aquifex aeolicus VF5; identical to SEQ ID NO: 28301

SEQ ID NO: 66659 - DNA, 1212 bp, Pseudomonas aeruginosa PAO1; identical to SEQ ID NO: 28302
  CDS (1)..(1212): transl_table=11

SEQ ID NO: 66660 - protein, 403 aa, Pseudomonas aeruginosa PAO1; identical to SEQ ID NO: 28303

SEQ ID NO: 66661 - DNA, 1407 bp, Pseudomonas aeruginosa PAO1; identical to SEQ ID NO: 28304
  CDS (1)..(1407): transl_table=11

SEQ ID NO: 66662 - protein, 468 aa, Pseudomonas aeruginosa PAO1; identical to SEQ ID NO: 28305

SEQ ID NO: 66663 - DNA, 1296 bp, Pseudomonas aeruginosa PAO1; identical to SEQ ID NO: 28306
  CDS (1)..(1296): transl_table=11

SEQ ID NO: 66664 - protein, 431 aa, Pseudomonas aeruginosa PAO1; identical to SEQ ID NO: 28307

SEQ ID NO: 66665 - DNA, 1554 bp, Mycobacterium leprae TN; identical to SEQ ID NO: 28308
  CDS (1)..(1554): transl_table=11

SEQ ID NO: 66666 - protein, 517 aa, Mycobacterium leprae TN; identical to SEQ ID NO: 28309

SEQ ID NO: 66667 - DNA, 1389 bp, Escherichia coli O157:H7; identical to SEQ ID NO: 28310
  CDS (1)..(1389): transl_table=11

SEQ ID NO: 66668 - protein, 462 aa, Escherichia coli O157:H7; identical to SEQ ID NO: 28311

SEQ ID NO: 66669 - DNA, 1410 bp, Mycobacterium tuberculosis CDC1551; identical to SEQ ID NO: 28312
  CDS (1)..(1410): transl_table=11

SEQ ID NO: 66670 - protein, 469 aa, Mycobacterium tuberculosis CDC1551; identical to SEQ ID NO: 28313

SEQ ID NO: 66671 - DNA, 1392 bp, Mycobacterium tuberculosis CDC1551; identical to SEQ ID NO: 28314
  CDS (1)..(1392): transl_table=11

SEQ ID NO: 66672 - protein, 463 aa, Mycobacterium tuberculosis CDC1551; identical to SEQ ID NO: 28315

SEQ ID NO: 66673 - DNA, 1188 bp, Mycobacterium tuberculosis CDC1551; identical to SEQ ID NO: 28316
  CDS (1)..(1188): transl_table=11

SEQ ID NO: 66674 - protein, 395 aa, Mycobacterium tuberculosis CDC1551; identical to SEQ ID NO: 28317

SEQ ID NO: 66675 - DNA, 1548 bp, Mycobacterium tuberculosis CDC1551; identical to SEQ ID NO: 28318
  CDS (1)..(1548): transl_table=11

SEQ ID NO: 66676 - protein, 515 aa, Mycobacterium tuberculosis CDC1551; identical to SEQ ID NO: 28319

SEQ ID NO: 66677 - DNA, 1170 bp, Staphylococcus aureus subsp. aureus Mu50; identical to SEQ ID NO: 28320
  CDS (1)..(1170): transl_table=11

SEQ ID NO: 66678 - protein, 389 aa, Staphylococcus aureus subsp. aureus Mu50; identical to SEQ ID NO: 28321

SEQ ID NO: 66679 - DNA, 1422 bp, Caulobacter crescentus CB15; identical to SEQ ID NO: 28322
  CDS (1)..(1422): transl_table=11

SEQ ID NO: 66680 - protein, 473 aa, Caulobacter crescentus CB15; identical to SEQ ID NO: 28323

SEQ ID NO: 66681 - DNA, 1275 bp, Sinorhizobium meliloti 1021; identical to SEQ ID NO: 28324
  CDS (1)..(1275): transl_table=11

SEQ ID NO: 66682 - protein, 424 aa, Sinorhizobium meliloti 1021; identical to SEQ ID NO: 28325

SEQ ID NO: 66683 - DNA, 1398 bp, Salmonella typhimurium LT2; identical to SEQ ID NO: 28326
  CDS (1)..(1398): transl_table=11

SEQ ID NO: 66684 - protein, 465 aa, Salmonella typhimurium LT2; identical to SEQ ID NO: 28327

SEQ ID NO: 66685 - DNA, 1314 bp, Ralstonia solanacearum GMI1000; identical to SEQ ID NO: 28328
  CDS (1)..(1314): transl_table=11

SEQ ID NO: 66686 - protein, 437 aa, Ralstonia solanacearum GMI1000; identical to SEQ ID NO: 28329

SEQ ID NO: 66687 - DNA, 1386 bp, Ralstonia solanacearum GMI1000; identical to SEQ ID NO: 28330
  CDS (1)..(1386): transl_table=11

SEQ ID NO: 66688 - protein, 461 aa, Ralstonia solanacearum GMI1000; identical to SEQ ID NO: 28331

SEQ ID NO: 66689 - DNA, 2856 bp, Brucella melitensis 16M; identical to SEQ ID NO: 28332
  CDS (1)..(2856): transl_table=11

SEQ ID NO: 66690 - protein, 951 aa, Brucella melitensis 16M; identical to SEQ ID NO: 28333

SEQ ID NO: 66691 - DNA, 1293 bp, Clostridium perfringens str. 13; identical to SEQ ID NO: 28334
  CDS (1)..(1293): transl_table=11

SEQ ID NO: 66692 - protein, 430 aa, Clostridium perfringens str. 13; identical to SEQ ID NO: 28335

SEQ ID NO: 66693 - DNA, 1338 bp, Corynebacterium glutamicum ATCC 13032; identical to SEQ ID NO: 28336
  CDS (1)..(1338): transl_table=11

SEQ ID NO: 66694 - protein, 445 aa, Corynebacterium glutamicum ATCC 13032; identical to SEQ ID NO: 28337

SEQ ID NO: 66695 - DNA, 1239 bp, Streptomyces coelicolor A3(2); identical to SEQ ID NO: 28338
  CDS (1)..(1239): transl_table=11

SEQ ID NO: 66696 - protein, 412 aa, Streptomyces coelicolor A3(2); identical to SEQ ID NO: 28339

SEQ ID NO: 66697 - DNA, 1359 bp, Streptomyces coelicolor A3(2); identical to SEQ ID NO: 28340
  CDS (1)..(1359): transl_table=11

SEQ ID NO: 66698 - protein, 452 aa, Streptomyces coelicolor A3(2); identical to SEQ ID NO: 28341

SEQ ID NO: 66699 - DNA, 1236 bp, Xanthomonas campestris pv. campestris str. ATCC 33913; identical to SEQ ID NO: 28342
  CDS (1)..(1236): transl_table=11

SEQ ID NO: 66700 - protein, 411 aa, Xanthomonas campestris pv. campestris str. ATCC 33913; identical to SEQ ID NO: 28343

SEQ ID NO: 66701 - DNA, 2688 bp, Brucella suis 1330; identical to SEQ ID NO: 28344
  CDS (1)..(2688): transl_table=11

SEQ ID NO: 66702 - protein, 895 aa, Brucella suis 1330; identical to SEQ ID NO: 28345

SEQ ID NO: 66703 - DNA, 1389 bp, Shigella flexneri 2a str. 301; identical to SEQ ID NO: 28346
  CDS (1)..(1389): transl_table=11

SEQ ID NO: 66704 - protein, 462 aa, Shigella flexneri 2a str. 301; identical to SEQ ID NO: 28347

SEQ ID NO: 66705 - DNA, 1434 bp, Corynebacterium efficiens YS-314; identical to SEQ ID NO: 28348
  CDS (1)..(1434): transl_table=11

SEQ ID NO: 66706 - protein, 477 aa, Corynebacterium efficiens YS-314; identical to SEQ ID NO: 28349

SEQ ID NO: 66707 - DNA, 1302 bp, Corynebacterium efficiens YS-314; identical to SEQ ID NO: 28350
  CDS (1)..(1302): transl_table=11

SEQ ID NO: 66708 - protein, 433 aa, Corynebacterium efficiens YS-314; identical to SEQ ID NO: 28351

SEQ ID NO: 66709 - DNA, 1236 bp, Pseudomonas putida KT2440; identical to SEQ ID NO: 28352
  CDS (1)..(1236): transl_table=11

SEQ ID NO: 66710 - protein, 411 aa, Pseudomonas putida KT2440; identical to SEQ ID NO: 28353

SEQ ID NO: 66711 - DNA, 1164 bp, Staphylococcus epidermidis ATCC 12228; identical to SEQ ID NO: 28354
  CDS (1)..(1164): transl_table=11

SEQ ID NO: 66712 - protein, 387 aa, Staphylococcus epidermidis ATCC 12228; identical to SEQ ID NO: 28355

SEQ ID NO: 66713 - DNA, 1380 bp, Bradyrhizobium japonicum USDA 110; identical to SEQ ID NO: 28356
  CDS (1)..(1380): transl_table=11

SEQ ID NO: 66714 - protein, 459 aa, Bradyrhizobium japonicum USDA 110; identical to SEQ ID NO: 28357

SEQ ID NO: 66715 - DNA, 1191 bp, Lactobacillus plantarum WCFS1; identical to SEQ ID NO: 28358
  CDS (1)..(1191): transl_table=11

SEQ ID NO: 66716 - protein, 396 aa, Lactobacillus plantarum WCFS1; identical to SEQ ID NO: 28359

SEQ ID NO: 66717 - DNA, 1212 bp, Pseudomonas syringae pv. tomato str. DC3000; identical to SEQ ID NO: 28360
  CDS (1)..(1212): transl_table=11

SEQ ID NO: 66718 - protein, 403 aa, Pseudomonas syringae pv. tomato str. DC3000; identical to SEQ ID NO: 28361

SEQ ID NO: 66719 - DNA, 1389 bp, Salmonella enterica subsp. enterica serovar Typhi Ty2; identical to SEQ ID NO: 28362
  CDS (1)..(1389): transl_table=11

SEQ ID NO: 66720 - protein, 462 aa, Salmonella enterica subsp. enterica serovar Typhi Ty2; identical to SEQ ID NO: 28363

SEQ ID NO: 66721 - DNA, 1392 bp, Streptomyces avermitilis MA-4680; identical to SEQ ID NO: 28364
  CDS (1)..(1392): transl_table=11

SEQ ID NO: 66722 - protein, 463 aa, Streptomyces avermitilis MA-4680; identical to SEQ ID NO: 28365

SEQ ID NO: 66723 - DNA, 1170 bp, Bacillus cereus ATCC 14579; identical to SEQ ID NO: 28366
  CDS (1)..(1170): transl_table=11

SEQ ID NO: 66724 - protein, 389 aa, Bacillus cereus ATCC 14579; identical to SEQ ID NO: 28367

SEQ ID NO: 66725 - DNA, 1389 bp, Shigella flexneri 2a str. 2457T; identical to SEQ ID NO: 28368
  CDS (1)..(1389): transl_table=11

SEQ ID NO: 66726 - protein, 462 aa, Shigella flexneri 2a str. 2457T; identical to SEQ ID NO: 28369

SEQ ID NO: 66727 - DNA, 1203 bp, Chromobacterium violaceum ATCC 12472; identical to SEQ ID NO: 28370
  CDS (1)..(1203): transl_table=11

SEQ ID NO: 66728 - protein, 400 aa, Chromobacterium violaceum ATCC 12472; identical to SEQ ID NO: 28371

SEQ ID NO: 66729 - DNA, 1380 bp, Chromobacterium violaceum ATCC 12472; identical to SEQ ID NO: 28372
  CDS (1)..(1380): transl_table=11

SEQ ID NO: 66730 - protein, 459 aa, Chromobacterium violaceum ATCC 12472; identical to SEQ ID NO: 28373

SEQ ID NO: 66731 - DNA, 1284 bp, Chromobacterium violaceum ATCC 12472; identical to SEQ ID NO: 28374
  CDS (1)..(1284): transl_table=11

SEQ ID NO: 66732 - protein, 427 aa, Chromobacterium violaceum ATCC 12472; identical to SEQ ID NO: 28375

SEQ ID NO: 66733 - DNA, 1380 bp, Chromobacterium violaceum ATCC 12472; identical to SEQ ID NO: 28376
  CDS (1)..(1380): transl_table=11

SEQ ID NO: 66734 - protein, 459 aa, Chromobacterium violaceum ATCC 12472; identical to SEQ ID NO: 28377

SEQ ID NO: 66735 - DNA, 1332 bp, Corynebacterium diphtheriae NCTC 13129; identical to SEQ ID NO: 28378
  CDS (1)..(1332): transl_table=11

SEQ ID NO: 66736 - protein, 443 aa, Corynebacterium diphtheriae NCTC 13129; identical to SEQ ID NO: 28379

SEQ ID NO: 66737 - DNA, 1299 bp, Corynebacterium diphtheriae NCTC 13129; identical to SEQ ID NO: 28380
  CDS (1)..(1299): transl_table=11

SEQ ID NO: 66738 - protein, 432 aa, Corynebacterium diphtheriae NCTC 13129; identical to SEQ ID NO: 28381

SEQ ID NO: 66739 - DNA, 1281 bp, Cupriavidus necator; identical to SEQ ID NO: 28382
  CDS (1)..(1281): transl_table=11

SEQ ID NO: 66740 - protein, 426 aa, Cupriavidus necator; identical to SEQ ID NO: 28383

SEQ ID NO: 66741 - DNA, 1395 bp, Cupriavidus necator; identical to SEQ ID NO: 28384
  CDS (1)..(1395): transl_table=11

SEQ ID NO: 66742 - protein, 464 aa, Cupriavidus necator; identical to SEQ ID NO: 28385

SEQ ID NO: 66743 - DNA, 1458 bp, Mycobacterium avium subsp. paratuberculosis K-10; identical to SEQ ID NO: 28386
  CDS (1)..(1458): transl_table=11

SEQ ID NO: 66744 - protein, 485 aa, Mycobacterium avium subsp. paratuberculosis K-10; identical to SEQ ID NO: 28387

SEQ ID NO: 66745 - DNA, 1392 bp, Mycobacterium avium subsp. paratuberculosis K-10; identical to SEQ ID NO: 28388
  CDS (1)..(1392): transl_table=11

SEQ ID NO: 66746 - protein, 463 aa, Mycobacterium avium subsp. paratuberculosis K-10; identical to SEQ ID NO: 28389

SEQ ID NO: 66747 - DNA, 1392 bp, Mycobacterium avium subsp. paratuberculosis K-10; identical to SEQ ID NO: 28390
  CDS (1)..(1392): transl_table=11

SEQ ID NO: 66748 - protein, 463 aa, Mycobacterium avium subsp. paratuberculosis K-10; identical to SEQ ID NO: 28391

SEQ ID NO: 66749 - DNA, 1170 bp, Bacillus anthracis str. Sterne; identical to SEQ ID NO: 28392
  CDS (1)..(1170): transl_table=11

SEQ ID NO: 66750 - protein, 389 aa, Bacillus anthracis str. Sterne; identical to SEQ ID NO: 28393

SEQ ID NO: 66751 - DNA, 1170 bp, Bacillus thuringiensis serovar konkukian str. 97-27; identical to SEQ ID NO: 28394
  CDS (1)..(1170): transl_table=11

SEQ ID NO: 66752 - protein, 389 aa, Bacillus thuringiensis serovar konkukian str. 97-27; identical to SEQ ID NO: 28395

SEQ ID NO: 66753 - DNA, 1170 bp, Staphylococcus aureus subsp. aureus MRSA252; identical to SEQ ID NO: 28396
  CDS (1)..(1170): transl_table=11

SEQ ID NO: 66754 - protein, 389 aa, Staphylococcus aureus subsp. aureus MRSA252; identical to SEQ ID NO: 28397

SEQ ID NO: 66755 - DNA, 1170 bp, Staphylococcus aureus subsp. aureus MSSA476; identical to SEQ ID NO: 28398
  CDS (1)..(1170): transl_table=11

SEQ ID NO: 66756 - protein, 389 aa, Staphylococcus aureus subsp. aureus MSSA476; identical to SEQ ID NO: 28399

SEQ ID NO: 66757 - DNA, 1389 bp, Erwinia carotovora subsp. atroseptica SCRI1043; identical to SEQ ID NO: 28400
  CDS (1)..(1389): transl_table=11

SEQ ID NO: 66758 - protein, 462 aa, Erwinia carotovora subsp. atroseptica SCRI1043; identical to SEQ ID NO: 28401

SEQ ID NO: 66759 - DNA, 1317 bp, Propionibacterium acnes KPA171202; identical to SEQ ID NO: 28402
  CDS (1)..(1317): transl_table=11

SEQ ID NO: 66760 - protein, 438 aa, Propionibacterium acnes KPA171202; identical to SEQ ID NO: 28403

SEQ ID NO: 66761 - DNA, 1206 bp, Bacillus licheniformis ATCC 14580; identical to SEQ ID NO: 28404
  CDS (1)..(1206): transl_table=11

SEQ ID NO: 66762 - protein, 401 aa, Bacillus licheniformis ATCC 14580; identical to SEQ ID NO: 28405

SEQ ID NO: 66763 - DNA, 1185 bp, Bacillus licheniformis ATCC 14580; identical to SEQ ID NO: 28406
  CDS (1)..(1185): transl_table=11

SEQ ID NO: 66764 - protein, 394 aa, Bacillus licheniformis ATCC 14580; identical to SEQ ID NO: 28407

SEQ ID NO: 66765 - DNA, 1230 bp, Burkholderia mallei ATCC 23344; identical to SEQ ID NO: 28408
  CDS (1)..(1230): transl_table=11

SEQ ID NO: 66766 - protein, 409 aa, Burkholderia mallei ATCC 23344; identical to SEQ ID NO: 28409

SEQ ID NO: 66767 - DNA, 1404 bp, Burkholderia mallei ATCC 23344; identical to SEQ ID NO: 28410
  CDS (1)..(1404): transl_table=11

SEQ ID NO: 66768 - protein, 467 aa, Burkholderia mallei ATCC 23344; identical to SEQ ID NO: 28411

SEQ ID NO: 66769 - DNA, 1281 bp, Burkholderia pseudomallei K96243; identical to SEQ ID NO: 28412
  CDS (1)..(1281): transl_table=11

SEQ ID NO: 66770 - protein, 426 aa, Burkholderia pseudomallei K96243; identical to SEQ ID NO: 28413

SEQ ID NO: 66771 - DNA, 1386 bp, Burkholderia pseudomallei K96243; identical to SEQ ID NO: 28414
  CDS (1)..(1386): transl_table=11

SEQ ID NO: 66772 - protein, 461 aa, Burkholderia pseudomallei K96243; identical to SEQ ID NO: 28415

SEQ ID NO: 66773 - DNA, 1458 bp, Burkholderia pseudomallei K96243; identical to SEQ ID NO: 28416
  CDS (1)..(1458): transl_table=11

SEQ ID NO: 66774 - protein, 485 aa, Burkholderia pseudomallei K96243; identical to SEQ ID NO: 28417

SEQ ID NO: 66775 - DNA, 1275 bp, Burkholderia pseudomallei K96243; identical to SEQ ID NO: 28418
  CDS (1)..(1275): transl_table=11

SEQ ID NO: 66776 - protein, 424 aa, Burkholderia pseudomallei K96243; identical to SEQ ID NO: 28419

SEQ ID NO: 66777 - DNA, 1275 bp, Methylococcus capsulatus str. Bath; identical to SEQ ID NO: 28420
  CDS (1)..(1275): transl_table=11

SEQ ID NO: 66778 - protein, 424 aa, Methylococcus capsulatus str. Bath; identical to SEQ ID NO: 28421

SEQ ID NO: 66779 - DNA, 1470 bp, Nocardia farcinica IFM 10152; identical to SEQ ID NO: 28422
  CDS (1)..(1470): transl_table=11

SEQ ID NO: 66780 - protein, 489 aa, Nocardia farcinica IFM 10152; identical to SEQ ID NO: 28423

SEQ ID NO: 66781 - DNA, 1485 bp, Nocardia farcinica IFM 10152; identical to SEQ ID NO: 28424
  CDS (1)..(1485): transl_table=11

SEQ ID NO: 66782 - protein, 494 aa, Nocardia farcinica IFM 10152; identical to SEQ ID NO: 28425

SEQ ID NO: 66783 - DNA, 1323 bp, Haloarcula marismortui ATCC 43049; identical to SEQ ID NO: 28426
  CDS (1)..(1323): transl_table=11

SEQ ID NO: 66784 - protein, 440 aa, Haloarcula marismortui ATCC 43049; identical to SEQ ID NO: 28427

SEQ ID NO: 66785 - DNA, 1200 bp, Geobacillus kaustophilus HTA426; identical to SEQ ID NO: 28428
  CDS (1)..(1200): transl_table=11

SEQ ID NO: 66786 - protein, 399 aa, Geobacillus kaustophilus HTA426; identical to SEQ ID NO: 28429

SEQ ID NO: 66787 - DNA, 1203 bp, Geobacillus kaustophilus HTA426; identical to SEQ ID NO: 28430
  CDS (1)..(1203): transl_table=11

SEQ ID NO: 66788 - protein, 400 aa, Geobacillus kaustophilus HTA426; identical to SEQ ID NO: 28431

SEQ ID NO: 66789 - DNA, 1389 bp, Salmonella enterica subsp. enterica serovar Paratyphi A str. ATCC; identical to SEQ ID NO: 28432
  CDS (1)..(1389): transl_table=11

SEQ ID NO: 66790 - protein, 462 aa, Salmonella enterica subsp. enterica serovar Paratyphi A str. ATCC; identical to SEQ ID NO: 28433

SEQ ID NO: 66791 - DNA, 1332 bp, Idiomarina loihiensis L2TR; identical to SEQ ID NO: 28434
  CDS (1)..(1332): transl_table=11

SEQ ID NO: 66792 - protein, 443 aa, Idiomarina loihiensis L2TR; identical to SEQ ID NO: 28435

SEQ ID NO: 66793 - DNA, 1692 bp, Azoarcus sp. EbN1; identical to SEQ ID NO: 28436
  CDS (1)..(1692): transl_table=11

SEQ ID NO: 66794 - protein, 563 aa, Azoarcus sp. EbN1; identical to SEQ ID NO: 28437

SEQ ID NO: 66795 - DNA, 1377 bp, Azoarcus sp. EbN1; identical to SEQ ID NO: 28438
  CDS (1)..(1377): transl_table=11

SEQ ID NO: 66796 - protein, 458 aa, Azoarcus sp. EbN1; identical to SEQ ID NO: 28439

SEQ ID NO: 66797 - DNA, 1509 bp, Bacillus clausii KSM-K16; identical to SEQ ID NO: 28440
  CDS (1)..(1509): transl_table=11

SEQ ID NO: 66798 - protein, 502 aa, Bacillus clausii KSM-K16; identical to SEQ ID NO: 28441

SEQ ID NO: 66799 - DNA, 1206 bp, Bacillus clausii KSM-K16; identical to SEQ ID NO: 28442
  CDS (1)..(1206): transl_table=11

SEQ ID NO: 66800 - protein, 401 aa, Bacillus clausii KSM-K16; identical to SEQ ID NO: 28443

SEQ ID NO: 66801 - DNA, 1164 bp, Staphylococcus epidermidis RP62A; identical to SEQ ID NO: 28444
  CDS (1)..(1164): transl_table=11

SEQ ID NO: 66802 - protein, 387 aa, Staphylococcus epidermidis RP62A; identical to SEQ ID NO: 28445

SEQ ID NO: 66803 - DNA, 1389 bp, Salmonella enterica subsp. enterica serovar Choleraesuis str; identical to SEQ ID NO: 28446
  CDS (1)..(1389): transl_table=11

SEQ ID NO: 66804 - protein, 462 aa, Salmonella enterica subsp. enterica serovar Choleraesuis str; identical to SEQ ID NO: 28447

SEQ ID NO: 66805 - DNA, 1212 bp, Pseudomonas syringae pv. syringae B728a; identical to SEQ ID NO: 28448
  CDS (1)..(1212): transl_table=11

SEQ ID NO: 66806 - protein, 403 aa, Pseudomonas syringae pv. syringae B728a; identical to SEQ ID NO: 28449

SEQ ID NO: 66807 - DNA, 1158 bp, Staphylococcus haemolyticus JCSC1435; identical to SEQ ID NO: 28450
  CDS (1)..(1158): transl_table=11

SEQ ID NO: 66808 - protein, 385 aa, Staphylococcus haemolyticus JCSC1435; identical to SEQ ID NO: 28451

SEQ ID NO: 66809 - DNA, 1380 bp, Psychrobacter arcticum 273-4; identical to SEQ ID NO: 28452
  CDS (1)..(1380): transl_table=11

SEQ ID NO: 66810 - protein, 459 aa, Psychrobacter arcticum 273-4; identical to SEQ ID NO: 28453

SEQ ID NO: 66811 - DNA, 1212 bp, Pseudomonas syringae pv. phaseolicola 1448A; identical to SEQ ID NO: 28454
  CDS (1)..(1212): transl_table=11

SEQ ID NO: 66812 - protein, 403 aa, Pseudomonas syringae pv. phaseolicola 1448A; identical to SEQ ID NO: 28455

SEQ ID NO: 66813 - DNA, 1215 bp, Dechloromonas aromatica RCB; identical to SEQ ID NO: 28456
  CDS (1)..(1215): transl_table=11

SEQ ID NO: 66814 - protein, 404 aa, Dechloromonas aromatica RCB; identical to SEQ ID NO: 28457

SEQ ID NO: 66815 - DNA, 1290 bp, Ralstonia eutropha JMP134; identical to SEQ ID NO: 28458
  CDS (1)..(1290): transl_table=11

SEQ ID NO: 66816 - protein, 429 aa, Ralstonia eutropha JMP134; identical to SEQ ID NO: 28459

SEQ ID NO: 66817 - DNA, 1386 bp, Ralstonia eutropha JMP134; identical to SEQ ID NO: 28460
  CDS (1)..(1386): transl_table=11

SEQ ID NO: 66818 - protein, 461 aa, Ralstonia eutropha JMP134; identical to SEQ ID NO: 28461

SEQ ID NO: 66819 - DNA, 1362 bp, Shigella sonnei Ss046; identical to SEQ ID NO: 28462
  CDS (1)..(1362): transl_table=11

SEQ ID NO: 66820 - protein, 453 aa, Shigella sonnei Ss046; identical to SEQ ID NO: 28463

SEQ ID NO: 66821 - DNA, 1269 bp, Thiobacillus denitrificans ATCC 25259; identical to SEQ ID NO: 28464
  CDS (1)..(1269): transl_table=11

SEQ ID NO: 66822 - protein, 422 aa, Thiobacillus denitrificans ATCC 25259; identical to SEQ ID NO: 28465

SEQ ID NO: 66823 - DNA, 1677 bp, Thiobacillus denitrificans ATCC 25259; identical to SEQ ID NO: 28466
  CDS (1)..(1677): transl_table=11

SEQ ID NO: 66824 - protein, 558 aa, Thiobacillus denitrificans ATCC 25259; identical to SEQ ID NO: 28467

SEQ ID NO: 66825 - DNA, 1263 bp, Magnetospirillum magnetotacticum MS-1; identical to SEQ ID NO: 28468
  CDS (1)..(1263)

SEQ ID NO: 66826 - protein, 420 aa, Magnetospirillum magnetotacticum MS-1; identical to SEQ ID NO: 28469

SEQ ID NO: 66827 - DNA, 1407 bp, Pseudomonas aeruginosa UCBPP-PA14; identical to SEQ ID NO: 28470
  CDS (1)..(1407)

SEQ ID NO: 66828 - protein, 468 aa, Pseudomonas aeruginosa UCBPP-PA14; identical to SEQ ID NO: 28471

SEQ ID NO: 66829 - DNA, 1326 bp, Burkholderia cepacia R18194; identical to SEQ ID NO: 28472
  CDS (1)..(1326)

SEQ ID NO: 66830 - protein, 441 aa, Burkholderia cepacia R18194; identical to SEQ ID NO: 28473

SEQ ID NO: 66831 - DNA, 1326 bp, Burkholderia cenocepacia AU 1054; identical to SEQ ID NO: 28474
  CDS (1)..(1326): transl_table=11

SEQ ID NO: 66832 - protein, 441 aa, Burkholderia cenocepacia AU 1054; identical to SEQ ID NO: 28475

SEQ ID NO: 66833 - DNA, 1407 bp, Burkholderia pseudomallei S13; identical to SEQ ID NO: 28476
  CDS (1)..(1407)

SEQ ID NO: 66834 - protein, 468 aa, Burkholderia pseudomallei S13; identical to SEQ ID NO: 28477

SEQ ID NO: 66835 - DNA, 1212 bp, Polaromonas sp. JS666; identical to SEQ ID NO: 28478
  CDS (1)..(1212): transl_table=11

SEQ ID NO: 66836 - protein, 403 aa, Polaromonas sp. JS666; identical to SEQ ID NO: 28479

SEQ ID NO: 66837 - DNA, 1320 bp, Geobacter metallireducens GS-15; identical to SEQ ID NO: 28480
  CDS (1)..(1320): transl_table=11

SEQ ID NO: 66838 - protein, 439 aa, Geobacter metallireducens GS-15; identical to SEQ ID NO: 28481

SEQ ID NO: 66839 - DNA, 1230 bp, Nitrobacter hamburgensis X14; identical to SEQ ID NO: 28482
  CDS (1)..(1230): transl_table=11

SEQ ID NO: 66840 - protein, 409 aa, Nitrobacter hamburgensis X14; identical to SEQ ID NO: 28483

SEQ ID NO: 66841 - DNA, 1209 bp, Paracoccus denitrificans PD1222; identical to SEQ ID NO: 28484
  CDS (1)..(1209): transl_table=11

SEQ ID NO: 66842 - protein, 402 aa, Paracoccus denitrificans PD1222; identical to SEQ ID NO: 28485

SEQ ID NO: 66843 - DNA, 1401 bp, Pseudomonas aeruginosa; identical to SEQ ID NO: 28486
  CDS (1)..(1401): transl_table=11

SEQ ID NO: 66844 - protein, 466 aa, Pseudomonas aeruginosa; identical to SEQ ID NO: 28487

SEQ ID NO: 66845 - DNA, 1416 bp, Mycobacterium fortuitum; identical to SEQ ID NO: 28488
  CDS (1)..(1416): transl_table=11

SEQ ID NO: 66846 - protein, 471 aa, Mycobacterium fortuitum; identical to SEQ ID NO: 28489

SEQ ID NO: 66847 - DNA, 1527 bp, Populus tremula x Populus tremuloides; identical to SEQ ID NO: 28490
  CDS (1)..(1527)

SEQ ID NO: 66848 - protein, 508 aa, Populus tremula x Populus tremuloides; identical to SEQ ID NO: 28491

SEQ ID NO: 66849 - DNA, 1602 bp, Pseudomonas sp; identical to SEQ ID NO: 28492
  CDS (1)..(1602): transl_table=11

SEQ ID NO: 66850 - protein, 533 aa, Pseudomonas sp; identical to SEQ ID NO: 28493

SEQ ID NO: 66851 - DNA, 1302 bp, Halomonas maura; identical to SEQ ID NO: 28494
  CDS (1)..(1302): transl_table=11

SEQ ID NO: 66852 - protein, 433 aa, Halomonas maura; identical to SEQ ID NO: 28495

SEQ ID NO: 66853 - DNA, 1254 bp, Rhizobium sp; identical to SEQ ID NO: 28496
  CDS (1)..(1254): transl_table=11

SEQ ID NO: 66854 - protein, 417 aa, Rhizobium sp; identical to SEQ ID NO: 28497

SEQ ID NO: 66855 - DNA, 1311 bp, Halobacterium mediterranei; identical to SEQ ID NO: 28498
  CDS (1)..(1311): transl_table=11

SEQ ID NO: 66856 - protein, 436 aa, Halobacterium mediterranei; identical to SEQ ID NO: 28499

SEQ ID NO: 66857 - DNA, 1650 bp, Physcomitrella patens; identical to SEQ ID NO: 28500
  CDS (1)..(1650)

SEQ ID NO: 66858 - protein, 549 aa, Physcomitrella patens; identical to SEQ ID NO: 28501

SEQ ID NO: 66859 - DNA, 1353 bp, Corynebacterium glutamicum; identical to SEQ ID NO: 28502
  CDS (1)..(1353): transl_table=11

SEQ ID NO: 66860 - protein, 450 aa, Corynebacterium glutamicum; identical to SEQ ID NO: 28503

SEQ ID NO: 66861 - DNA, 1284 bp, Paracoccus halodenitrificans; identical to SEQ ID NO: 28504
  CDS (1)..(1284): transl_table=11

SEQ ID NO: 66862 - protein, 427 aa, Paracoccus halodenitrificans; identical to SEQ ID NO: 28505

SEQ ID NO: 66863 - DNA, 1593 bp, Paracoccus halodenitrificans; identical to SEQ ID NO: 28506
  CDS (1)..(1593): transl_table=11

SEQ ID NO: 66864 - protein, 530 aa, Paracoccus halodenitrificans; identical to SEQ ID NO: 28507

SEQ ID NO: 66865 - DNA, 2718 bp, Paracoccus pantotrophus; identical to SEQ ID NO: 28508
  CDS (1)..(2718): transl_table=11

SEQ ID NO: 66866 - protein, 905 aa, Paracoccus pantotrophus; identical to SEQ ID NO: 28509

SEQ ID NO: 66867 - DNA, 1266 bp, Pseudomonas fluorescens; identical to SEQ ID NO: 28510
  CDS (1)..(1266): transl_table=11

SEQ ID NO: 66868 - protein, 421 aa, Pseudomonas fluorescens; identical to SEQ ID NO: 28511

SEQ ID NO: 66869 - DNA, 1332 bp, Thermus thermophilus; identical to SEQ ID NO: 28512
  CDS (1)..(1332): transl_table=11

SEQ ID NO: 66870 - protein, 443 aa, Thermus thermophilus; identical to SEQ ID NO: 28513

SEQ ID NO: 66871 - DNA, 1308 bp, Thermus thermophilus; identical to SEQ ID NO: 28514
  CDS (1)..(1308): transl_table=11

SEQ ID NO: 66872 - protein, 435 aa, Thermus thermophilus; identical to SEQ ID NO: 28515

SEQ ID NO: 66873 - DNA, 1449 bp, Cylindrotheca fusiformis; identical to SEQ ID NO: 28516
  CDS (1)..(1449)

SEQ ID NO: 66874 - protein, 482 aa, Cylindrotheca fusiformis; identical to SEQ ID NO: 28517

SEQ ID NO: 66875 - DNA, 1449 bp, Cylindrotheca fusiformis; identical to SEQ ID NO: 28518
  CDS (1)..(1449)

SEQ ID NO: 66876 - protein, 482 aa, Cylindrotheca fusiformis; identical to SEQ ID NO: 28519

SEQ ID NO: 66877 - DNA, 1449 bp, Cylindrotheca fusiformis; identical to SEQ ID NO: 28520
  CDS (1)..(1449)

SEQ ID NO: 66878 - protein, 482 aa, Cylindrotheca fusiformis; identical to SEQ ID NO: 28521

SEQ ID NO: 66879 - DNA, 1212 bp, Pseudomonas aeruginosa; identical to SEQ ID NO: 28522
  CDS (1)..(1212): transl_table=11

SEQ ID NO: 66880 - protein, 403 aa, Pseudomonas aeruginosa; identical to SEQ ID NO: 28523

SEQ ID NO: 66881 - DNA, 1389 bp, Escherichia coli; identical to SEQ ID NO: 28524
  CDS (1)..(1389): transl_table=11

SEQ ID NO: 66882 - protein, 462 aa, Escherichia coli; identical to SEQ ID NO: 28525

SEQ ID NO: 66883 - DNA, 1389 bp, Salmonella typhimurium; identical to SEQ ID NO: 28526
  CDS (1)..(1389): transl_table=11

SEQ ID NO: 66884 - protein, 462 aa, Salmonella typhimurium; identical to SEQ ID NO: 28527

SEQ ID NO: 66885 - DNA, 1266 bp, Bacillus subtilis; identical to SEQ ID NO: 28528
  CDS (1)..(1266): transl_table=11

SEQ ID NO: 66886 - protein, 421 aa, Bacillus subtilis; identical to SEQ ID NO: 28529

SEQ ID NO: 66887 - DNA, 21 bp, Artificial sequence
  Primer sequence
atgagtcactcatccgccccc

SEQ ID NO: 66888 - DNA, 27 bp, Artificial sequence
  Primer sequence
ttattttttagaatgccgaccatatac

SEQ ID NO: 66889 - protein, 512 aa, Artificial sequence; identical to SEQ ID NO: 28532
  Consensus
  Variant (2)..(9): Xaa in position 2 to 9 is any amino acid
  Variant (11)..(11): Xaa in position 11 is any amino acid
  Variant (13)..(13): Xaa in position 13 is any amino acid
  Variant (16)..(16): Xaa in position 16 is any amino acid
  Variant (18)..(22): Xaa in position 18 to 22 is any amino acid
  Variant (23)..(24): Xaa in position 23 to 24 is any or no amino acid
  Variant (26)..(38): Xaa in position 26 to 38 is any amino acid
  Variant (39)..(49): Xaa in position 39 to 49 is any or no amino acid
  Variant (51)..(51): Xaa in position 51 is any amino acid
  Variant (53)..(54): Xaa in position 53 to 54 is any amino acid
  Variant (55)..(55): Xaa in position 55 is any or no amino acid
  Variant (57)..(57): Xaa in position 57 is any amino acid
  Variant (60)..(60): Xaa in position 60 is any amino acid
  Variant (64)..(72): Xaa in position 64 to 72 is any amino acid
  Variant (74)..(74): Xaa in position 74 is any amino acid
  Variant (76)..(86): Xaa in position 76 to 86 is any amino acid
  Variant (88)..(101): Xaa in position 88 to 101 is any amino acid
  Variant (102)..(110): Xaa in position 102 to 110 is any or no amino acid
  Variant (112)..(112): Xaa in position 112 is any amino acid
  Variant (113)..(113): Xaa in position 113 is any or no amino acid
  Variant (115)..(117): Xaa in position 115 to 117 is any amino acid
  Variant (119)..(119): Xaa in position 119 is any amino acid
  Variant (123)..(123): Xaa in position 123 is any amino acid
  Variant (126)..(127): Xaa in position 126 to 127 is any amino acid
  Variant (129)..(133): Xaa in position 129 to 133 is any amino acid
  Variant (137)..(140): Xaa in position 137 to 140 is any amino acid
  Variant (142)..(142): Xaa in position 142 is any amino acid
  Variant (144)..(144): Xaa in position 144 is any amino acid
  Variant (147)..(147): Xaa in position 147 is any amino acid
  Variant (150)..(150): Xaa in position 150 is any amino acid
  Variant (151)..(151): Xaa in position 151 is any or no amino acid
  Variant (153)..(153): Xaa in position 153 is any amino acid
  Variant (155)..(156): Xaa in position 155 to 156 is any amino acid
  Variant (158)..(162): Xaa in position 158 to 162 is any amino acid
  Variant (164)..(164): Xaa in position 164 is any or no amino acid
  Variant (166)..(181): Xaa in position 166 to 181 is any amino acid
  Variant (182)..(210): Xaa in position 182 to 210 is any or no amino acid
  Variant (212)..(212): Xaa in position 212 is any amino acid
  Variant (214)..(215): Xaa in position 214 to 215 is any amino acid
  Variant (217)..(243): Xaa in position 217 to 243 is any amino acid
  Variant (244)..(314): Xaa in position 244 to 314 is any or no amino acid
  Variant (316)..(320): Xaa in position 316 to 320 is any amino acid
  Variant (322)..(324): Xaa in position 322 to 324 is any amino acid
  Variant (327)..(327): Xaa in position 327 is any amino acid
  Variant (331)..(342): Xaa in position 331 to 342 is any amino acid
  Variant (344)..(357): Xaa in position 344 to 357 is any amino acid
  Variant (358)..(377): Xaa in position 358 to 377 is any or no amino acid
  Variant (379)..(381): Xaa in position 379 to 381 is any amino acid
  Variant (383)..(384): Xaa in position 383 to 384 is any amino acid
  Variant (387)..(387): Xaa in position 387 is any amino acid
  Variant (392)..(392): Xaa in position 392 is any amino acid
  Variant (395)..(432): Xaa in position 395 to 432 is any amino acid
  Variant (433)..(455): Xaa in position 433 to 455 is any or no amino acid
  Variant (457)..(457): Xaa in position 457 is any amino acid
  Variant (459)..(459): Xaa in position 459 is any amino acid
  Variant (462)..(462): Xaa in position 462 is any amino acid
  Variant (464)..(465): Xaa in position 464 to 465 is any amino acid
  Variant (467)..(469): Xaa in position 467 to 469 is any amino acid
  Variant (471)..(474): Xaa in position 471 to 474 is any amino acid
  Variant (475)..(497): Xaa in position 475 to 497 is any or no amino acid
  Variant (499)..(501): Xaa in position 499 to 501 is any amino acid
  Variant (503)..(507): Xaa in position 503 to 507 is any amino acid
  Variant (510)..(510): Xaa in position 510 is any amino acid

SEQ ID NO: 66890 - protein, 19 aa, Artificial sequence
  Consensus
  Variant (2)..(10): Xaa in position 2 to 10 is any amino acid
  Variant (11)..(11): Xaa in position 11 is any or no amino acid
  Variant (13)..(13): Xaa in position 13 is any amino acid
  Variant (14)..(14): Xaa in position 14 is Ala, Ile or Val
  Variant (16)..(16): Xaa in position 16 is any amino acid
  Variant (17)..(17): Xaa in position 17 is Ile, Leu, Met or Val
  Variant (18)..(18): Xaa in position 18 is any amino acid
  Variant (19)..(19): Xaa in position 19 is Ala, Gly or Ser
LXXXXXXXXXXFXXWXXXX

SEQ ID NO: 66891 - protein, 45 aa, Artificial sequence; identical to SEQ ID NO: 28534
  Consensus
  Variant (2)..(3): Xaa in position 2 to 3 is any amino acid
  Variant (4)..(4): Xaa in position 4 is any or no amino acid
  Variant (6)..(6): Xaa in position 6 is Ala, Gly or Thr
  Variant (7)..(7): Xaa in position 7 is any amino acid
  Variant (9)..(9): Xaa in position 9 is Ala, Gly or Ser
  Variant (10)..(12): Xaa in position 10 to 12 is any amino acid
  Variant (13)..(13): Xaa in position 13 is Ala, Gly, Pro, Ser or Thr
  Variant (14)..(15): Xaa in position 14 to 15 is any amino acid
  Variant (16)..(16): Xaa in position 16 is Ala, Gly, Asn, Pro or Ser
  Variant (17)..(18): Xaa in position 17 to 18 is any amino acid
  Variant (19)..(19): Xaa in position 19 is Phe, His or Tyr
  Variant (20)..(24): Xaa in position 20 to 24 is any amino acid
  Variant (26)..(26): Xaa in position 26 is any amino acid
  Variant (27)..(27): Xaa in position 27 is Ala, Ser or Val
  Variant (28)..(28): Xaa in position 28 is any amino acid
  Variant (30)..(31): Xaa in position 30 to 31 is any amino acid
  Variant (32)..(33): Xaa in position 32 to 33 is any or no amino acid
  Variant (35)..(38): Xaa in position 35 to 38 is any amino acid
  Variant (39)..(39): Xaa in position 39 is Ala, Gly or Val
  Variant (40)..(44): Xaa in position 40 to 44 is any amino acid
  Variant (45)..(45): Xaa in position 45 is Phe, Ile, Leu or Val

SEQ ID NO: 66892 - protein, 24 aa, Artificial sequence
  Consensus
  Variant (2)..(3): Xaa in position 2 to 3 is any amino acid
  Variant (4)..(4): Xaa in position 4 is any or no amino acid
  Variant (6)..(6): Xaa in position 6 is any or no amino acid
  Variant (8)..(8): Xaa in position 8 is Ala, Gly or Ser
  Variant (9)..(9): Xaa in position 9 is Phe or Tyr
  Variant (10)..(10): Xaa in position 10 is Ala, Ile or Val
  Variant (11)..(11): Xaa in position 11 is Ala or Gly
  Variant (12)..(12): Xaa in position 12 is any amino acid
  Variant (13)..(13): Xaa in position 13 is Ala, Gly, Ser or Thr
  Variant (14)..(15): Xaa in position 14 to 15 is any amino acid
  Variant (16)..(16): Xaa in position 16 is Phe, Leu, Met or Val
  Variant (17)..(17): Xaa in position 17 is Ala, Gly, Pro, Ser or Thr
  Variant (18)..(23): Xaa in position 18 to 23 is any amino acid
  Variant (24)..(24): Xaa in position 24 is Phe or Tyr
YXXXFXGXXXXXXXXXXXXXXXXX

SEQ ID NO: 66893 - protein, 33 aa, Artificial sequence; identical to SEQ ID NO: 28536
  Consensus
  Variant (2)..(19): Xaa in position 2 to 19 is any amino acid
  Variant (20)..(22): Xaa in position 20 to 22 is any or no amino acid
  Variant (24)..(24): Xaa in position 24 is Phe, Ile, Leu, Met or Val
  Variant (25)..(25): Xaa in position 25 is any amino acid
  Variant (26)..(26): Xaa in position 26 is Ala, Gly or Ser
  Variant (27)..(28): Xaa in position 27 to 28 is any amino acid
  Variant (30)..(30): Xaa in position 30 is Ala, Cys, Gly, Asn, Ser or Thr
  Variant (31)..(31): Xaa in position 31 is any amino acid
  Variant (33)..(33): Xaa in position 33 is Ala, Gly, Pro or Ser

SEQ ID NO: 66894 - DNA, 291 bp, Escherichia coli K12; identical to SEQ ID NO: 18608
  CDS (1)..(291): transl_table=11

SEQ ID NO: 66895 - protein, 96 aa, Escherichia coli K12; identical to SEQ ID NO: 18609

SEQ ID NO: 66896 - DNA, 216 bp, Bacteriophage 933W; identical to SEQ ID NO: 18610
  CDS (1)..(216): transl_table=11

SEQ ID NO: 66897 - protein, 71 aa, Bacteriophage 933W; identical to SEQ ID NO: 18611

SEQ ID NO: 66898 - DNA, 291 bp, Bacteriophage VT2-Sa; identical to SEQ ID NO: 18612
  CDS (1)..(291): transl_table=11

SEQ ID NO: 66899 - protein, 96 aa, Bacteriophage VT2-Sa; identical to SEQ ID NO: 18613

SEQ ID NO: 66900 - DNA, 315 bp, Escherichia coli O157:H7 EDL933; identical to SEQ ID NO: 18614
  CDS (1)..(315): transl_table=11

SEQ ID NO: 66901 - protein, 104 aa, Escherichia coli O157:H7 EDL933; identical to SEQ ID NO: 18615

SEQ ID NO: 66902 - DNA, 315 bp, Escherichia coli O157:H7 EDL933; identical to SEQ ID NO: 18616
  CDS (1)..(315): transl_table=11

SEQ ID NO: 66903 - protein, 104 aa, Escherichia coli O157:H7 EDL933; identical to SEQ ID NO: 18617

SEQ ID NO: 66904 - DNA, 273 bp, Escherichia coli O157:H7 EDL933; identical to SEQ ID NO: 18618
  CDS (1)..(273): transl_table=11

SEQ ID NO: 66905 - protein, 90 aa, Escherichia coli O157:H7 EDL933; identical to SEQ ID NO: 18619

SEQ ID NO: 66906 - DNA, 216 bp, Escherichia coli O157:H7; identical to SEQ ID NO: 18620
  CDS (1)..(216): transl_table=11

SEQ ID NO: 66907 - protein, 71 aa, Escherichia coli O157:H7; identical to SEQ ID NO: 18621

SEQ ID NO: 66908 - DNA, 207 bp, Escherichia coli O157:H7; identical to SEQ ID NO: 18622
  CDS (1)..(207): transl_table=11

SEQ ID NO: 66909 - protein, 68 aa, Escherichia coli O157:H7; identical to SEQ ID NO: 18623

SEQ ID NO: 66910 - DNA, 216 bp, Escherichia coli O157:H7; identical to SEQ ID NO: 18624
  CDS (1)..(216): transl_table=11

SEQ ID NO: 66911 - protein, 71 aa, Escherichia coli O157:H7; identical to SEQ ID NO: 18625

SEQ ID NO: 66912 - DNA, 216 bp, Escherichia coli O157:H7; identical to SEQ ID NO: 18626
  CDS (1)..(216): transl_table=11

SEQ ID NO: 66913 - protein, 71 aa, Escherichia coli O157:H7; identical to SEQ ID NO: 18627

SEQ ID NO: 66914 - DNA, 216 bp, Escherichia coli O157:H7; identical to SEQ ID NO: 18628
  CDS (1)..(216): transl_table=11

SEQ ID NO: 66915 - protein, 71 aa, Escherichia coli O157:H7; identical to SEQ ID NO: 18629

SEQ ID NO: 66916 - DNA, 207 bp, Escherichia coli O157:H7; identical to SEQ ID NO: 18630
  CDS (1)..(207): transl_table=11

SEQ ID NO: 66917 - protein, 68 aa, Escherichia coli O157:H7; identical to SEQ ID NO: 18631

SEQ ID NO: 66918 - DNA, 207 bp, Escherichia coli O157:H7; identical to SEQ ID NO: 18632
  CDS (1)..(207): transl_table=11

SEQ ID NO: 66919 - protein, 68 aa, Escherichia coli O157:H7; identical to SEQ ID NO: 18633

SEQ ID NO: 66920 - DNA, 216 bp, Shigella flexneri 2a str. 301; identical to SEQ ID NO: 18634
  CDS (1)..(216): transl_table=11

SEQ ID NO: 66921 - protein, 71 aa, Shigella flexneri 2a str. 301; identical to SEQ ID NO: 18635

SEQ ID NO: 66922 - DNA, 216 bp, Shigella flexneri 2a str. 301; identical to SEQ ID NO: 18636
  CDS (1)..(216): transl_table=11

SEQ ID NO: 66923 - protein, 71 aa, Shigella flexneri 2a str. 301; identical to SEQ ID NO: 18637

SEQ ID NO: 66924 - DNA, 321 bp, Escherichia coli CFT073; identical to SEQ ID NO: 18638
  CDS (1)..(321): transl_table=11

SEQ ID NO: 66925 - protein, 106 aa, Escherichia coli CFT073; identical to SEQ ID NO: 18639

SEQ ID NO: 66926 - DNA, 216 bp, Escherichia coli CFT073; identical to SEQ ID NO: 18640
  CDS (1)..(216): transl_table=11

SEQ ID NO: 66927 - protein, 71 aa, Escherichia coli CFT073; identical to SEQ ID NO: 18641

SEQ ID NO: 66928 - DNA, 216 bp, Shigella flexneri 2a str. 2457T; identical to SEQ ID NO: 18642
  CDS (1)..(216): transl_table=11

SEQ ID NO: 66929 - protein, 71 aa, Shigella flexneri 2a str. 2457T; identical to SEQ ID NO: 18643

SEQ ID NO: 66930 - DNA, 180 bp, Shigella flexneri 2a str. 2457T; identical to SEQ ID NO: 18644
  CDS (1)..(180): transl_table=11

SEQ ID NO: 66931 - protein, 59 aa, Shigella flexneri 2a str. 2457T; identical to SEQ ID NO: 18645

SEQ ID NO: 66932 - DNA, 213 bp, Yersinia pseudotuberculosis IP 32953; identical to SEQ ID NO: 18646
  CDS (1)..(213): transl_table=11

SEQ ID NO: 66933 - protein, 70 aa, Yersinia pseudotuberculosis IP 32953; identical to SEQ ID NO: 18647

SEQ ID NO: 66934 - DNA, 216 bp, Shigella sonnei Ss046; identical to SEQ ID NO: 18648
  CDS (1)..(216): transl_table=11

SEQ ID NO: 66935 - protein, 71 aa, Shigella sonnei Ss046; identical to SEQ ID NO: 18649

SEQ ID NO: 66936 - DNA, 216 bp, Shigella sonnei Ss046; identical to SEQ ID NO: 18650
  CDS (1)..(216): transl_table=11

SEQ ID NO: 66937 - protein, 71 aa, Shigella sonnei Ss046; identical to SEQ ID NO: 18651

SEQ ID NO: 66938 - DNA, 207 bp, Bacteriophage H19B; identical to SEQ ID NO: 18652
  CDS (1)..(207): transl_table=11

SEQ ID NO: 66939 - protein, 68 aa, Bacteriophage H19B; identical to SEQ ID NO: 18653

SEQ ID NO: 66940 - DNA, 291 bp, Stx1; identical to SEQ ID NO: 18654
  CDS (1)..(291): transl_table=11

SEQ ID NO: 66941 - protein, 96 aa, Stx1; identical to SEQ ID NO: 18655

SEQ ID NO: 66942 - DNA, 150 bp, Escherichia coli; identical to SEQ ID NO: 18656
  CDS (1)..(150): transl_table=11

SEQ ID NO: 66943 - protein, 49 aa, Escherichia coli; identical to SEQ ID NO: 18657

SEQ ID NO: 66944 - DNA, 216 bp, Escherichia coli; identical to SEQ ID NO: 18658
  CDS (1)..(216): transl_table=11

SEQ ID NO: 66945 - protein, 71 aa, Escherichia coli; identical to SEQ ID NO: 18659

SEQ ID NO: 66946 - DNA, 216 bp, Shigella dysenteriae; identical to SEQ ID NO: 18660
  CDS (1)..(216): transl_table=11

SEQ ID NO: 66947 - protein, 71 aa, Shigella dysenteriae; identical to SEQ ID NO: 18661

SEQ ID NO: 66948 - DNA, 216 bp, Escherichia coli O6; identical to SEQ ID NO: 18662
  CDS (1)..(216): transl_table=11

SEQ ID NO: 66949 - protein, 71 aa, Escherichia coli O6; identical to SEQ ID NO: 18663

SEQ ID NO: 66950 - DNA, 216 bp, Bacteriophage P21; identical to SEQ ID NO: 18664
  CDS (1)..(216): transl_table=11

SEQ ID NO: 66951 - protein, 71 aa, Bacteriophage P21; identical to SEQ ID NO: 18665

SEQ ID NO: 66952 - DNA, 24 bp, Artificial sequence
  Primer sequence
atgctgtcaaaactaccccgtaga

SEQ ID NO: 66953 - DNA, 23 bp, Artificial sequence
  Primer sequence
ttactctcctctcgcagccttac

SEQ ID NO: 66954 - protein, 71 aa, Artificial sequence; identical to SEQ ID NO: 18668
  Consensus
  Variant (2)..(3): Xaa in position 2 to 3 is any amino acid
  Variant (14)..(14): Xaa in position 14 is any amino acid
  Variant (18)..(20): Xaa in position 18 to 20 is any amino acid
  Variant (24)..(24): Xaa in position 24 is any amino acid
  Variant (27)..(27): Xaa in position 27 is any amino acid
  Variant (30)..(30): Xaa in position 30 is any amino acid
  Variant (37)..(37): Xaa in position 37 is any amino acid
  Variant (47)..(47): Xaa in position 47 is any amino acid
  Variant (49)..(49): Xaa in position 49 is any amino acid
  Variant (67)..(67): Xaa in position 67 is any amino acid

SEQ ID NO: 66955 - protein, 10 aa, Artificial sequence
  Consensus
  Variant (2)..(2): Xaa in position 2 is Asp or Glu
  Variant (5)..(5): Xaa in position 5 is Ser or Thr
  Variant (7)..(7): Xaa in position 7 is Gly or Ser
  Variant (8)..(8): Xaa in position 8 is Ile or Val
  Variant (9)..(9): Xaa in position 9 is Ala or Ser
MXKIXTXXXY

SEQ ID NO: 66956 - protein, 6 aa, Artificial sequence
  Consensus
  Variant (2)..(2): Xaa in position 2 is Phe or Leu
  Variant (5)..(5): Xaa in position 5 is any amino acid
WXLQXL

SEQ ID NO: 66957 - protein, 14 aa, Artificial sequence
  Consensus
  Variant (5)..(5): Xaa in position 5 is any or no amino acid
  Variant (7)..(7): Xaa in position 7 is any or no amino acid
PSQWXAXIGVLGSL

SEQ ID NO: 66958 - DNA, 627 bp, Escherichia coli K12; identical to SEQ ID NO: 20534
  CDS (1)..(627): transl_table=11

SEQ ID NO: 66959 - protein, 208 aa, Escherichia coli K12; identical to SEQ ID NO: 20535

SEQ ID NO: 66960 - DNA, 519 bp, Archaeoglobus fulgidus DSM 4304; identical to SEQ ID NO: 20536
  CDS (1)..(519): transl_table=11

SEQ ID NO: 66961 - protein, 172 aa, Archaeoglobus fulgidus DSM 4304; identical to SEQ ID NO: 20537

SEQ ID NO: 66962 - DNA, 561 bp, Pyrococcus abyssi GE5; identical to SEQ ID NO: 20538
  CDS (1)..(561): transl_table=11

SEQ ID NO: 66963 - protein, 186 aa, Pyrococcus abyssi GE5; identical to SEQ ID NO: 20539

SEQ ID NO: 66964 - DNA, 621 bp, Vibrio cholerae O1 biovar eltor str. N16961; identical to SEQ ID NO: 20540
  CDS (1)..(621): transl_table=11

SEQ ID NO: 66965 - protein, 206 aa, Vibrio cholerae O1 biovar eltor str. N16961; identical to SEQ ID NO: 20541

SEQ ID NO: 66966 - DNA, 588 bp, Methanothermobacter thermautotrophicus str. Delta H; identical to SEQ ID NO: 20542
  CDS (1)..(588): transl_table=11

SEQ ID NO: 66967 - protein, 195 aa, Methanothermobacter thermautotrophicus str. Delta H; identical to SEQ ID NO: 20543

SEQ ID NO: 66968 - DNA, 678 bp, Halobacterium sp. NRC-1; identical to SEQ ID NO: 20544
  CDS (1)..(678): transl_table=11

SEQ ID NO: 66969 - protein, 225 aa, Halobacterium sp. NRC-1; identical to SEQ ID NO: 20545

SEQ ID NO: 66970 - DNA, 612 bp, Sinorhizobium meliloti 1021; identical to SEQ ID NO: 20546
  CDS (1)..(612): transl_table=11

SEQ ID NO: 66971 - protein, 203 aa, Sinorhizobium meliloti 1021; identical to SEQ ID NO: 20547

SEQ ID NO: 66972 - DNA, 588 bp, Clostridium perfringens str. 13; identical to SEQ ID NO: 20548
  CDS (1)..(588): transl_table=11

SEQ ID NO: 66973 - protein, 195 aa, Clostridium perfringens str. 13; identical to SEQ ID NO: 20549

SEQ ID NO: 66974 - DNA, 564 bp, Pyrococcus furiosus DSM 3638; identical to SEQ ID NO: 20550
  CDS (1)..(564): transl_table=11

SEQ ID NO: 66975 - protein, 187 aa, Pyrococcus furiosus DSM 3638; identical to SEQ ID NO: 20551

SEQ ID NO: 66976 - DNA, 585 bp, Methanosarcina acetivorans C2A; identical to SEQ ID NO: 20552
  CDS (1)..(585): transl_table=11

SEQ ID NO: 66977 - protein, 194 aa, Methanosarcina acetivorans C2A; identical to SEQ ID NO: 20553

SEQ ID NO: 66978 - DNA, 618 bp, Streptomyces coelicolor A3(2); identical to SEQ ID NO: 20554
  CDS (1)..(618): transl_table=11

SEQ ID NO: 66979 - protein, 205 aa, Streptomyces coelicolor A3(2); identical to SEQ ID NO: 20555

SEQ ID NO: 66980 - DNA, 612 bp, Vibrio parahaemolyticus RIMD 2210633; identical to SEQ ID NO: 20556
  CDS (1)..(612): transl_table=11

SEQ ID NO: 66981 - protein, 203 aa, Vibrio parahaemolyticus RIMD 2210633; identical to SEQ ID NO: 20557

SEQ ID NO: 66982 - DNA, 678 bp, Vibrio vulnificus YJ016; identical to SEQ ID NO: 20558
  CDS (1)..(678): transl_table=11

SEQ ID NO: 66983 - protein, 225 aa, Vibrio vulnificus YJ016; identical to SEQ ID NO: 20559

SEQ ID NO: 66984 - DNA, 774 bp, Thermus thermophilus HB27; identical to SEQ ID NO: 20560
  CDS (1)..(774): transl_table=11

SEQ ID NO: 66985 - protein, 257 aa, Thermus thermophilus HB27; identical to SEQ ID NO: 20561

SEQ ID NO: 66986 - DNA, 618 bp, Desulfotalea psychrophila LSv54; identical to SEQ ID NO: 20562
  CDS (1)..(618): transl_table=11

SEQ ID NO: 66987 - protein, 205 aa, Desulfotalea psychrophila LSv54; identical to SEQ ID NO: 20563

SEQ ID NO: 66988 - DNA, 597 bp, Legionella pneumophila subsp. pneumophila str. Philadelphia 1; identical to SEQ ID NO: 20564
  CDS (1)..(597): transl_table=11

SEQ ID NO: 66989 - protein, 198 aa, Legionella pneumophila subsp. pneumophila str. Philadelphia 1; identical to SEQ ID NO: 20565

SEQ ID NO: 66990 - DNA, 588 bp, Legionella pneumophila subsp. pneumophila str. Philadelphia 1; identical to SEQ ID NO: 20566
  CDS (1)..(588): transl_table=11

SEQ ID NO: 66991 - protein, 195 aa, Legionella pneumophila subsp. pneumophila str. Philadelphia 1; identical to SEQ ID NO: 20567

SEQ ID NO: 66992 - DNA, 657 bp, Nocardia farcinica IFM 10152; identical to SEQ ID NO: 20568
  CDS (1)..(657): transl_table=11

SEQ ID NO: 66993 - protein, 218 aa, Nocardia farcinica IFM 10152; identical to SEQ ID NO: 20569

SEQ ID NO: 66994 - DNA, 597 bp, Legionella pneumophila str. Paris; identical to SEQ ID NO: 20570
  CDS (1)..(597): transl_table=11

SEQ ID NO: 66995 - protein, 198 aa, Legionella pneumophila str. Paris; identical to SEQ ID NO: 20571

SEQ ID NO: 66996 - DNA, 597 bp, Legionella pneumophila str. Lens; identical to SEQ ID NO: 20572
  CDS (1)..(597): transl_table=11

SEQ ID NO: 66997 - protein, 198 aa, Legionella pneumophila str. Lens; identical to SEQ ID NO: 20573

SEQ ID NO: 66998 - DNA, 630 bp, Photobacterium profundum SS9; identical to SEQ ID NO: 20574
  CDS (1)..(630): transl_table=11

SEQ ID NO: 66999 - protein, 209 aa, Photobacterium profundum SS9; identical to SEQ ID NO: 20575

SEQ ID NO: 67000 - DNA, 774 bp, Thermus thermophilus HB8; identical to SEQ ID NO: 20576
  CDS (1)..(774): transl_table=11

SEQ ID NO: 67001 - protein, 257 aa, Thermus thermophilus HB8; identical to SEQ ID NO: 20577

SEQ ID NO: 67002 - DNA, 639 bp, Idiomarina loihiensis L2TR; identical to SEQ ID NO: 20578
  CDS (1)..(639): transl_table=11

SEQ ID NO: 67003 - protein, 212 aa, Idiomarina loihiensis L2TR; identical to SEQ ID NO: 20579

SEQ ID NO: 67004 - DNA, 600 bp, Francisella tularensis subsp. tularensis SCHU S4; identical to SEQ ID NO: 20580
  CDS (1)..(600): transl_table=11

SEQ ID NO: 67005 - protein, 199 aa, Francisella tularensis subsp. tularensis SCHU S4; identical to SEQ ID NO: 20581

SEQ ID NO: 67006 - DNA, 783 bp, Ehrlichia ruminantium str. Welgevonden; identical to SEQ ID NO: 20582
  CDS (1)..(783): transl_table=11

SEQ ID NO: 67007 - protein, 260 aa, Ehrlichia ruminantium str. Welgevonden; identical to SEQ ID NO: 20583

SEQ ID NO: 67008 - DNA, 570 bp, Thermococcus kodakarensis KOD1; identical to SEQ ID NO: 20584
  CDS (1)..(570): transl_table=11

SEQ ID NO: 67009 - protein, 189 aa, Thermococcus kodakarensis KOD1; identical to SEQ ID NO: 20585

SEQ ID NO: 67010 - DNA, 783 bp, Ehrlichia ruminantium str. Gardel; identical to SEQ ID NO: 20586
  CDS (1)..(783): transl_table=11

SEQ ID NO: 67011 - protein, 260 aa, Ehrlichia ruminantium str. Gardel; identical to SEQ ID NO: 20587

SEQ ID NO: 67012 - DNA, 609 bp, Vibrio fischeri ES114; identical to SEQ ID NO: 20588
  CDS (1)..(609): transl_table=11

SEQ ID NO: 67013 - protein, 202 aa, Vibrio fischeri ES114; identical to SEQ ID NO: 20589

SEQ ID NO: 67014 - DNA, 666 bp, Corynebacterium jeikeium K411; identical to SEQ ID NO: 20590
  CDS (1)..(666): transl_table=11

SEQ ID NO: 67015 - protein, 221 aa, Corynebacterium jeikeium K411; identical to SEQ ID NO: 20591

SEQ ID NO: 67016 - DNA, 678 bp, Thermobifida fusca YX; identical to SEQ ID NO: 20592
  CDS (1)..(678): transl_table=11

SEQ ID NO: 67017 - protein, 225 aa, Thermobifida fusca YX; identical to SEQ ID NO: 20593

SEQ ID NO: 67018 - DNA, 780 bp, Ehrlichia canis str. Jake; identical to SEQ ID NO: 20594
  CDS (1)..(780): transl_table=11

SEQ ID NO: 67019 - protein, 259 aa, Ehrlichia canis str. Jake; identical to SEQ ID NO: 20595

SEQ ID NO: 67020 - DNA, 534 bp, Methanosarcina barkeri str. fusaro; identical to SEQ ID NO: 20596
  CDS (1)..(534): transl_table=11

SEQ ID NO: 67021 - protein, 177 aa, Methanosarcina barkeri str. fusaro; identical to SEQ ID NO: 20597

SEQ ID NO: 67022 - DNA, 582 bp, Dehalococcoides sp. CBDB1; identical to SEQ ID NO: 20598
  CDS (1)..(582): transl_table=11

SEQ ID NO: 67023 - protein, 193 aa, Dehalococcoides sp. CBDB1; identical to SEQ ID NO: 20599

SEQ ID NO: 67024 - DNA, 609 bp, Rhodobacter sphaeroides 2.4.1; identical to SEQ ID NO: 20600
  CDS (1)..(609)

SEQ ID NO: 67025 - protein, 202 aa, Rhodobacter sphaeroides 2.4.1; identical to SEQ ID NO: 20601

SEQ ID NO: 67026 - DNA, 795 bp, Magnetospirillum magnetotacticum MS-1; identical to SEQ ID NO: 20602
  CDS (1)..(795)

SEQ ID NO: 67027 - protein, 264 aa, Magnetospirillum magnetotacticum MS-1; identical to SEQ ID NO: 20603

SEQ ID NO: 67028 - DNA, 795 bp, Deinococcus geothermalis DSM 11300; identical to SEQ ID NO: 20604
  CDS (1)..(795): transl_table=11

SEQ ID NO: 67029 - protein, 264 aa, Deinococcus geothermalis DSM 11300; identical to SEQ ID NO: 20605

SEQ ID NO: 67030 - DNA, 900 bp, Anaeromyxobacter dehalogenans 2CP-C; identical to SEQ ID NO: 20606
  CDS (1)..(900): transl_table=11

SEQ ID NO: 67031 - protein, 299 aa, Anaeromyxobacter dehalogenans 2CP-C; identical to SEQ ID NO: 20607

SEQ ID NO: 67032 - DNA, 645 bp, Chromohalobacter salexigens DSM 3043; identical to SEQ ID NO: 20608
  CDS (1)..(645): transl_table=11

SEQ ID NO: 67033 - protein, 214 aa, Chromohalobacter salexigens DSM 3043; identical to SEQ ID NO: 20609

SEQ ID NO: 67034 - DNA, 663 bp, Solibacter usitatus Ellin6076; identical to SEQ ID NO: 20610
  CDS (1)..(663): transl_table=11

SEQ ID NO: 67035 - protein, 220 aa, Solibacter usitatus Ellin6076; identical to SEQ ID NO: 20611

SEQ ID NO: 67036 - DNA, 582 bp, Exiguobacterium sp. 255-15; identical to SEQ ID NO: 20612
  CDS (1)..(582): transl_table=11

SEQ ID NO: 67037 - protein, 193 aa, Exiguobacterium sp. 255-15; identical to SEQ ID NO: 20613

SEQ ID NO: 67038 - DNA, 777 bp, Ehrlichia chaffeensis str. Sapulpa; identical to SEQ ID NO: 20614
  CDS (1)..(777): transl_table=11

SEQ ID NO: 67039 - protein, 258 aa, Ehrlichia chaffeensis str. Sapulpa; identical to SEQ ID NO: 20615

SEQ ID NO: 67040 - DNA, 612 bp, Jannaschia sp. CCS1; identical to SEQ ID NO: 20616
  CDS (1)..(612): transl_table=11

SEQ ID NO: 67041 - protein, 203 aa, Jannaschia sp. CCS1; identical to SEQ ID NO: 20617

SEQ ID NO: 67042 - DNA, 603 bp, Sphingopyxis alaskensis RB2256; identical to SEQ ID NO: 20618
  CDS (1)..(603): transl_table=11

SEQ ID NO: 67043 - protein, 200 aa, Sphingopyxis alaskensis RB2256; identical to SEQ ID NO: 20619

SEQ ID NO: 67044 - DNA, 561 bp, Mesorhizobium sp. BNC1; identical to SEQ ID NO: 20620
  CDS (1)..(561): transl_table=11

SEQ ID NO: 67045 - protein, 186 aa, Mesorhizobium sp. BNC1; identical to SEQ ID NO: 20621

SEQ ID NO: 67046 - DNA, 609 bp, Silicibacter sp. TM1040; identical to SEQ ID NO: 20622
  CDS (1)..(609): transl_table=11

SEQ ID NO: 67047 - protein, 202 aa, Silicibacter sp. TM1040; identical to SEQ ID NO: 20623

SEQ ID NO: 67048 - DNA, 666 bp, Shewanella frigidimarina NCIMB 400; identical to SEQ ID NO: 20624
  CDS (1)..(666): transl_table=11

SEQ ID NO: 67049 - protein, 221 aa, Shewanella frigidimarina NCIMB 400; identical to SEQ ID NO: 20625

SEQ ID NO: 67050 - DNA, 660 bp, Psychrobacter cryohalolentis K5; identical to SEQ ID NO: 20626
  CDS (1)..(660): transl_table=11

SEQ ID NO: 67051 - protein, 219 aa, Psychrobacter cryohalolentis K5; identical to SEQ ID NO: 20627

SEQ ID NO: 67052 - DNA, 648 bp, Nocardioides sp. JS614; identical to SEQ ID NO: 20628
  CDS (1)..(648): transl_table=11

SEQ ID NO: 67053 - protein, 215 aa, Nocardioides sp. JS614; identical to SEQ ID NO: 20629

SEQ ID NO: 67054 - DNA, 732 bp, uncultured archaeon GZfos19C7; identical to SEQ ID NO: 20630
  CDS (1)..(732)

SEQ ID NO: 67055 - protein, 243 aa, uncultured archaeon GZfos19C7; identical to SEQ ID NO: 20631

SEQ ID NO: 67056 - DNA, 591 bp, Aquifex aeolicus; identical to SEQ ID NO: 20632
  CDS (1)..(591): transl_table=11

SEQ ID NO: 67057 - protein, 196 aa, Aquifex aeolicus; identical to SEQ ID NO: 20633

SEQ ID NO: 67058 - DNA, 567 bp, Pyrococcus horikoshii; identical to SEQ ID NO: 20634
  CDS (1)..(567): transl_table=11

SEQ ID NO: 67059 - protein, 188 aa, Pyrococcus horikoshii; identical to SEQ ID NO: 20635

SEQ ID NO: 67060 - DNA, 22 bp, Artificial sequence
  Primer sequence
atgcctgtgctagaccgccatc

SEQ ID NO: 67061 - DNA, 22 bp, Artificial sequence
  Primer sequence
ttactgacgctggagcgacttc

SEQ ID NO: 67062 - protein, 219 aa, Artificial sequence; identical to SEQ ID NO: 20638
  Consensus
  Variant (2)..(5): Xaa in position 2 to 5 is any amino acid
  Variant (9)..(14): Xaa in position 9 to 14 is any amino acid
  Variant (16)..(16): Xaa in position 16 is any amino acid
  Variant (18)..(27): Xaa in position 18 to 27 is any amino acid
  Variant (28)..(31): Xaa in position 28 to 31 is any or no amino acid
  Variant (33)..(35): Xaa in position 33 to 35 is any amino acid
  Variant (37)..(37): Xaa in position 37 is any amino acid
  Variant (39)..(42): Xaa in position 39 to 42 is any amino acid
  Variant (44)..(44): Xaa in position 44 is any amino acid
  Variant (48)..(48): Xaa in position 48 is any amino acid
  Variant (52)..(55): Xaa in position 52 to 55 is any amino acid
  Variant (56)..(58): Xaa in position 56 to 58 is any or no amino acid
  Variant (60)..(61): Xaa in position 60 to 61 is any amino acid
  Variant (63)..(64): Xaa in position 63 to 64 is any amino acid
  Variant (67)..(69): Xaa in position 67 to 69 is any amino acid
  Variant (71)..(79): Xaa in position 71 to 79 is any amino acid
  Variant (81)..(90): Xaa in position 81 to 90 is any amino acid
  Variant (91)..(102): Xaa in position 91 to 102 is any or no amino acid
  Variant (104)..(127): Xaa in position 104 to 127 is any amino acid
  Variant (128)..(161): Xaa in position 128 to 161 is any or no amino acid
  Variant (163)..(163): Xaa in position 163 is any amino acid
  Variant (165)..(166): Xaa in position 165 to 166 is any amino acid
  Variant (168)..(194): Xaa in position 168 to 194 is any amino acid
  Variant (195)..(214): Xaa in position 195 to 214 is any or no amino acid
  Variant (216)..(218): Xaa in position 216 to 218 is any amino acid

SEQ ID NO: 67063 - protein, 9 aa, Artificial sequence
  Consensus
  Variant (2)..(2): Xaa in position 2 is Ala, Gly, Asn, Ser, Thr or Val
  Variant (3)..(3): Xaa in position 3 is any amino acid
  Variant (6)..(6): Xaa in position 6 is any amino acid
  Variant (7)..(7): Xaa in position 7 is Ile, Leu, Met or Val
DXXDGXXAR

SEQ ID NO: 67064 - protein, 9 aa, Artificial sequence
  Consensus
  Variant (2)..(2): Xaa in position 2 is Ala, Gly or Thr
  Variant (3)..(3): Xaa in position 3 is any amino acid
  Variant (6)..(8): Xaa in position 6 to 8 is any amino acid
GXXLDXXXD

SEQ ID NO: 67065 - DNA, 900 bp, Escherichia coli; identical to SEQ ID NO: 49564
  CDS (1)..(900)

SEQ ID NO: 67066 - protein, 299 aa, Escherichia coli; identical to SEQ ID NO: 49565

SEQ ID NO: 67067 - DNA, 1005 bp, Xenopus tropicalis; identical to SEQ ID NO: 49566
  CDS (1)..(1005)

SEQ ID NO: 67068 - protein, 334 aa, Xenopus tropicalis; identical to SEQ ID NO: 49567

SEQ ID NO: 67069 - DNA, 858 bp, Archaeoglobus fulgidus DSM 4304; identical to SEQ ID NO: 49568
  CDS (1)..(858): transl_table=11

SEQ ID NO: 67070 - protein, 285 aa, Archaeoglobus fulgidus DSM 4304; identical to SEQ ID NO: 49569

SEQ ID NO: 67071 - DNA, 879 bp, Mesorhizobium loti MAFF303099; identical to SEQ ID NO: 49570
  CDS (1)..(879): transl_table=11

SEQ ID NO: 67072 - protein, 292 aa, Mesorhizobium loti MAFF303099; identical to SEQ ID NO: 49571

SEQ ID NO: 67073 - DNA, 843 bp, Thermoplasma volcanium GSS1; identical to SEQ ID NO: 49572
  CDS (1)..(843): transl_table=11

SEQ ID NO: 67074 - protein, 280 aa, Thermoplasma volcanium GSS1; identical to SEQ ID NO: 49573

SEQ ID NO: 67075 - DNA, 852 bp, Pyrococcus abyssi GE5; identical to SEQ ID NO: 49574
  CDS (1)..(852): transl_table=11

SEQ ID NO: 67076 - protein, 283 aa, Pyrococcus abyssi GE5; identical to SEQ ID NO: 49575

SEQ ID NO: 67077 - DNA, 873 bp, Pyrococcus horikoshii OT3; identical to SEQ ID NO: 49576
  CDS (1)..(873): transl_table=11

SEQ ID NO: 67078 - protein, 290 aa, Pyrococcus horikoshii OT3; identical to SEQ ID NO: 49577

SEQ ID NO: 67079 - DNA, 918 bp, Aeropyrum pernix K1; identical to SEQ ID NO: 49578
  CDS (1)..(918): transl_table=11

SEQ ID NO: 67080 - protein, 305 aa, Aeropyrum pernix K1; identical to SEQ ID NO: 49579

SEQ ID NO: 67081 - DNA, 720 bp, Clostridium acetobutylicum ATCC 824; identical to SEQ ID NO: 49580
  CDS (1)..(720): transl_table=11

SEQ ID NO: 67082 - protein, 239 aa, Clostridium acetobutylicum ATCC 824; identical to SEQ ID NO: 49581

SEQ ID NO: 67083 - DNA, 852 bp, Bacillus halodurans C-125; identical to SEQ ID NO: 49582
  CDS (1)..(852): transl_table=11

SEQ ID NO: 67084 - protein, 283 aa, Bacillus halodurans C-125; identical to SEQ ID NO: 49583

SEQ ID NO: 67085 - DNA, 909 bp, Pseudomonas aeruginosa PAO1; identical to SEQ ID NO: 49584
  CDS (1)..(909): transl_table=11

SEQ ID NO: 67086 - protein, 302 aa, Pseudomonas aeruginosa PAO1; identical to SEQ ID NO: 49585

SEQ ID NO: 67087 - DNA, 900 bp, Lactococcus lactis subsp. lactis Il1403; identical to SEQ ID NO: 49586
  CDS (1)..(900): transl_table=11

SEQ ID NO: 67088 - protein, 299 aa, Lactococcus lactis subsp. lactis Il1403; identical to SEQ ID NO: 49587

SEQ ID NO: 67089 - DNA, 921 bp, Neisseria meningitidis MC58; identical to SEQ ID NO: 49588
  CDS (1)..(921): transl_table=11

SEQ ID NO: 67090 - protein, 306 aa, Neisseria meningitidis MC58; identical to SEQ ID NO: 49589

SEQ ID NO: 67091 - DNA, 843 bp, Methanothermobacter thermautotrophicus str. Delta H; identical to SEQ ID NO: 49590
  CDS (1)..(843)

SEQ ID NO: 67092 - protein, 280 aa, Methanothermobacter thermautotrophicus str. Delta H; identical to SEQ ID NO: 49591

SEQ ID NO: 67093 - DNA, 864 bp, Neisseria meningitidis Z2491; identical to SEQ ID NO: 49592
  CDS (1)..(864): transl_table=11

SEQ ID NO: 67094 - protein, 287 aa, Neisseria meningitidis Z2491; identical to SEQ ID NO: 49593

SEQ ID NO: 67095 - DNA, 909 bp, Xylella fastidiosa 9a5c; identical to SEQ ID NO: 49594
  CDS (1)..(909): transl_table=11

SEQ ID NO: 67096 - protein, 302 aa, Xylella fastidiosa 9a5c; identical to SEQ ID NO: 49595

SEQ ID NO: 67097 - DNA, 915 bp, Mycobacterium tuberculosis CDC1551; identical to SEQ ID NO: 49596
  CDS (1)..(915): transl_table=11

SEQ ID NO: 67098 - protein, 304 aa, Mycobacterium tuberculosis CDC1551; identical to SEQ ID NO: 49597

SEQ ID NO: 67099 - DNA, 681 bp, Sulfolobus solfataricus P2; identical to SEQ ID NO: 49598
  CDS (1)..(681): transl_table=11

SEQ ID NO: 67100 - protein, 226 aa, Sulfolobus solfataricus P2; identical to SEQ ID NO: 49599

SEQ ID NO: 67101 - DNA, 843 bp, Clostridium acetobutylicum ATCC 824; identical to SEQ ID NO: 49600
  CDS (1)..(843): transl_table=11

SEQ ID NO: 67102 - protein, 280 aa, Clostridium acetobutylicum ATCC 824; identical to SEQ ID NO: 49601

SEQ ID NO: 67103 - DNA, 822 bp, Sulfolobus tokodaii str. 7; identical to SEQ ID NO: 49602
  CDS (1)..(822): transl_table=11

SEQ ID NO: 67104 - protein, 273 aa, Sulfolobus tokodaii str. 7; identical to SEQ ID NO: 49603

SEQ ID NO: 67105 - DNA, 903 bp, Caulobacter crescentus CB15; identical to SEQ ID NO: 49604
  CDS (1)..(903): transl_table=11

SEQ ID NO: 67106 - protein, 300 aa, Caulobacter crescentus CB15; identical to SEQ ID NO: 49605

SEQ ID NO: 67107 - DNA, 882 bp, Caulobacter crescentus CB15; identical to SEQ ID NO: 49606
  CDS (1)..(882): transl_table=11

SEQ ID NO: 67108 - protein, 293 aa, Caulobacter crescentus CB15; identical to SEQ ID NO: 49607

SEQ ID NO: 67109 - DNA, 903 bp, Sinorhizobium meliloti 1021; identical to SEQ ID NO: 49608
  CDS (1)..(903): transl_table=11

SEQ ID NO: 67110 - protein, 300 aa, Sinorhizobium meliloti 1021; identical to SEQ ID NO: 49609

SEQ ID NO: 67111 - DNA, 843 bp, Synechocystis sp. PCC 6803; identical to SEQ ID NO: 49610
  CDS (1)..(843): transl_table=11

SEQ ID NO: 67112 - protein, 280 aa, Synechocystis sp. PCC 6803; identical to SEQ ID NO: 49611

SEQ ID NO: 67113 - DNA, 831 bp, Listeria monocytogenes EGD-e; identical to SEQ ID NO: 49612
  CDS (1)..(831): transl_table=11

SEQ ID NO: 67114 - protein, 276 aa, Listeria monocytogenes EGD-e; identical to SEQ ID NO: 49613

SEQ ID NO: 67115 - DNA, 885 bp, Nostoc sp. PCC 7120; identical to SEQ ID NO: 49614
  CDS (1)..(885): transl_table=11

SEQ ID NO: 67116 - protein, 294 aa, Nostoc sp. PCC 7120; identical to SEQ ID NO: 49615

SEQ ID NO: 67117 - DNA, 918 bp, Ralstonia solanacearum GMI1000; identical to SEQ ID NO: 49616
  CDS (1)..(918): transl_table=11

SEQ ID NO: 67118 - protein, 305 aa, Ralstonia solanacearum GMI1000; identical to SEQ ID NO: 49617

SEQ ID NO: 67119 - DNA, 894 bp, Agrobacterium tumefaciens str. C58; identical to SEQ ID NO: 49618
  CDS (1)..(894): transl_table=11

SEQ ID NO: 67120 - protein, 297 aa, Agrobacterium tumefaciens str. C58; identical to SEQ ID NO: 49619

SEQ ID NO: 67121 - DNA, 885 bp, Clostridium perfringens str. 13; identical to SEQ ID NO: 49620
  CDS (1)..(885): transl_table=11

SEQ ID NO: 67122 - protein, 294 aa, Clostridium perfringens str. 13; identical to SEQ ID NO: 49621

SEQ ID NO: 67123 - DNA, 1362 bp, Corynebacterium glutamicum ATCC 13032; identical to SEQ ID NO: 49622
  CDS (1)..(1362): transl_table=11

SEQ ID NO: 67124 - protein, 453 aa, Corynebacterium glutamicum ATCC 13032; identical to SEQ ID NO: 49623

SEQ ID NO: 67125 - DNA, 855 bp, Streptococcus pyogenes MGAS8232; identical to SEQ ID NO: 49624
  CDS (1)..(855): transl_table=11

SEQ ID NO: 67126 - protein, 284 aa, Streptococcus pyogenes MGAS8232; identical to SEQ ID NO: 49625

SEQ ID NO: 67127 - DNA, 810 bp, Methanosarcina mazei Go1; identical to SEQ ID NO: 49626
  CDS (1)..(810): transl_table=11

SEQ ID NO: 67128 - protein, 269 aa, Methanosarcina mazei Go1; identical to SEQ ID NO: 49627

SEQ ID NO: 67129 - DNA, 909 bp, Xanthomonas campestris pv. campestris str. ATCC 33913; identical to SEQ ID NO: 49628
  CDS (1)..(909): transl_table=11

SEQ ID NO: 67130 - protein, 302 aa, Xanthomonas campestris pv. campestris str. ATCC 33913; identical to SEQ ID NO: 49629

SEQ ID NO: 67131 - DNA, 900 bp, Xanthomonas axonopodis pv. citri str. 306; identical to SEQ ID NO: 49630
  CDS (1)..(900): transl_table=11

SEQ ID NO: 67132 - protein, 299 aa, Xanthomonas axonopodis pv. citri str. 306; identical to SEQ ID NO: 49631

SEQ ID NO: 67133 - DNA, 879 bp, Chlorobium tepidum TLS; identical to SEQ ID NO: 49632
  CDS (1)..(879): transl_table=11

SEQ ID NO: 67134 - protein, 292 aa, Chlorobium tepidum TLS; identical to SEQ ID NO: 49633

SEQ ID NO: 67135 - DNA, 915 bp, Thermosynechococcus elongatus BP-1; identical to SEQ ID NO: 49634
  CDS (1)..(915): transl_table=11

SEQ ID NO: 67136 - protein, 304 aa, Thermosynechococcus elongatus BP-1; identical to SEQ ID NO: 49635

SEQ ID NO: 67137 - DNA, 855 bp, Streptococcus agalactiae 2603V/R; identical to SEQ ID NO: 49636
  CDS (1)..(855): transl_table=11

SEQ ID NO: 67138 - protein, 284 aa, Streptococcus agalactiae 2603V/R; identical to SEQ ID NO: 49637

SEQ ID NO: 67139 - DNA, 849 bp, Oceanobacillus iheyensis HTE831; identical to SEQ ID NO: 49638
  CDS (1)..(849): transl_table=11

SEQ ID NO: 67140 - protein, 282 aa, Oceanobacillus iheyensis HTE831; identical to SEQ ID NO: 49639

SEQ ID NO: 67141 - DNA, 1443 bp, Bifidobacterium longum NCC2705; identical to SEQ ID NO: 49640
  CDS (1)..(1443): transl_table=11

SEQ ID NO: 67142 - protein, 480 aa, Bifidobacterium longum NCC2705; identical to SEQ ID NO: 49641

SEQ ID NO: 67143 - DNA, 921 bp, Leptospira interrogans serovar Lai str. 56601; identical to SEQ ID NO: 49642
  CDS (1)..(921): transl_table=11

SEQ ID NO: 67144 - protein, 306 aa, Leptospira interrogans serovar Lai str. 56601; identical to SEQ ID NO: 49643

SEQ ID NO: 67145 - DNA, 987 bp, Shewanella oneidensis MR-1; identical to SEQ ID NO: 49644
  CDS (1)..(987): transl_table=11

SEQ ID NO: 67146 - protein, 328 aa, Shewanella oneidensis MR-1; identical to SEQ ID NO: 49645

SEQ ID NO: 67147 - DNA, 921 bp, Shewanella oneidensis MR-1; identical to SEQ ID NO: 49646
  CDS (1)..(921): transl_table=11

SEQ ID NO: 67148 - protein, 306 aa, Shewanella oneidensis MR-1; identical to SEQ ID NO: 49647

SEQ ID NO: 67149 - DNA, 855 bp, Streptococcus mutans UA159; identical to SEQ ID NO: 49648
  CDS (1)..(855): transl_table=11

SEQ ID NO: 67150 - protein, 284 aa, Streptococcus mutans UA159; identical to SEQ ID NO: 49649

SEQ ID NO: 67151 - DNA, 855 bp, Streptococcus agalactiae NEM316; identical to SEQ ID NO: 49650
  CDS (1)..(855): transl_table=11

SEQ ID NO: 67152 - protein, 284 aa, Streptococcus agalactiae NEM316; identical to SEQ ID NO: 49651

SEQ ID NO: 67153 - DNA, 1380 bp, Corynebacterium efficiens YS-314; identical to SEQ ID NO: 49652
  CDS (1)..(1380): transl_table=11

SEQ ID NO: 67154 - protein, 459 aa, Corynebacterium efficiens YS-314; identical to SEQ ID NO: 49653

SEQ ID NO: 67155 - DNA, 903 bp, Pseudomonas putida KT2440; identical to SEQ ID NO: 49654
  CDS (1)..(903): transl_table=11

SEQ ID NO: 67156 - protein, 300 aa, Pseudomonas putida KT2440; identical to SEQ ID NO: 49655

SEQ ID NO: 67157 - DNA, 909 bp, Xylella fastidiosa Temecula1; identical to SEQ ID NO: 49656
  CDS (1)..(909): transl_table=11

SEQ ID NO: 67158 - protein, 302 aa, Xylella fastidiosa Temecula1; identical to SEQ ID NO: 49657

SEQ ID NO: 67159 - DNA, 843 bp, Lactobacillus plantarum WCFS1; identical to SEQ ID NO: 49658
  CDS (1)..(843): transl_table=11

SEQ ID NO: 67160 - protein, 280 aa, Lactobacillus plantarum WCFS1; identical to SEQ ID NO: 49659

SEQ ID NO: 67161 - DNA, 864 bp, Tropheryma whipplei str. Twist; identical to SEQ ID NO: 49660
  CDS (1)..(864): transl_table=11

SEQ ID NO: 67162 - protein, 287 aa, Tropheryma whipplei str. Twist; identical to SEQ ID NO: 49661

SEQ ID NO: 67163 - DNA, 906 bp, Pseudomonas syringae pv. tomato str. DC3000; identical to SEQ ID NO: 49662
  CDS (1)..(906): transl_table=11

SEQ ID NO: 67164 - protein, 301 aa, Pseudomonas syringae pv. tomato str. DC3000; identical to SEQ ID NO: 49663

SEQ ID NO: 67165 - DNA, 855 bp, Streptococcus pyogenes SSI-1; identical to SEQ ID NO: 49664
  CDS (1)..(855): transl_table=11

SEQ ID NO: 67166 - protein, 284 aa, Streptococcus pyogenes SSI-1; identical to SEQ ID NO: 49665

SEQ ID NO: 67167 - DNA, 855 bp, Bacteroides thetaiotaomicron VPI-5482; identical to SEQ ID NO: 49666
  CDS (1)..(855): transl_table=11

SEQ ID NO: 67168 - protein, 284 aa, Bacteroides thetaiotaomicron VPI-5482; identical to SEQ ID NO: 49667

SEQ ID NO: 67169 - DNA, 909 bp, Bacteroides thetaiotaomicron VPI-5482; identical to SEQ ID NO: 49668
  CDS (1)..(909): transl_table=11

SEQ ID NO: 67170 - protein, 302 aa, Bacteroides thetaiotaomicron VPI-5482; identical to SEQ ID NO: 49669

SEQ ID NO: 67171 - DNA, 849 bp, Bacteroides thetaiotaomicron VPI-5482; identical to SEQ ID NO: 49670
  CDS (1)..(849): transl_table=11

SEQ ID NO: 67172 - protein, 282 aa, Bacteroides thetaiotaomicron VPI-5482; identical to SEQ ID NO: 49671

SEQ ID NO: 67173 - DNA, 900 bp, Enterococcus faecalis V583; identical to SEQ ID NO: 49672
  CDS (1)..(900): transl_table=11

SEQ ID NO: 67174 - protein, 299 aa, Enterococcus faecalis V583; identical to SEQ ID NO: 49673

SEQ ID NO: 67175 - DNA, 855 bp, Bacillus cereus ATCC 14579; identical to SEQ ID NO: 49674
  CDS (1)..(855): transl_table=11

SEQ ID NO: 67176 - protein, 284 aa, Bacillus cereus ATCC 14579; identical to SEQ ID NO: 49675

SEQ ID NO: 67177 - DNA, 915 bp, Nitrosomonas europaea ATCC 19718; identical to SEQ ID NO: 49676
  CDS (1)..(915): transl_table=11

SEQ ID NO: 67178 - protein, 304 aa, Nitrosomonas europaea ATCC 19718; identical to SEQ ID NO: 49677

SEQ ID NO: 67179 - DNA, 855 bp, Bacillus anthracis str. Ames; identical to SEQ ID NO: 49678
  CDS (1)..(855): transl_table=11

SEQ ID NO: 67180 - protein, 284 aa, Bacillus anthracis str. Ames; identical to SEQ ID NO: 49679

SEQ ID NO: 67181 - DNA, 849 bp, Ruegeria sp. PR1b; identical to SEQ ID NO: 49680
  CDS (1)..(849): transl_table=11

SEQ ID NO: 67182 - protein, 282 aa, Ruegeria sp. PR1b; identical to SEQ ID NO: 49681

SEQ ID NO: 67183 - DNA, 897 bp, Bordetella pertussis Tohama I; identical to SEQ ID NO: 49682
  CDS (1)..(897): transl_table=11

SEQ ID NO: 67184 - protein, 298 aa, Bordetella pertussis Tohama I; identical to SEQ ID NO: 49683

SEQ ID NO: 67185 - DNA, 906 bp, Prochlorococcus marinus str. MIT 9313; identical to SEQ ID NO: 49684
  CDS (1)..(906): transl_table=11

SEQ ID NO: 67186 - protein, 301 aa, Prochlorococcus marinus str. MIT 9313; identical to SEQ ID NO: 49685

SEQ ID NO: 67187 - DNA, 909 bp, Synechococcus sp. WH 8102; identical to SEQ ID NO: 49686
  CDS (1)..(909): transl_table=11

SEQ ID NO: 67188 - protein, 302 aa, Synechococcus sp. WH 8102; identical to SEQ ID NO: 49687

SEQ ID NO: 67189 - DNA, 933 bp, Chromobacterium violaceum ATCC 12472; identical to SEQ ID NO: 49688
  CDS (1)..(933): transl_table=11

SEQ ID NO: 67190 - protein, 310 aa, Chromobacterium violaceum ATCC 12472; identical to SEQ ID NO: 49689

SEQ ID NO: 67191 - DNA, 858 bp, Porphyromonas gingivalis W83; identical to SEQ ID NO: 49690
  CDS (1)..(858): transl_table=11

SEQ ID NO: 67192 - protein, 285 aa, Porphyromonas gingivalis W83; identical to SEQ ID NO: 49691

SEQ ID NO: 67193 - DNA, 903 bp, Gloeobacter violaceus PCC 7421; identical to SEQ ID NO: 49692
  CDS (1)..(903): transl_table=11

SEQ ID NO: 67194 - protein, 300 aa, Gloeobacter violaceus PCC 7421; identical to SEQ ID NO: 49693

SEQ ID NO: 67195 - DNA, 882 bp, Vibrio vulnificus YJ016; identical to SEQ ID NO: 49694
  CDS (1)..(882): transl_table=11

SEQ ID NO: 67196 - protein, 293 aa, Vibrio vulnificus YJ016; identical to SEQ ID NO: 49695

SEQ ID NO: 67197 - DNA, 1347 bp, Corynebacterium diphtheriae NCTC 13129; identical to SEQ ID NO: 49696
  CDS (1)..(1347): transl_table=11

SEQ ID NO: 67198 - protein, 448 aa, Corynebacterium diphtheriae NCTC 13129; identical to SEQ ID NO: 49697

SEQ ID NO: 67199 - DNA, 894 bp, Rhodopseudomonas palustris CGA009; identical to SEQ ID NO: 49698
  CDS (1)..(894): transl_table=11

SEQ ID NO: 67200 - protein, 297 aa, Rhodopseudomonas palustris CGA009; identical to SEQ ID NO: 49699

SEQ ID NO: 67201 - DNA, 843 bp, Geobacter sulfurreducens PCA; identical to SEQ ID NO: 49700
  CDS (1)..(843): transl_table=11

SEQ ID NO: 67202 - protein, 280 aa, Geobacter sulfurreducens PCA; identical to SEQ ID NO: 49701

SEQ ID NO: 67203 - DNA, 924 bp, Mycobacterium avium subsp. paratuberculosis K-10; identical to SEQ ID NO: 49702
  CDS (1)..(924): transl_table=11

SEQ ID NO: 67204 - protein, 307 aa, Mycobacterium avium subsp. paratuberculosis K-10; identical to SEQ ID NO: 49703

SEQ ID NO: 67205 - DNA, 987 bp, Lactobacillus johnsonii NCC 533; identical to SEQ ID NO: 49704
  CDS (1)..(987): transl_table=11

SEQ ID NO: 67206 - protein, 328 aa, Lactobacillus johnsonii NCC 533; identical to SEQ ID NO: 49705

SEQ ID NO: 67207 - DNA, 921 bp, Leptospira interrogans serovar Copenhageni str. Fiocruz L1-130; identical to SEQ ID NO: 49706
  CDS (1)..(921): transl_table=11

SEQ ID NO: 67208 - protein, 306 aa, Leptospira interrogans serovar Copenhageni str. Fiocruz L1-130; identical to SEQ ID NO: 49707

SEQ ID NO: 67209 - DNA, 885 bp, Parachlamydia sp. UWE25; identical to SEQ ID NO: 49708
  CDS (1)..(885): transl_table=11

SEQ ID NO: 67210 - protein, 294 aa, Parachlamydia sp. UWE25; identical to SEQ ID NO: 49709

SEQ ID NO: 67211 - DNA, 876 bp, Desulfovibrio vulgaris subsp. vulgaris str. Hildenborough; identical to SEQ ID NO: 49710
  CDS (1)..(876): transl_table=11

SEQ ID NO: 67212 - protein, 291 aa, Desulfovibrio vulgaris subsp. vulgaris str. Hildenborough; identical to SEQ ID NO: 49711

SEQ ID NO: 67213 - DNA, 810 bp, Picrophilus torridus DSM 9790; identical to SEQ ID NO: 49712
  CDS (1)..(810): transl_table=11

SEQ ID NO: 67214 - protein, 269 aa, Picrophilus torridus DSM 9790; identical to SEQ ID NO: 49713

SEQ ID NO: 67215 - DNA, 909 bp, Acinetobacter sp. ADP1; identical to SEQ ID NO: 49714
  CDS (1)..(909): transl_table=11

SEQ ID NO: 67216 - protein, 302 aa, Acinetobacter sp. ADP1; identical to SEQ ID NO: 49715

SEQ ID NO: 67217 - DNA, 852 bp, Erwinia carotovora subsp. atroseptica SCRI1043; identical to SEQ ID NO: 49716
  CDS (1)..(852): transl_table=11

SEQ ID NO: 67218 - protein, 283 aa, Erwinia carotovora subsp. atroseptica SCRI1043; identical to SEQ ID NO: 49717

SEQ ID NO: 67219 - DNA, 855 bp, Streptococcus pyogenes MGAS10394; identical to SEQ ID NO: 49718
  CDS (1)..(855): transl_table=11

SEQ ID NO: 67220 - protein, 284 aa, Streptococcus pyogenes MGAS10394; identical to SEQ ID NO: 49719

SEQ ID NO: 67221 - DNA, 888 bp, Leifsonia xyli subsp. xyli str. CTCB07; identical to SEQ ID NO: 49720
  CDS (1)..(888): transl_table=11

SEQ ID NO: 67222 - protein, 295 aa, Leifsonia xyli subsp. xyli str. CTCB07; identical to SEQ ID NO: 49721

SEQ ID NO: 67223 - DNA, 855 bp, Bacillus cereus E33L; identical to SEQ ID NO: 49722
  CDS (1)..(855): transl_table=11

SEQ ID NO: 67224 - protein, 284 aa, Bacillus cereus E33L; identical to SEQ ID NO: 49723

SEQ ID NO: 67225 - DNA, 885 bp, Legionella pneumophila subsp. pneumophila str. Philadelphia 1; identical to SEQ ID NO: 49724
  CDS (1)..(885): transl_table=11

SEQ ID NO: 67226 - protein, 294 aa, Legionella pneumophila subsp. pneumophila str. Philadelphia 1; identical to SEQ ID NO: 49725

SEQ ID NO: 67227 - DNA, 891 bp, Bacteroides fragilis YCH46; identical to SEQ ID NO: 49726
  CDS (1)..(891): transl_table=11

SEQ ID NO: 67228 - protein, 296 aa, Bacteroides fragilis YCH46; identical to SEQ ID NO: 49727

SEQ ID NO: 67229 - DNA, 897 bp, Burkholderia mallei ATCC 23344; identical to SEQ ID NO: 49728
  CDS (1)..(897): transl_table=11

SEQ ID NO: 67230 - protein, 298 aa, Burkholderia mallei ATCC 23344; identical to SEQ ID NO: 49729

SEQ ID NO: 67231 - DNA, 906 bp, Methylococcus capsulatus str. Bath; identical to SEQ ID NO: 49730
  CDS (1)..(906): transl_table=11

SEQ ID NO: 67232 - protein, 301 aa, Methylococcus capsulatus str. Bath; identical to SEQ ID NO: 49731

SEQ ID NO: 67233 - DNA, 858 bp, Nocardia farcinica IFM 10152; identical to SEQ ID NO: 49732
  CDS (1)..(858): transl_table=11

SEQ ID NO: 67234 - protein, 285 aa, Nocardia farcinica IFM 10152; identical to SEQ ID NO: 49733

SEQ ID NO: 67235 - DNA, 885 bp, Legionella pneumophila str. Lens; identical to SEQ ID NO: 49734
  CDS (1)..(885): transl_table=11

SEQ ID NO: 67236 - protein, 294 aa, Legionella pneumophila str. Lens; identical to SEQ ID NO: 49735

SEQ ID NO: 67237 - DNA, 873 bp, Streptococcus thermophilus LMG 18311; identical to SEQ ID NO: 49736
  CDS (1)..(873): transl_table=11

SEQ ID NO: 67238 - protein, 290 aa, Streptococcus thermophilus LMG 18311; identical to SEQ ID NO: 49737

SEQ ID NO: 67239 - DNA, 897 bp, Azoarcus sp. EbN1; identical to SEQ ID NO: 49738
  CDS (1)..(897): transl_table=11

SEQ ID NO: 67240 - protein, 298 aa, Azoarcus sp. EbN1; identical to SEQ ID NO: 49739

SEQ ID NO: 67241 - DNA, 870 bp, Synechococcus elongatus PCC 6301; identical to SEQ ID NO: 49740
  CDS (1)..(870): transl_table=11

SEQ ID NO: 67242 - protein, 289 aa, Synechococcus elongatus PCC 6301; identical to SEQ ID NO: 49741

SEQ ID NO: 67243 - DNA, 894 bp, Gluconobacter oxydans 621H; identical to SEQ ID NO: 49742
  CDS (1)..(894): transl_table=11

SEQ ID NO: 67244 - protein, 297 aa, Gluconobacter oxydans 621H; identical to SEQ ID NO: 49743

SEQ ID NO: 67245 - DNA, 909 bp, Xanthomonas oryzae pv. oryzae KACC10331; identical to SEQ ID NO: 49744
  CDS (1)..(909): transl_table=11

SEQ ID NO: 67246 - protein, 302 aa, Xanthomonas oryzae pv. oryzae KACC10331; identical to SEQ ID NO: 49745

SEQ ID NO: 67247 - DNA, 864 bp, Neisseria gonorrhoeae FA 1090; identical to SEQ ID NO: 49746
  CDS (1)..(864): transl_table=11

SEQ ID NO: 67248 - protein, 287 aa, Neisseria gonorrhoeae FA 1090; identical to SEQ ID NO: 49747

SEQ ID NO: 67249 - DNA, 864 bp, Bacteroides fragilis NCTC 9343; identical to SEQ ID NO: 49748
  CDS (1)..(864): transl_table=11

SEQ ID NO: 67250 - protein, 287 aa, Bacteroides fragilis NCTC 9343; identical to SEQ ID NO: 49749

SEQ ID NO: 67251 - DNA, 891 bp, Bacteroides fragilis NCTC 9343; identical to SEQ ID NO: 49750
  CDS (1)..(891): transl_table=11

SEQ ID NO: 67252 - protein, 296 aa, Bacteroides fragilis NCTC 9343; identical to SEQ ID NO: 49751

SEQ ID NO: 67253 - DNA, 849 bp, Sulfolobus acidocaldarius DSM 639; identical to SEQ ID NO: 49752
  CDS (1)..(849): transl_table=11

SEQ ID NO: 67254 - protein, 282 aa, Sulfolobus acidocaldarius DSM 639; identical to SEQ ID NO: 49753

SEQ ID NO: 67255 - DNA, 852 bp, Rhodobacter sphaeroides 2.4.1; identical to SEQ ID NO: 49754
  CDS (1)..(852)

SEQ ID NO: 67256 - protein, 283 aa, Rhodobacter sphaeroides 2.4.1; identical to SEQ ID NO: 49755

SEQ ID NO: 67257 - DNA, 891 bp, Nostoc punctiforme PCC 73102; identical to SEQ ID NO: 49756
  CDS (1)..(891)

SEQ ID NO: 67258 - protein, 296 aa, Nostoc punctiforme PCC 73102; identical to SEQ ID NO: 49757

SEQ ID NO: 67259 - DNA, 1452 bp, Bifidobacterium longum DJO10A; identical to SEQ ID NO: 49758
  CDS (1)..(1452)

SEQ ID NO: 67260 - protein, 483 aa, Bifidobacterium longum DJO10A; identical to SEQ ID NO: 49759

SEQ ID NO: 67261 - DNA, 909 bp, Pseudomonas aeruginosa UCBPP-PA14; identical to SEQ ID NO: 49760
  CDS (1)..(909)

SEQ ID NO: 67262 - protein, 302 aa, Pseudomonas aeruginosa UCBPP-PA14; identical to SEQ ID NO: 49761

SEQ ID NO: 67263 - DNA, 894 bp, Fusobacterium nucleatum subsp. vincentii ATCC 49256; identical to SEQ ID NO: 49762
  CDS (1)..(894): transl_table=11

SEQ ID NO: 67264 - protein, 297 aa, Fusobacterium nucleatum subsp. vincentii ATCC 49256; identical to SEQ ID NO: 49763

SEQ ID NO: 67265 - DNA, 891 bp, Anabaena variabilis ATCC 29413; identical to SEQ ID NO: 49764
  CDS (1)..(891)

SEQ ID NO: 67266 - protein, 296 aa, Anabaena variabilis ATCC 29413; identical to SEQ ID NO: 49765

SEQ ID NO: 67267 - DNA, 915 bp, Ralstonia eutropha JMP134; identical to SEQ ID NO: 49766
  CDS (1)..(915)

SEQ ID NO: 67268 - protein, 304 aa, Ralstonia eutropha JMP134; identical to SEQ ID NO: 49767

SEQ ID NO: 67269 - DNA, 897 bp, Rubrivivax gelatinosus PM1; identical to SEQ ID NO: 49768
  CDS (1)..(897)

SEQ ID NO: 67270 - protein, 298 aa, Rubrivivax gelatinosus PM1; identical to SEQ ID NO: 49769

SEQ ID NO: 67271 - DNA, 837 bp, Burkholderia fungorum LB400; identical to SEQ ID NO: 49770
  CDS (1)..(837)

SEQ ID NO: 67272 - protein, 278 aa, Burkholderia fungorum LB400; identical to SEQ ID NO: 49771

SEQ ID NO: 67273 - DNA, 906 bp, Psychrobacter sp. 273-4; identical to SEQ ID NO: 49772
  CDS (1)..(906)

SEQ ID NO: 67274 - protein, 301 aa, Psychrobacter sp. 273-4; identical to SEQ ID NO: 49773

SEQ ID NO: 67275 - DNA, 900 bp, Azotobacter vinelandii AvOP; identical to SEQ ID NO: 49774
  CDS (1)..(900): transl_table=11

SEQ ID NO: 67276 - protein, 299 aa, Azotobacter vinelandii AvOP; identical to SEQ ID NO: 49775

SEQ ID NO: 67277 - DNA, 885 bp, Burkholderia vietnamiensis G4; identical to SEQ ID NO: 49776
  CDS (1)..(885): transl_table=11

SEQ ID NO: 67278 - protein, 294 aa, Burkholderia vietnamiensis G4; identical to SEQ ID NO: 49777

SEQ ID NO: 67279 - DNA, 900 bp, Burkholderia cenocepacia AU 1054; identical to SEQ ID NO: 49778
  CDS (1)..(900): transl_table=11

SEQ ID NO: 67280 - protein, 299 aa, Burkholderia cenocepacia AU 1054; identical to SEQ ID NO: 49779

SEQ ID NO: 67281 - DNA, 975 bp, Polaromonas sp. JS666; identical to SEQ ID NO: 49780
  CDS (1)..(975): transl_table=11

SEQ ID NO: 67282 - protein, 324 aa, Polaromonas sp. JS666; identical to SEQ ID NO: 49781

SEQ ID NO: 67283 - DNA, 897 bp, Frankia sp. CcI3; identical to SEQ ID NO: 49782
  CDS (1)..(897): transl_table=11

SEQ ID NO: 67284 - protein, 298 aa, Frankia sp. CcI3; identical to SEQ ID NO: 49783

SEQ ID NO: 67285 - DNA, 810 bp, Methanococcoides burtonii DSM 6242; identical to SEQ ID NO: 49784
  CDS (1)..(810): transl_table=11

SEQ ID NO: 67286 - protein, 269 aa, Methanococcoides burtonii DSM 6242; identical to SEQ ID NO: 49785

SEQ ID NO: 67287 - DNA, 876 bp, Shewanella baltica OS155; identical to SEQ ID NO: 49786
  CDS (1)..(876): transl_table=11

SEQ ID NO: 67288 - protein, 291 aa, Shewanella baltica OS155; identical to SEQ ID NO: 49787

SEQ ID NO: 67289 - DNA, 906 bp, Shewanella amazonensis SB2B; identical to SEQ ID NO: 49788
  CDS (1)..(906): transl_table=11

SEQ ID NO: 67290 - protein, 301 aa, Shewanella amazonensis SB2B; identical to SEQ ID NO: 49789

SEQ ID NO: 67291 - DNA, 879 bp, Pelodictyon phaeoclathratiforme BU-1; identical to SEQ ID NO: 49790
  CDS (1)..(879): transl_table=11

SEQ ID NO: 67292 - protein, 292 aa, Pelodictyon phaeoclathratiforme BU-1; identical to SEQ ID NO: 49791

SEQ ID NO: 67293 - DNA, 921 bp, Ralstonia metallidurans CH34; identical to SEQ ID NO: 49792
  CDS (1)..(921): transl_table=11

SEQ ID NO: 67294 - protein, 306 aa, Ralstonia metallidurans CH34; identical to SEQ ID NO: 49793

SEQ ID NO: 67295 - DNA, 888 bp, Mesorhizobium sp. BNC1; identical to SEQ ID NO: 49794
  CDS (1)..(888): transl_table=11

SEQ ID NO: 67296 - protein, 295 aa, Mesorhizobium sp. BNC1; identical to SEQ ID NO: 49795

SEQ ID NO: 67297 - DNA, 915 bp, Nitrobacter hamburgensis X14; identical to SEQ ID NO: 49796
  CDS (1)..(915): transl_table=11

SEQ ID NO: 67298 - protein, 304 aa, Nitrobacter hamburgensis X14; identical to SEQ ID NO: 49797

SEQ ID NO: 67299 - DNA, 855 bp, Streptococcus mutans; identical to SEQ ID NO: 49798
  CDS (1)..(855): transl_table=11

SEQ ID NO: 67300 - protein, 284 aa, Streptococcus mutans; identical to SEQ ID NO: 49799

SEQ ID NO: 67301 - DNA, 867 bp, Serratia marcescens; identical to SEQ ID NO: 49800
  CDS (1)..(867): transl_table=11

SEQ ID NO: 67302 - protein, 288 aa, Serratia marcescens; identical to SEQ ID NO: 49801

SEQ ID NO: 67303 - DNA, 885 bp, Actinobacillus actinomycetemcomitans; identical to SEQ ID NO: 49802
  CDS (1)..(885): transl_table=11

SEQ ID NO: 67304 - protein, 294 aa, Actinobacillus actinomycetemcomitans; identical to SEQ ID NO: 49803

SEQ ID NO: 67305 - DNA, 918 bp, Streptomyces glaucescens; identical to SEQ ID NO: 49804
  CDS (1)..(918): transl_table=11

SEQ ID NO: 67306 - protein, 305 aa, Streptomyces glaucescens; identical to SEQ ID NO: 49805

SEQ ID NO: 67307 - DNA, 900 bp, Enterococcus faecalis; identical to SEQ ID NO: 49806
  CDS (1)..(900): transl_table=11

SEQ ID NO: 67308 - protein, 299 aa, Enterococcus faecalis; identical to SEQ ID NO: 49807

SEQ ID NO: 67309 - DNA, 867 bp, Sphingomonas sp; identical to SEQ ID NO: 49808
  CDS (1)..(867): transl_table=11

SEQ ID NO: 67310 - protein, 288 aa, Sphingomonas sp; identical to SEQ ID NO: 49809

SEQ ID NO: 67311 - DNA, 828 bp, Rhizobium meliloti; identical to SEQ ID NO: 49810
  CDS (1)..(828): transl_table=11

SEQ ID NO: 67312 - protein, 275 aa, Rhizobium meliloti; identical to SEQ ID NO: 49811

SEQ ID NO: 67313 - DNA, 891 bp, Azorhizobium caulinodans; identical to SEQ ID NO: 49812
  CDS (1)..(891): transl_table=11

SEQ ID NO: 67314 - protein, 296 aa, Azorhizobium caulinodans; identical to SEQ ID NO: 49813

SEQ ID NO: 67315 - DNA, 852 bp, Streptococcus pneumoniae; identical to SEQ ID NO: 49814
  CDS (1)..(852): transl_table=11

SEQ ID NO: 67316 - protein, 283 aa, Streptococcus pneumoniae; identical to SEQ ID NO: 49815

SEQ ID NO: 67317 - DNA, 852 bp, Streptococcus pneumoniae; identical to SEQ ID NO: 49816
  CDS (1)..(852): transl_table=11

SEQ ID NO: 67318 - protein, 283 aa, Streptococcus pneumoniae; identical to SEQ ID NO: 49817

SEQ ID NO: 67319 - DNA, 882 bp, Pseudomonas fluorescens; identical to SEQ ID NO: 49818
  CDS (1)..(882): transl_table=11

SEQ ID NO: 67320 - protein, 293 aa, Pseudomonas fluorescens; identical to SEQ ID NO: 49819

SEQ ID NO: 67321 - DNA, 1005 bp, Xenopus laevis; identical to SEQ ID NO: 49820
  CDS (1)..(1005)

SEQ ID NO: 67322 - protein, 334 aa, Xenopus laevis; identical to SEQ ID NO: 49821

SEQ ID NO: 67323 - DNA, 900 bp, Shigella boydii; identical to SEQ ID NO: 49822
  CDS (1)..(900): transl_table=11

SEQ ID NO: 67324 - protein, 299 aa, Shigella boydii; identical to SEQ ID NO: 49823

SEQ ID NO: 67325 - DNA, 915 bp, Streptomyces griseus subsp; identical to SEQ ID NO: 49824
  CDS (1)..(915): transl_table=11

SEQ ID NO: 67326 - protein, 304 aa, Streptomyces griseus subsp; identical to SEQ ID NO: 49825

SEQ ID NO: 67327 - DNA, 924 bp, Saccharopolyspora erythraea; identical to SEQ ID NO: 49826
  CDS (1)..(924): transl_table=11

SEQ ID NO: 67328 - protein, 307 aa, Saccharopolyspora erythraea; identical to SEQ ID NO: 49827

SEQ ID NO: 67329 - DNA, 909 bp, Xanthomonas campestris pv; identical to SEQ ID NO: 49828
  CDS (1)..(909): transl_table=11

SEQ ID NO: 67330 - protein, 302 aa, Xanthomonas campestris pv; identical to SEQ ID NO: 49829

SEQ ID NO: 67331 - DNA, 870 bp, Yersinia enterocolitica; identical to SEQ ID NO: 49830
  CDS (1)..(870): transl_table=11

SEQ ID NO: 67332 - protein, 289 aa, Yersinia enterocolitica; identical to SEQ ID NO: 49831

SEQ ID NO: 67333 - DNA, 843 bp, Lactobacillus rhamnosus; identical to SEQ ID NO: 49832
  CDS (1)..(843): transl_table=11

SEQ ID NO: 67334 - protein, 280 aa, Lactobacillus rhamnosus; identical to SEQ ID NO: 49833

SEQ ID NO: 67335 - DNA, 843 bp, Lactobacillus rhamnosus; identical to SEQ ID NO: 49834
  CDS (1)..(843): transl_table=11

SEQ ID NO: 67336 - protein, 280 aa, Lactobacillus rhamnosus; identical to SEQ ID NO: 49835

SEQ ID NO: 67337 - DNA, 843 bp, Lactobacillus rhamnosus; identical to SEQ ID NO: 49836
  CDS (1)..(843): transl_table=11

SEQ ID NO: 67338 - protein, 280 aa, Lactobacillus rhamnosus; identical to SEQ ID NO: 49837

SEQ ID NO: 67339 - DNA, 912 bp, Acetobacter tropicalis; identical to SEQ ID NO: 49838
  CDS (1)..(912): transl_table=11

SEQ ID NO: 67340 - protein, 303 aa, Acetobacter tropicalis; identical to SEQ ID NO: 49839

SEQ ID NO: 67341 - DNA, 900 bp, Escherichia coli; identical to SEQ ID NO: 49840
  CDS (1)..(900): transl_table=11

SEQ ID NO: 67342 - protein, 299 aa, Escherichia coli; identical to SEQ ID NO: 49841

SEQ ID NO: 67343 - DNA, 900 bp, Shigella dysenteriae; identical to SEQ ID NO: 49842
  CDS (1)..(900): transl_table=11

SEQ ID NO: 67344 - protein, 299 aa, Shigella dysenteriae; identical to SEQ ID NO: 49843

SEQ ID NO: 67345 - DNA, 963 bp, Mus musculus; identical to SEQ ID NO: 49844
  CDS (1)..(963)

SEQ ID NO: 67346 - protein, 320 aa, Mus musculus; identical to SEQ ID NO: 49845

SEQ ID NO: 67347 - DNA, 879 bp, Yersinia enterocolitica; identical to SEQ ID NO: 49846
  CDS (1)..(879): transl_table=11

SEQ ID NO: 67348 - protein, 292 aa, Yersinia enterocolitica; identical to SEQ ID NO: 49847

SEQ ID NO: 67349 - DNA, 855 bp, Streptococcus oralis; identical to SEQ ID NO: 49848
  CDS (1)..(855): transl_table=11

SEQ ID NO: 67350 - protein, 284 aa, Streptococcus oralis; identical to SEQ ID NO: 49849

SEQ ID NO: 67351 - DNA, 900 bp, Shigella boydii; identical to SEQ ID NO: 49850
  CDS (1)..(900): transl_table=11

SEQ ID NO: 67352 - protein, 299 aa, Shigella boydii; identical to SEQ ID NO: 49851

SEQ ID NO: 67353 - DNA, 885 bp, Clostridium thermosaccharolyticum; identical to SEQ ID NO: 49852
  CDS (1)..(885): transl_table=11

SEQ ID NO: 67354 - protein, 294 aa, Clostridium thermosaccharolyticum; identical to SEQ ID NO: 49853

SEQ ID NO: 67355 - DNA, 891 bp, Klebsiella terrigena; identical to SEQ ID NO: 49854
  CDS (1)..(891): transl_table=11

SEQ ID NO: 67356 - protein, 296 aa, Klebsiella terrigena; identical to SEQ ID NO: 49855

SEQ ID NO: 67357 - DNA, 861 bp, Bacillus stearothermophilus; identical to SEQ ID NO: 49856
  CDS (1)..(861): transl_table=11

SEQ ID NO: 67358 - protein, 286 aa, Bacillus stearothermophilus; identical to SEQ ID NO: 49857

SEQ ID NO: 67359 - DNA, 846 bp, Bacillus stearothermophilus; identical to SEQ ID NO: 49858
  CDS (1)..(846): transl_table=11

SEQ ID NO: 67360 - protein, 281 aa, Bacillus stearothermophilus; identical to SEQ ID NO: 49859

SEQ ID NO: 67361 - DNA, 849 bp, Bacillus stearothermophilus; identical to SEQ ID NO: 49860
  CDS (1)..(849): transl_table=11

SEQ ID NO: 67362 - protein, 282 aa, Bacillus stearothermophilus; identical to SEQ ID NO: 49861

SEQ ID NO: 67363 - DNA, 864 bp, Bacteroides coprosuis; identical to SEQ ID NO: 49862
  CDS (1)..(864): transl_table=11

SEQ ID NO: 67364 - protein, 287 aa, Bacteroides coprosuis; identical to SEQ ID NO: 49863

SEQ ID NO: 67365 - DNA, 852 bp, Thermotoga sp; identical to SEQ ID NO: 49864
  CDS (1)..(852): transl_table=11

SEQ ID NO: 67366 - protein, 283 aa, Thermotoga sp; identical to SEQ ID NO: 49865

SEQ ID NO: 67367 - DNA, 867 bp, Sphingomonas elodea; identical to SEQ ID NO: 49866
  CDS (1)..(867): transl_table=11

SEQ ID NO: 67368 - protein, 288 aa, Sphingomonas elodea; identical to SEQ ID NO: 49867

SEQ ID NO: 67369 - DNA, 852 bp, Streptococcus gordonii; identical to SEQ ID NO: 49868
  CDS (1)..(852): transl_table=11

SEQ ID NO: 67370 - protein, 283 aa, Streptococcus gordonii; identical to SEQ ID NO: 49869
  misc_feature (200)..(200): Xaa can be any naturally occuring amino acid

SEQ ID NO: 67371 - DNA, 888 bp, Vibrio cholerae; identical to SEQ ID NO: 49870
  CDS (1)..(888): transl_table=11

SEQ ID NO: 67372 - protein, 295 aa, Vibrio cholerae; identical to SEQ ID NO: 49871

SEQ ID NO: 67373 - DNA, 855 bp, Vibrio cholerae; identical to SEQ ID NO: 49872
  CDS (1)..(855): transl_table=11

SEQ ID NO: 67374 - protein, 284 aa, Vibrio cholerae; identical to SEQ ID NO: 49873

SEQ ID NO: 67375 - DNA, 891 bp, Vibrio cholerae; identical to SEQ ID NO: 49874
  CDS (1)..(891): transl_table=11

SEQ ID NO: 67376 - protein, 296 aa, Vibrio cholerae; identical to SEQ ID NO: 49875

SEQ ID NO: 67377 - DNA, 891 bp, Vibrio cholerae; identical to SEQ ID NO: 49876
  CDS (1)..(891): transl_table=11

SEQ ID NO: 67378 - protein, 296 aa, Vibrio cholerae; identical to SEQ ID NO: 49877

SEQ ID NO: 67379 - DNA, 891 bp, Vibrio cholerae; identical to SEQ ID NO: 49878
  CDS (1)..(891): transl_table=11

SEQ ID NO: 67380 - protein, 296 aa, Vibrio cholerae; identical to SEQ ID NO: 49879

SEQ ID NO: 67381 - DNA, 891 bp, Vibrio cholerae; identical to SEQ ID NO: 49880
  CDS (1)..(891): transl_table=11

SEQ ID NO: 67382 - protein, 296 aa, Vibrio cholerae; identical to SEQ ID NO: 49881

SEQ ID NO: 67383 - DNA, 873 bp, Vibrio vulnificus; identical to SEQ ID NO: 49882
  CDS (1)..(873): transl_table=11

SEQ ID NO: 67384 - protein, 290 aa, Vibrio vulnificus; identical to SEQ ID NO: 49883

SEQ ID NO: 67385 - DNA, 900 bp, Lactococcus lactis subsp; identical to SEQ ID NO: 49884
  CDS (1)..(900): transl_table=11

SEQ ID NO: 67386 - protein, 299 aa, Lactococcus lactis subsp; identical to SEQ ID NO: 49885

SEQ ID NO: 67387 - DNA, 867 bp, Streptomyces roseochromogenes subsp; identical to SEQ ID NO: 49886
  CDS (1)..(867): transl_table=11

SEQ ID NO: 67388 - protein, 288 aa, Streptomyces roseochromogenes subsp; identical to SEQ ID NO: 49887

SEQ ID NO: 67389 - DNA, 837 bp, Streptococcus suis; identical to SEQ ID NO: 49888
  CDS (1)..(837): transl_table=11

SEQ ID NO: 67390 - protein, 278 aa, Streptococcus suis; identical to SEQ ID NO: 49889

SEQ ID NO: 67391 - DNA, 903 bp, Aeromonas hydrophila; identical to SEQ ID NO: 49890
  CDS (1)..(903): transl_table=11

SEQ ID NO: 67392 - protein, 300 aa, Aeromonas hydrophila; identical to SEQ ID NO: 49891

SEQ ID NO: 67393 - DNA, 903 bp, Aeromonas hydrophila; identical to SEQ ID NO: 49892
  CDS (1)..(903): transl_table=11

SEQ ID NO: 67394 - protein, 300 aa, Aeromonas hydrophila; identical to SEQ ID NO: 49893

SEQ ID NO: 67395 - DNA, 1002 bp, Lactobacillus gasseri; identical to SEQ ID NO: 49894
  CDS (1)..(1002): transl_table=11

SEQ ID NO: 67396 - protein, 333 aa, Lactobacillus gasseri; identical to SEQ ID NO: 49895

SEQ ID NO: 67397 - DNA, 921 bp, Leptospira interrogans; identical to SEQ ID NO: 49896
  CDS (1)..(921): transl_table=11

SEQ ID NO: 67398 - protein, 306 aa, Leptospira interrogans; identical to SEQ ID NO: 49897

SEQ ID NO: 67399 - DNA, 900 bp, Shigella boydii; identical to SEQ ID NO: 49898
  CDS (1)..(900): transl_table=11

SEQ ID NO: 67400 - protein, 299 aa, Shigella boydii; identical to SEQ ID NO: 49899

SEQ ID NO: 67401 - DNA, 900 bp, Shigella boydii; identical to SEQ ID NO: 49900
  CDS (1)..(900): transl_table=11

SEQ ID NO: 67402 - protein, 299 aa, Shigella boydii; identical to SEQ ID NO: 49901

SEQ ID NO: 67403 - DNA, 918 bp, Saccharopolyspora spinosa; identical to SEQ ID NO: 49902
  CDS (1)..(918): transl_table=11

SEQ ID NO: 67404 - protein, 305 aa, Saccharopolyspora spinosa; identical to SEQ ID NO: 49903

SEQ ID NO: 67405 - DNA, 849 bp, Aneurinibacillus thermoaerophilus; identical to SEQ ID NO: 49904
  CDS (1)..(849): transl_table=11

SEQ ID NO: 67406 - protein, 282 aa, Aneurinibacillus thermoaerophilus; identical to SEQ ID NO: 49905

SEQ ID NO: 67407 - DNA, 894 bp, Acinetobacter calcoaceticus; identical to SEQ ID NO: 49906
  CDS (1)..(894): transl_table=11

SEQ ID NO: 67408 - protein, 297 aa, Acinetobacter calcoaceticus; identical to SEQ ID NO: 49907

SEQ ID NO: 67409 - DNA, 897 bp, Burkholderia mallei; identical to SEQ ID NO: 49908
  CDS (1)..(897): transl_table=11

SEQ ID NO: 67410 - protein, 298 aa, Burkholderia mallei; identical to SEQ ID NO: 49909

SEQ ID NO: 67411 - DNA, 930 bp, Azospirillum brasilense; identical to SEQ ID NO: 49910
  CDS (1)..(930): transl_table=11

SEQ ID NO: 67412 - protein, 309 aa, Azospirillum brasilense; identical to SEQ ID NO: 49911

SEQ ID NO: 67413 - DNA, 879 bp, Actinobacillus actinomycetemcomitans; identical to SEQ ID NO: 49912
  CDS (1)..(879): transl_table=11

SEQ ID NO: 67414 - protein, 292 aa, Actinobacillus actinomycetemcomitans; identical to SEQ ID NO: 49913

SEQ ID NO: 67415 - DNA, 888 bp, Acetobacter xylinus; identical to SEQ ID NO: 49914
  CDS (1)..(888): transl_table=11

SEQ ID NO: 67416 - protein, 295 aa, Acetobacter xylinus; identical to SEQ ID NO: 49915

SEQ ID NO: 67417 - DNA, 900 bp, Salmonella enterica; identical to SEQ ID NO: 49916
  CDS (1)..(900): transl_table=11

SEQ ID NO: 67418 - protein, 299 aa, Salmonella enterica; identical to SEQ ID NO: 49917

SEQ ID NO: 67419 - DNA, 900 bp, Salmonella enterica; identical to SEQ ID NO: 49918
  CDS (1)..(900): transl_table=11

SEQ ID NO: 67420 - protein, 299 aa, Salmonella enterica; identical to SEQ ID NO: 49919

SEQ ID NO: 67421 - DNA, 867 bp, Streptomyces rishiriensis; identical to SEQ ID NO: 49920
  CDS (1)..(867): transl_table=11

SEQ ID NO: 67422 - protein, 288 aa, Streptomyces rishiriensis; identical to SEQ ID NO: 49921

SEQ ID NO: 67423 - DNA, 879 bp, Actinobacillus actinomycetemcomitans; identical to SEQ ID NO: 49922
  CDS (1)..(879): transl_table=11

SEQ ID NO: 67424 - protein, 292 aa, Actinobacillus actinomycetemcomitans; identical to SEQ ID NO: 49923

SEQ ID NO: 67425 - DNA, 885 bp, Streptomyces antibioticus; identical to SEQ ID NO: 49924
  CDS (1)..(885): transl_table=11

SEQ ID NO: 67426 - protein, 294 aa, Streptomyces antibioticus; identical to SEQ ID NO: 49925

SEQ ID NO: 67427 - DNA, 876 bp, Streptomyces nogalater; identical to SEQ ID NO: 49926
  CDS (1)..(876): transl_table=11

SEQ ID NO: 67428 - protein, 291 aa, Streptomyces nogalater; identical to SEQ ID NO: 49927

SEQ ID NO: 67429 - DNA, 921 bp, Leptospira interrogans; identical to SEQ ID NO: 49928
  CDS (1)..(921): transl_table=11

SEQ ID NO: 67430 - protein, 306 aa, Leptospira interrogans; identical to SEQ ID NO: 49929

SEQ ID NO: 67431 - DNA, 879 bp, Actinobacillus actinomycetemcomitans; identical to SEQ ID NO: 49930
  CDS (1)..(879): transl_table=11

SEQ ID NO: 67432 - protein, 292 aa, Actinobacillus actinomycetemcomitans; identical to SEQ ID NO: 49931

SEQ ID NO: 67433 - DNA, 855 bp, Streptococcus pneumoniae; identical to SEQ ID NO: 49932
  CDS (1)..(855): transl_table=11

SEQ ID NO: 67434 - protein, 284 aa, Streptococcus pneumoniae; identical to SEQ ID NO: 49933

SEQ ID NO: 67435 - DNA, 891 bp, Klebsiella pneumoniae; identical to SEQ ID NO: 49934
  CDS (1)..(891): transl_table=11

SEQ ID NO: 67436 - protein, 296 aa, Klebsiella pneumoniae; identical to SEQ ID NO: 49935

SEQ ID NO: 67437 - DNA, 921 bp, Leptospira borgpetersenii; identical to SEQ ID NO: 49936
  CDS (1)..(921): transl_table=11

SEQ ID NO: 67438 - protein, 306 aa, Leptospira borgpetersenii; identical to SEQ ID NO: 49937

SEQ ID NO: 67439 - DNA, 906 bp, Escherichia coli; identical to SEQ ID NO: 49938
  CDS (1)..(906): transl_table=11

SEQ ID NO: 67440 - protein, 301 aa, Escherichia coli; identical to SEQ ID NO: 49939

SEQ ID NO: 67441 - DNA, 891 bp, Rhizobium sp; identical to SEQ ID NO: 49940
  CDS (1)..(891): transl_table=11

SEQ ID NO: 67442 - protein, 296 aa, Rhizobium sp; identical to SEQ ID NO: 49941

SEQ ID NO: 67443 - DNA, 900 bp, Salmonella typhimurium; identical to SEQ ID NO: 49942
  CDS (1)..(900): transl_table=11

SEQ ID NO: 67444 - protein, 299 aa, Salmonella typhimurium; identical to SEQ ID NO: 49943

SEQ ID NO: 67445 - DNA, 915 bp, Streptomyces griseus; identical to SEQ ID NO: 49944
  CDS (1)..(915): transl_table=11

SEQ ID NO: 67446 - protein, 304 aa, Streptomyces griseus; identical to SEQ ID NO: 49945

SEQ ID NO: 67447 - DNA, 26 bp, Artificial sequence
  Primer sequence
atgaatatcctcctttttggcaaaac

SEQ ID NO: 67448 - DNA, 27 bp, Artificial sequence
  Primer sequence
ttaaattgctgtagtcgtaaataattc

SEQ ID NO: 67449 - protein, 351 aa, Artificial sequence; identical to SEQ ID NO: 49948
  Consensus
  Variant (2)..(3): Xaa in position 2 to 3 is any amino acid
  Variant (6)..(6): Xaa in position 6 is any amino acid
  Variant (8)..(9): Xaa in position 8 to 9 is any amino acid
  Variant (11)..(19): Xaa in position 11 to 19 is any amino acid
  Variant (20)..(63): Xaa in position 20 to 63 is any or no amino acid
  Variant (65)..(69): Xaa in position 65 to 69 is any amino acid
  Variant (70)..(70): Xaa in position 70 is any or no amino acid
  Variant (73)..(73): Xaa in position 73 is any amino acid
  Variant (75)..(75): Xaa in position 75 is any amino acid
  Variant (78)..(78): Xaa in position 78 is any amino acid
  Variant (81)..(89): Xaa in position 81 to 89 is any amino acid
  Variant (90)..(91): Xaa in position 90 to 91 is any or no amino acid
  Variant (93)..(99): Xaa in position 93 to 99 is any amino acid
  Variant (101)..(113): Xaa in position 101 to 113 is any amino acid
  Variant (120)..(120): Xaa in position 120 is any amino acid
  Variant (122)..(133): Xaa in position 122 to 133 is any amino acid
  Variant (134)..(141): Xaa in position 134 to 141 is any or no amino acid
  Variant (143)..(145): Xaa in position 143 to 145 is any amino acid
  Variant (148)..(149): Xaa in position 148 to 149 is any amino acid
  Variant (151)..(152): Xaa in position 151 to 152 is any amino acid
  Variant (155)..(165): Xaa in position 155 to 165 is any amino acid
  Variant (166)..(173): Xaa in position 166 to 173 is any or no amino acid
  Variant (176)..(176): Xaa in position 176 is any amino acid
  Variant (178)..(182): Xaa in position 178 to 182 is any amino acid
  Variant (184)..(184): Xaa in position 184 is any amino acid
  Variant (185)..(189): Xaa in position 185 to 189 is any or no amino acid
  Variant (192)..(193): Xaa in position 192 to 193 is any amino acid
  Variant (195)..(205): Xaa in position 195 to 205 is any amino acid
  Variant (206)..(213): Xaa in position 206 to 213 is any or no amino acid
  Variant (215)..(216): Xaa in position 215 to 216 is any amino acid
  Variant (219)..(219): Xaa in position 219 is any amino acid
  Variant (221)..(221): Xaa in position 221 is any amino acid
  Variant (224)..(228): Xaa in position 224 to 228 is any amino acid
  Variant (230)..(239): Xaa in position 230 to 239 is any amino acid
  Variant (240)..(257): Xaa in position 240 to 257 is any or no amino acid
  Variant (259)..(260): Xaa in position 259 to 260 is any amino acid
  Variant (262)..(268): Xaa in position 262 to 268 is any amino acid
  Variant (269)..(273): Xaa in position 269 to 273 is any or no amino acid
  Variant (275)..(277): Xaa in position 275 to 277 is any amino acid
  Variant (279)..(296): Xaa in position 279 to 296 is any amino acid
  Variant (297)..(316): Xaa in position 297 to 316 is any or no amino acid
  Variant (318)..(318): Xaa in position 318 is any amino acid
  Variant (321)..(322): Xaa in position 321 to 322 is any amino acid
  Variant (324)..(324): Xaa in position 324 is any amino acid
  Variant (326)..(335): Xaa in position 326 to 335 is any amino acid
  Variant (336)..(350): Xaa in position 336 to 350 is any or no amino acid

SEQ ID NO: 67450 - protein, 10 aa, Artificial sequence
  Consensus
  Variant (2)..(3): Xaa in position 2 to 3 is any or no amino acid
  Variant (6)..(6): Xaa in position 6 is Leu or Val
  Variant (7)..(7): Xaa in position 7 is Ala, Gly, Ser or Val
  Variant (8)..(9): Xaa in position 8 to 9 is any amino acid
  Variant (10)..(10): Xaa in position 10 is Phe, Ile, Leu, Met or Val
GXXGQXXXXX

SEQ ID NO: 67451 - protein, 11 aa, Artificial sequence
  Consensus
  Variant (2)..(2): Xaa in position 2 is any or no amino acid
  Variant (4)..(4): Xaa in position 4 is His, Trp or Tyr
  Variant (6)..(6): Xaa in position 6 is any amino acid
  Variant (9)..(9): Xaa in position 9 is any amino acid
  Variant (10)..(10): Xaa in position 10 is Ala, Cys or Ser
AXAXTXVDXXE

SEQ ID NO: 67452 - protein, 8 aa, Artificial sequence
  Consensus
  Variant (7)..(7): Xaa in position 7 is any amino acid
STDYVFXG

SEQ ID NO: 67453 - protein, 13 aa, Artificial sequence
  Consensus
  Variant (2)..(2): Xaa in position 2 is any amino acid
  Variant (3)..(3): Xaa in position 3 is Gly, Asn, Ser or Thr
  Variant (4)..(4): Xaa in position 4 is any amino acid
  Variant (7)..(7): Xaa in position 7 is any amino acid
  Variant (8)..(8): Xaa in position 8 is Ser or Thr
  Variant (10)..(11): Xaa in position 10 to 11 is any amino acid
PXXXYGXXKXXGE

SEQ ID NO: 67454 - protein, 10 aa, Artificial sequence
  Consensus
  Variant (2)..(2): Xaa in position 2 is any amino acid
  Variant (3)..(3): Xaa in position 3 is Ala, Cys, Gly or Ser
  Variant (5)..(5): Xaa in position 5 is Leu or Val
  Variant (6)..(6): Xaa in position 6 is any amino acid
  Variant (7)..(7): Xaa in position 7 is Ala, Cys, Gly or Ser
  Variant (8)..(9): Xaa in position 8 to 9 is any amino acid
RXXWXXXXXG

SEQ ID NO: 67455 - protein, 17 aa, Artificial sequence
  Consensus
  Variant (2)..(2): Xaa in position 2 is any amino acid
  Variant (3)..(3): Xaa in position 3 is any or no amino acid
  Variant (5)..(5): Xaa in position 5 is any or no amino acid
  Variant (7)..(7): Xaa in position 7 is any amino acid
  Variant (9)..(9): Xaa in position 9 is any amino acid
  Variant (11)..(11): Xaa in position 11 is Ser or Thr
  Variant (12)..(12): Xaa in position 12 is any amino acid
  Variant (13)..(13): Xaa in position 13 is Ala, Ser, Thr or Val
  Variant (14)..(15): Xaa in position 14 to 15 is any amino acid
  Variant (16)..(16): Xaa in position 16 is Ile or Leu
  Variant (17)..(17): Xaa in position 17 is Ala, Asn or Val
VXXDXQXGXPXXXXXXX

SEQ ID NO: 67456 - protein, 9 aa, Artificial sequence
  Consensus
  Variant (2)..(2): Xaa in position 2 is any amino acid
  Variant (5)..(6): Xaa in position 5 to 6 is any amino acid
  Variant (8)..(8): Xaa in position 8 is any amino acid
  Variant (9)..(9): Xaa in position 9 is Leu or Met
AXRPXXSXX

SEQ ID NO: 67457 - DNA, 417 bp, Escherichia coli K12; identical to SEQ ID NO: 50153
  CDS (1)..(417): transl_table=11

SEQ ID NO: 67458 - protein, 138 aa, Escherichia coli K12; identical to SEQ ID NO: 50154

SEQ ID NO: 67459 - DNA, 495 bp, Escherichia coli CFT073; identical to SEQ ID NO: 50155
  CDS (1)..(495): transl_table=11

SEQ ID NO: 67460 - protein, 164 aa, Escherichia coli CFT073; identical to SEQ ID NO: 50156

SEQ ID NO: 67461 - DNA, 507 bp, Serratia marcescens; identical to SEQ ID NO: 50157
  CDS (1)..(507): transl_table=11

SEQ ID NO: 67462 - protein, 168 aa, Serratia marcescens; identical to SEQ ID NO: 50158

SEQ ID NO: 67463 - DNA, 28 bp, Artificial sequence
  Primer sequence
atgatgactaaaacccaaataaataaat

SEQ ID NO: 67464 - DNA, 26 bp, Artificial sequence
  Primer sequence
ttaaatcagtaagttggcagcatcac

SEQ ID NO: 67465 - protein, 121 aa, Artificial sequence; identical to SEQ ID NO: 50161
  Consensus
  Variant (2)..(4): Xaa in position 2 to 4 is any amino acid
  Variant (6)..(9): Xaa in position 6 to 9 is any amino acid
  Variant (12)..(14): Xaa in position 12 to 14 is any amino acid
  Variant (16)..(24): Xaa in position 16 to 24 is any amino acid
  Variant (26)..(46): Xaa in position 26 to 46 is any amino acid
  Variant (48)..(52): Xaa in position 48 to 52 is any amino acid
  Variant (55)..(59): Xaa in position 55 to 59 is any amino acid
  Variant (66)..(66): Xaa in position 66 is any amino acid
  Variant (70)..(73): Xaa in position 70 to 73 is any amino acid
  Variant (75)..(77): Xaa in position 75 to 77 is any amino acid
  Variant (79)..(82): Xaa in position 79 to 82 is any amino acid
  Variant (83)..(85): Xaa in position 83 to 85 is any or no amino acid
  Variant (87)..(90): Xaa in position 87 to 90 is any amino acid
  Variant (92)..(94): Xaa in position 92 to 94 is any amino acid
  Variant (96)..(96): Xaa in position 96 is any amino acid
  Variant (98)..(102): Xaa in position 98 to 102 is any amino acid
  Variant (104)..(104): Xaa in position 104 is any amino acid
  Variant (106)..(110): Xaa in position 106 to 110 is any amino acid
  Variant (113)..(116): Xaa in position 113 to 116 is any amino acid
  Variant (118)..(118): Xaa in position 118 is any amino acid
  Variant (120)..(120): Xaa in position 120 is any amino acid

SEQ ID NO: 67466 - protein, 25 aa, Artificial sequence
  Consensus
  Variant (2)..(3): Xaa in position 2 to 3 is any or no amino acid
  Variant (5)..(5): Xaa in position 5 is Met or Val
  Variant (6)..(6): Xaa in position 6 is Ala or Asn
  Variant (8)..(8): Xaa in position 8 is any amino acid
  Variant (9)..(9): Xaa in position 9 is any or no amino acid
  Variant (12)..(12): Xaa in position 12 is Phe or Leu
  Variant (13)..(13): Xaa in position 13 is Ala or Glu
  Variant (14)..(14): Xaa in position 14 is Ala or Ser
  Variant (16)..(16): Xaa in position 16 is Leu or Val
  Variant (17)..(17): Xaa in position 17 is any amino acid
  Variant (18)..(18): Xaa in position 18 is Glu or Pro
  Variant (19)..(19): Xaa in position 19 is Glu or Ser
  Variant (20)..(20): Xaa in position 20 is Phe or Val
  Variant (21)..(21): Xaa in position 21 is Ile or Leu
  Variant (22)..(22): Xaa in position 22 is Glu or Lys
  Variant (23)..(23): Xaa in position 23 is Asp or Ser
  Variant (24)..(24): Xaa in position 24 is Ile or Leu
KXXMXXDXXYPXXXPXXXXXXXXXI

SEQ ID NO: 67467 - protein, 33 aa, Artificial sequence; identical to SEQ ID NO: 50163
  Consensus
  Variant (2)..(2): Xaa in position 2 is Phe or Ile
  Variant (3)..(3): Xaa in position 3 is any amino acid
  Variant (4)..(4): Xaa in position 4 is Asn or Thr
  Variant (5)..(5): Xaa in position 5 is Gln or Arg
  Variant (6)..(6): Xaa in position 6 is Leu or Pro
  Variant (9)..(10): Xaa in position 9 to 10 is any amino acid
  Variant (11)..(11): Xaa in position 11 is any or no amino acid
  Variant (13)..(13): Xaa in position 13 is any amino acid
  Variant (14)..(14): Xaa in position 14 is any or no amino acid
  Variant (21)..(21): Xaa in position 21 is any amino acid
  Variant (25)..(25): Xaa in position 25 is any amino acid
  Variant (26)..(26): Xaa in position 26 is any or no amino acid
  Variant (28)..(30): Xaa in position 28 to 30 is any amino acid
  Variant (31)..(31): Xaa in position 31 is Ile or Val
  Variant (32)..(32): Xaa in position 32 is Pro or Gln
  Variant (33)..(33): Xaa in position 33 is Ala or Glu

SEQ ID NO: 67468 - protein, 37 aa, Artificial sequence; identical to SEQ ID NO: 50164
  Consensus
  Variant (2)..(6): Xaa in position 2 to 6 is any amino acid
  Variant (7)..(7): Xaa in position 7 is any or no amino acid
  Variant (9)..(9): Xaa in position 9 is any amino acid
  Variant (10)..(10): Xaa in position 10 is any or no amino acid
  Variant (12)..(12): Xaa in position 12 is Asp or Asn
  Variant (14)..(14): Xaa in position 14 is Asp or Glu
  Variant (15)..(15): Xaa in position 15 is any amino acid
  Variant (16)..(16): Xaa in position 16 is Phe or Tyr
  Variant (17)..(17): Xaa in position 17 is Ile or Val
  Variant (18)..(18): Xaa in position 18 is Asp or Asn
  Variant (20)..(20): Xaa in position 20 is Asp or Asn
  Variant (22)..(22): Xaa in position 22 is Gln or Thr
  Variant (23)..(23): Xaa in position 23 is Asp or Glu
  Variant (24)..(24): Xaa in position 24 is Lys or Arg
  Variant (25)..(26): Xaa in position 25 to 26 is Leu or Val
  Variant (29)..(29): Xaa in position 29 is Asp or Glu
  Variant (30)..(30): Xaa in position 30 is any amino acid
  Variant (31)..(31): Xaa in position 31 is Gly or Ser
  Variant (32)..(32): Xaa in position 32 is Ile or Met
  Variant (34)..(34): Xaa in position 34 is Ile or Leu
  Variant (36)..(36): Xaa in position 36 is Ala or Thr

SEQ ID NO: 67469 - DNA, 672 bp, Escherichia coli
  CDS (1)..(672)
atgacctggtctcgtcgccagtttctcaccggcgtcggcgtgctggcagccgtcagcggcaccgcagggcgcgtggtggcgaaaacgttgaatatcaatggggtgcgttacggcatggtgcatgacgagtcgttatgcatcggctgtaccgcctgtatggatgcttgtcgggaagtgaacaaggtgccggaaggcgtctcgcgcctgacgattattcgtagcgagccgcagggcgaatttcctgatgtgaaatatcgcttcttccgtaagtcttgccagcactgcgatcatgcgccgtgcgttgacgtctgcccgaccggtgcgtcttttcgtgatgccgctagcgggattgtcgatgttaatcctgatctctgcgtcggttgtcagtactgcatcgccgcctgtccgtaccgcgtgcgctttatccatccggtcacgaagacggcggacaaatgcgatttctgccgtaaaaccaatttgcaggccggtaagctgcccgcgtgtgttgaggcttgcccgacgaaggcgctgacgtttggcaatctggacgatcctaacagtgagatttcgcaactgctgcgccagaagcctacttaccgctacaagctggcgctgggaaccaaaccgaagctgtaccgcgtaccgtttaaatacggggaggtgagccaatga

SEQ ID NO: 67470 - protein, 223 aa, Escherichia coli
MTWSRRQFLTGVGVLAAVSGTAGRVVAKTLNINGVRYGMVHDESLCIGCTACMDACREVNKVPEGVSRLTIIRSEPQGEFPDVKYRFFRKSCQHCDHAPCVDVCPTGASFRDAASGIVDVNPDLCVGCQYCIAACPYRVRFIHPVTKTADKCDFCRKTNLQAGKLPACVEACPTKALTFGNLDDPNSEISQLLRQKPTYRYKLALGTKPKLYRVPFKYGEVSQ

SEQ ID NO: 67471 - DNA, 543 bp, Archaeoglobus fulgidus DSM 4304
  CDS (1)..(543): transl_table=11
atggagaacggcgacagatacgtttacgttgtggatgtttcgaagtgctacggctgcctttcctgcgttgctgcatgtgccgctgaaaacaacgttcccgtcggctacttccgcacgtgggttgagagatatgcaatgaacggaagggtagccttcgtgccaaagatatgtaaccactgtgataatccatcttgcgtccacgcctgtccagtcaatgccacctacaaaaccgaggaaggcttggttctgattgacgacgagatttgtattgggtgtggtgcgtgcatacaggcttgcccctatggagcgaggttcagaaaccccgttaagggcacggctgacaaatgcaccctctgcaaccacagaattccagaaaggctcccggcctgcgtcgagtcgtgcccaacctctgcgagggtttacggcaaaatgagcgataaggcggtgaaggaaatactctccaagaaaaacgctgtggtgcttaaggcttacacgggcaacgagccccatacctattacgtaagccttacgggggtggagtaa

SEQ ID NO: 67472 - protein, 180 aa, Archaeoglobus fulgidus DSM 4304
MENGDRYVYVVDVSKCYGCLSCVAACAAENNVPVGYFRTWVERYAMNGRVAFVPKICNHCDNPSCVHACPVNATYKTEEGLVLIDDEICIGCGACIQACPYGARFRNPVKGTADKCTLCNHRIPERLPACVESCPTSARVYGKMSDKAVKEILSKKNAVVLKAYTGNEPHTYYVSLTGVE

SEQ ID NO: 67473 - DNA, 756 bp, Archaeoglobus fulgidus DSM 4304
  CDS (1)..(756): transl_table=11
atggtgaggtatggaatggttatagacctgaacagatgtataggctgcagaagctgcgctgttatttgcaaaattcacaactctctcccgccgggcacttggtggcacagagttgagaccgtagggagcaaagaacatcaaactccgtcgggagattaccccaatctgactgaactttacctcccagtcccctgcatgcattgcgataatccaccctgcgttaaggtatgccccgtcggtgcaacgtggaaaagagaggacggggttgtgctggtggactttgagaggtgcattggctgcaggtactgcatgactgcctgcccttatggtgtgaggcagtttaactgggaagataaggataaggcggtagagaaaggtttcaaggcggcaggatttgaaggtgagtacgtagaaggatacaggcacggatatcccattgatcacagaaccaaagacggaaggctggtttacacgcccaagagaccaagaggagtggttgaaaagtgcacattctgtgtgcagtatattgacaaaggtctaaagcccgcatgtgttagaggctgtccagggaatgcgaggattttcggagacctcgatgaccctaacagtgagatttcaaaggtgttgagggacggggcacacacgagattgctggaagatttggggacggagccaaaggtgttctaccttttacctatgaaaagggctgaaagaggagaagttaggtattctccagaactggaggtgaaattgtga

SEQ ID NO: 67474 - protein, 251 aa, Archaeoglobus fulgidus DSM 4304
MVRYGMVIDLNRCIGCRSCAVICKIHNSLPPGTWWHRVETVGSKEHQTPSGDYPNLTELYLPVPCMHCDNPPCVKVCPVGATWKREDGVVLVDFERCIGCRYCMTACPYGVRQFNWEDKDKAVEKGFKAAGFEGEYVEGYRHGYPIDHRTKDGRLVYTPKRPRGVVEKCTFCVQYIDKGLKPACVRGCPGNARIFGDLDDPNSEISKVLRDGAHTRLLEDLGTEPKVFYLLPMKRAERGEVRYSPELEVKL

SEQ ID NO: 67475 - DNA, 549 bp, Archaeoglobus fulgidus DSM 4304
  CDS (1)..(549): transl_table=11
atggcaagatacggcatggtcatagaccttgagaagtgtctcggctgtgaggcgtgcgttacggcatgcatcgaggagaacaacgttccctacgagacggggctgagaacccaggttcacagggttgttaccggcaagttccccaacgtctcgacgatgtacatgcacagaatatgccagcactgcgagcatcccggctgtgttcacgtatgccctactggggcgagctacgtaaacgaggatggcatagttctgatagactacgacctctgcatcgggtgcaagtactgcatggtcgcatgcccttacctggcaagatatatccacccagagaggcacacacctgacaagtgcactttctgcgttcacagggttaaggaggggaagcttccggcttgcgttgagacttgtccagctaacgcgcgaatcttcggagacctcgatgacccgaacagcgaggtggcgaagctggtggcggagaacagagctatccctattggcgcggagtacggtacgaagccgaaggtgttttatataagaccgaggtga

SEQ ID NO: 67476 - protein, 182 aa, Archaeoglobus fulgidus DSM 4304
MARYGMVIDLEKCLGCEACVTACIEENNVPYETGLRTQVHRVVTGKFPNVSTMYMHRICQHCEHPGCVHVCPTGASYVNEDGIVLIDYDLCIGCKYCMVACPYLARYIHPERHTPDKCTFCVHRVKEGKLPACVETCPANARIFGDLDDPNSEVAKLVAENRAIPIGAEYGTKPKVFYIRPR

SEQ ID NO: 67477 - DNA, 735 bp, Mesorhizobium loti MAFF303099
  CDS (1)..(735): transl_table=11
atgacctgcctgccaagccaaagcggcaagaaactcggcctggtcatcgacctcgatacctgcgtcggttgccaggcctgcgtcaccgcctgcaaggaatggaacaccggcggccacatggcgccgctgaccgacatcgacccctatggcggccatgtcgacggcgtctggttcaaccgcgtgcacagttatgagcacaccaccgagatgggcgggcgcacggtcaacttcccgcgctcctgcctgcattgcgagacgccggcctgcgtcaccgtctgcccgaccggcgcttcctacaagcgcgcctcggacggcatcgtgctgatcgacgaggacaaatgcatcggctgcaaattgtgcagttgggcctgcccctatggggctcgcgaattcgacaccgatgtcggcgtgatgaagaaatgcacgctctgcgtcgaccgcatctacaacgacaatctggccgaagaagaccgtgtgccggcctgcgtcgcggcctgcccgaccagcgcccggcacttcggtgatctcggcgatccccactccgccgtctcgcaactggtggcggagcgcggcggcgtcgacctgatggcggaactcggctatcacccgaccaacaaatatctgccgccgcgcgcccatacgcagcgtgccgcatcggtgccggcgaaggcgctggagccggtgcgggccgaaggcggcttcctcggctgggtcgatcgcatgctttcgaactga

SEQ ID NO: 67478 - protein, 244 aa, Mesorhizobium loti MAFF303099
MTCLPSQSGKKLGLVIDLDTCVGCQACVTACKEWNTGGHMAPLTDIDPYGGHVDGVWFNRVHSYEHTTEMGGRTVNFPRSCLHCETPACVTVCPTGASYKRASDGIVLIDEDKCIGCKLCSWACPYGAREFDTDVGVMKKCTLCVDRIYNDNLAEEDRVPACVAACPTSARHFGDLGDPHSAVSQLVAERGGVDLMAELGYHPTNKYLPPRAHTQRAASVPAKALEPVRAEGGFLGWVDRMLSN

SEQ ID NO: 67479 - DNA, 501 bp, Pyrococcus abyssi GE5
  CDS (1)..(501): transl_table=11
atgaggttgaggattgaggtgaacgtttcaaggtgtgctggatgcaggtactgcgagctctggtgttcctattcccacgaaggggtcttcagtctttctctgtcgaggataacaatagtcaaggacgacctgctgggcatggacgtgccggtggtctgcaggcagtgcgaccctgccccttgcatggaggcttgccccacgggggccataaagcgcgaaaacggcgtcctggtggtcagtgcggaggagtgtaccgggtgcggggaatgcgtcagagcttgccccttcggggccgtaaagcttcacgtccggactaaggtggccctcatatgtgacctctgcggaggagaccccgtgtgtatcgctaaatgtcccacgaacgcattgagcctgtcaaacctgtcagatattgaaccgaacggttcaggttcaagggaatatgagtacgctctcaggctccacaaaaaccttgcacgggagtggggtataaatgtcagatag

SEQ ID NO: 67480 - protein, 166 aa, Pyrococcus abyssi GE5
MRLRIEVNVSRCAGCRYCELWCSYSHEGVFSLSLSRITIVKDDLLGMDVPVVCRQCDPAPCMEACPTGAIKRENGVLVVSAEECTGCGECVRACPFGAVKLHVRTKVALICDLCGGDPVCIAKCPTNALSLSNLSDIEPNGSGSREYEYALRLHKNLAREWGINVR

SEQ ID NO: 67481 - DNA, 495 bp, Pyrococcus abyssi GE5
  CDS (1)..(495): transl_table=11
atgagcaagaagatattcctcgactataggaggtgcatcgcttgtaaagcttgtgaggtagcctgcgagatggagcacggtgaagccaggataagggttttcgagttccccgatttaacgagcatccccttcaactgtcgtcactgcgagagagcaccttgcctagaggtgtgtccaaccggagccctatacagagattgtgataacgctgtggccttcgaccccctaaagtgcattggctgtttaatgtgtgcagttgcctgtcccttcggagttccaaagctcgatgaggccaataagataatggacaagtgcgacctctgcgccgatagaagagctcaaggcaagcttccagcatgtgtctcagcctgtcccaccgatgcgttgaagtacggggacataaacgagatactctggaagagggaaggtagggtagtgctgaacctaaaggaagccagggataagagtgtaggtaagctagcttacctcctctga

SEQ ID NO: 67482 - protein, 164 aa, Pyrococcus abyssi GE5
MSKKIFLDYRRCIACKACEVACEMEHGEARIRVFEFPDLTSIPFNCRHCERAPCLEVCPTGALYRDCDNAVAFDPLKCIGCLMCAVACPFGVPKLDEANKIMDKCDLCADRRAQGKLPACVSACPTDALKYGDINEILWKREGRVVLNLKEARDKSVGKLAYLL

SEQ ID NO: 67483 - DNA, 753 bp, Aeropyrum pernix K1
  CDS (1)..(753): transl_table=11
gtgatatcaaactgtatattacaatatataggcatgagggaggggtgcctaatgaagcgttccccttcaacagcatgtagcacgtgcaacacgaggagagagttcctgaagaagacggcaaaagcggcagtggcaacgtcatccctcatactgctaggatccgtcacaataaagtctcaggcagccagcgagagggtaagaggcagacgctttgcgatgtttatcgacgtcgacaagtgctacggctgctacgcgtgtgtcgttgcctgtgcccacgagaacaatgtgcctataggagtatataggacttggatagaaaggtatgtgaaggaggacggtactcccgtttatgtccccaaacagtgcaaccactgtgataacccgtcctgtgttgatgtctgtcctgtaaaggcaacctacgtcaacgaggacggcattgtcctcgtggatgacgacctatgcataggctgtggagcatgtatacagaactgcccctacggagctaggttctacaaccccatcaaaggagtcgcggacaagtgtaccttctgcgtccacagaatatactccgacatgcttcccgcctgtgtagaggcctgtccgacgggtgcaagggtgttcggcgagcttgccgacgaggaaagcgaggtctcgaagctcataaggagcaacaatgtccagcagctcaagccatggaccggcaacgacccacagatattctacaaggacttgccccaggaggctaacacctag

SEQ ID NO: 67484 - protein, 250 aa, Aeropyrum pernix K1
MISNCILQYIGMREGCLMKRSPSTACSTCNTRREFLKKTAKAAVATSSLILLGSVTIKSQAASERVRGRRFAMFIDVDKCYGCYACVVACAHENNVPIGVYRTWIERYVKEDGTPVYVPKQCNHCDNPSCVDVCPVKATYVNEDGIVLVDDDLCIGCGACIQNCPYGARFYNPIKGVADKCTFCVHRIYSDMLPACVEACPTGARVFGELADEESEVSKLIRSNNVQQLKPWTGNDPQIFYKDLPQEANT

SEQ ID NO: 67485 - DNA, 513 bp, Aquifex aeolicus VF5
  CDS (1)..(513): transl_table=11
atgaagcgtcctataatgctcatagacctggacaggtgcataggctgcctttcctgtgaagtagcctgcgttcaggagaagggactggagagcctgtatataagacccatgaaagttttcagggtagaaggtatatctgaagaaccgggagctttttactaccccatgaactgctttcactgcgacccagctccctgtgtggttgcatgccctacatccgcaatgagaaagagggagaaggacggtatagtttacgtggaacaaactctgtgcataggctgtaaagcgtgcataatagcctgcccctacggagctataactttcaatcccgctacacaaaaagtagaaaagtgcgattactgctacaaaagggttgataaaggactgcttccctcctgcgttgagaagtgtgtaacgaactgtttatacttcgttgaggtagacgaagttccaaaagaaagacacaaattaaagaggatagacgagaaactttacgaggaaatcttcagctga

SEQ ID NO: 67486 - protein, 170 aa, Aquifex aeolicus VF5
MKRPIMLIDLDRCIGCLSCEVACVQEKGLESLYIRPMKVFRVEGISEEPGAFYYPMNCFHCDPAPCVVACPTSAMRKREKDGIVYVEQTLCIGCKACIIACPYGAITFNPATQKVEKCDYCYKRVDKGLLPSCVEKCVTNCLYFVEVDEVPKERHKLKRIDEKLYEEIFS

SEQ ID NO: 67487 - DNA, 765 bp, Aquifex aeolicus VF5
  CDS (1)..(765): transl_table=11
atgcctcagtacgcgctcgttatagatttgaacacctgtgttggttgtcacgcctgtgcgacgaattgcaaagagtggaacactcaggcggctttcgggcccttatccgattacgacccctacggaagggaagcttcaggagtctggtacaacaggatattcacttacgaaacgggagagttccccgaaacgcaggtctttcaccttccaaaatcatgtctccactgtcaggacgctccctgcgttcccgtttgccctacgggagcaagctacaaaagggaacaggacggaatagttctcgtgaactacgacgactgtataggttgtaagctatgttcctgggcatgtccttacggttgcagggagtttgacgaggcggacaaggtaatgaagaagtgtaccctctgtatagacaggatttacgacgagacacttcctcccgaacacagacagcccgcgtgcgttctcacttgtcccgcgagggcgaggttcttcggagacatagaagacccaaacagcgaggtttacaaactcattaaggaaagaaacggatttgtcctcttccccgatatgggaacgaacccggcaaaccactacctcccgagacaggaaacgaggataaaccttgaagagtttgaaaagcacatactaaagcccgacaacccgctcttcctggaagttatgaggagacaccacacctcttcaaaggctcaagcacaggaaacacctcaagaggaagtaacacattctgaagaattaccataa

SEQ ID NO: 67488 - protein, 254 aa, Aquifex aeolicus VF5
MPQYALVIDLNTCVGCHACATNCKEWNTQAAFGPLSDYDPYGREASGVWYNRIFTYETGEFPETQVFHLPKSCLHCQDAPCVPVCPTGASYKREQDGIVLVNYDDCIGCKLCSWACPYGCREFDEADKVMKKCTLCIDRIYDETLPPEHRQPACVLTCPARARFFGDIEDPNSEVYKLIKERNGFVLFPDMGTNPANHYLPRQETRINLEEFEKHILKPDNPLFLEVMRRHHTSSKAQAQETPQEEVTHSEELP

SEQ ID NO: 67489 - DNA, 459 bp, Thermotoga maritima MSB8
  CDS (1)..(459): transl_table=11
gtggtgatagcggtgagaagaatacttatcagggaagagtactgcatgggatgtaagctgtgtgagataaactgcgtcgctgcacaggtgggaacgggaaacctcataaaggtgtacagatacgtcccggaacttcccgaaccaaacgtgatagtggaagagcacgattacgtcactttcgcacttcagtgcagaaactgtgatgatccatcctgtctgaaggcctgtatgacgggcgcgatgcacagagatccaaaaacaggagccatcagagtgaatcaagaaaagtgtgtaggatgctggatgtgtgtgatggcctgtcccttcggtgtgataagaaggaacacgaaagaaaagaaagttgcctcaaagtgtgatctctgtgccgatagaggaactcctggctgtgtcgaaggctgtccaaacgaagcgctcgttctggttgaggtgagagaatga

SEQ ID NO: 67490 - protein, 152 aa, Thermotoga maritima MSB8
MVIAVRRILIREEYCMGCKLCEINCVAAQVGTGNLIKVYRYVPELPEPNVIVEEHDYVTFALQCRNCDDPSCLKACMTGAMHRDPKTGAIRVNQEKCVGCWMCVMACPFGVIRRNTKEKKVASKCDLCADRGTPGCVEGCPNEALVLVEVRE

SEQ ID NO: 67491 - DNA, 681 bp, Pasteurella multocida subsp. multocida str. Pm70
  CDS (1)..(681): transl_table=11
atgacagcttgctcacgccgaaactttgtttccggcatgggagcgttaatcctcatgacgggaacatcaataaaatcagtgggacagaacgcaagcgaggcgaaaaaaacaattcgttatgcgatgttacacgatgaaaccgcttgtatcggttgtactgcttgtatggatgcatgtcgtgaaaccaaccaggtcccagaaggggtttctcgtttggagattatccgtagtgagccttatggtgagtttccaaacgcagaatatgaatttttccgccattcttgtcagcattgtcacaatgcaccttgtgtgcatgtttgtccaacaggggcgtcttttgttgacaaggaaacaggtattgtcgatgtgcacaaagatctttgtgtcggttgccaatattgtattgctgtctgtccatatcgtgttcgatttattcaccccgtgtataaatcagccgataaatgtaacttctgtcgcgataccaatttagctaacggcaaattaccggcttgtgtggaatcttgcccaaccaatgcgttgacctttggggatctgaatgatcctgacagtgccatttcacaaaaagtcaaatcgcagcaagtgtatcggacgaaggtggaattaggcaccgatccacagctgtatcatgtaccagctaaaagaggggagctaagacgatga

SEQ ID NO: 67492 - protein, 226 aa, Pasteurella multocida subsp. multocida str. Pm70
MTACSRRNFVSGMGALILMTGTSIKSVGQNASEAKKTIRYAMLHDETACIGCTACMDACRETNQVPEGVSRLEIIRSEPYGEFPNAEYEFFRHSCQHCHNAPCVHVCPTGASFVDKETGIVDVHKDLCVGCQYCIAVCPYRVRFIHPVYKSADKCNFCRDTNLANGKLPACVESCPTNALTFGDLNDPDSAISQKVKSQQVYRTKVELGTDPQLYHVPAKRGELRR

SEQ ID NO: 67493 - DNA, 738 bp, Pasteurella multocida subsp. multocida str. Pm70
  CDS (1)..(738): transl_table=11
atgaaaatgagtaagcgtatttttctcaaaaatttatcattattaagtgtggggcaagcttttattccattgagtcaagcagaaaatgcttttcaacctgctagacgagagggaagtgaagcacatcgttatgccatgttggtggatttacgtcgttgtatcggttgtcaatcttgtactgtaagttgtgggattgagaatgcgacgccgattggcgaatttagaaccactgtgcgtcaatacgaagtcactgatgaaaaacaagtggtcaataatgtgttattaccacgtttatgtaatcactgtgataacccgccttgtgtaccagtttgtcctgtgcaagctacctatcaacgtaaagatggtatcgtggtggttgataatgaacgttgtataggttgtgcgtattgtgtacaagcttgtccttatgatgcacgttttattaacgaagaaacaaaaacagcagataaatgcacgttttgcacacatcgactggaggttggtttattacctgcttgtgtggaaagctgtgtgggtggcgcgcggattatcggcgatttacgcgatccaaatagtacgatcagcaaaatggtagaagaatttaaagcggaactcaaagtcttaaaaccaaattcgggtacagtgccgcatgtattctatttaggattagatgacgcctttgttaatcaagtgcaggggcaatctatgttatggcaaagtgcggagggaagattatga

SEQ ID NO: 67494 - protein, 245 aa, Pasteurella multocida subsp. multocida str. Pm70
MKMSKRIFLKNLSLLSVGQAFIPLSQAENAFQPARREGSEAHRYAMLVDLRRCIGCQSCTVSCGIENATPIGEFRTTVRQYEVTDEKQVVNNVLLPRLCNHCDNPPCVPVCPVQATYQRKDGIVVVDNERCIGCAYCVQACPYDARFINEETKTADKCTFCTHRLEVGLLPACVESCVGGARIIGDLRDPNSTISKMVEEFKAELKVLKPNSGTVPHVFYLGLDDAFVNQVQGQSMLWQSAEGRL

SEQ ID NO: 67495 - DNA, 621 bp, Pasteurella multocida subsp. multocida str. Pm70
  CDS (1)..(621): transl_table=11
atgagtgttcagtatggcttttattttgactcagatcgttgcaccggctgtaagacttgtgaattagcctgcaaagactataaagacctcgataccaacgtgaattttcgtcgcatttatgaatatgcaggtggtgactggcaacagcaggcaaatggatgttggcaacataatgtttttgcttattatttatcgatttcctgtaatcactgcgacaatcctgcttgtgtgtcagtttgtccaacgggtgcaatgcataaaacagaagatggctttgtcatcgtgaatgaagcaatctgtattggttgtcgttattgtcatatggcttgtccttatgatgcaccacaatatgatgcaatgaaagggcatatgactaaatgcgatggctgccattcacgtatattggaagggaaaaaaccgatttgtgttgatgcgtgtccattacgggctctagattttgcgcccattgatgaactacgcaaaacctatggtgatttagcggcgattgcgccattaccctcgccagaacatactgcgccaaatttggtgattaagaccaataaaaatgcgcgtccaacgggggatacaaccggttttttagcgaatccaagggaggtgtaa

SEQ ID NO: 67496 - protein, 206 aa, Pasteurella multocida subsp. multocida str. Pm70
MSVQYGFYFDSDRCTGCKTCELACKDYKDLDTNVNFRRIYEYAGGDWQQQANGCWQHNVFAYYLSISCNHCDNPACVSVCPTGAMHKTEDGFVIVNEAICIGCRYCHMACPYDAPQYDAMKGHMTKCDGCHSRILEGKKPICVDACPLRALDFAPIDELRKTYGDLAAIAPLPSPEHTAPNLVIKTNKNARPTGDTTGFLANPREV

SEQ ID NO: 67497 - DNA, 930 bp, Pseudomonas aeruginosa PAO1
  CDS (1)..(930): transl_table=11
atgagtagtcaggacatccacgcccgctccgcgaccaccacgccgatgccctcggtgcggaaccaggaggaagtggcgaaactgatcgacgtgtccaagtgcatcggttgcaaggcctgccaggtcgcctgctcggaatggaacgagctgcgcgacgaggtcggccacaaccacggcacctacgacaaccccatggacctgacggccgactcgtggacggtgatgcgtttcaccgagcacgagaacgaggccggcaacctcgagtggctgatccgcaaggatggctgcatgcactgcgccgagccgggctgcctgaaggcctgcccgagcccgggagcgatcgtgaagtacgccaacggcatcgtcgacttcaaccaggacaagtgcatcggttgcggctactgcatcaccggttgcccgttcgacatcccacggatctcgcagaaggaccacaaggcctacaagtgcagcctgtgttccgaccgcgtctcggtgggcatggagccggcctgcgtgaagacctgcccgaccggcgccatcgtcttcggcagcaaggaggacatgaaggaacacgccgccgaacgcatcgtcgacctgaagagccgcggttacgagaacgccggcctgtacgaccccgaaggggtgggcggcacccacgtgatgtacgtgctgcaccacgccgacaagccgtcgctctatgccggcctggccgaccagccgagcgtcagcccgctggtcagcctgtggaagggcgtgaccaagccgctggcgctgctggccatgggcgccacggtgctcgccgggttcttccactatgtgcgcgtcggtcccaaccgcgcggacgacgaggaagaccacgggcaagccgaggcaccggtgcaccaggtcgatccgtcggtacacacctttgacccgcacgagcgtcgttga

SEQ ID NO: 67498 - protein, 309 aa, Pseudomonas aeruginosa PAO1
MSSQDIHARSATTTPMPSVRNQEEVAKLIDVSKCIGCKACQVACSEWNELRDEVGHNHGTYDNPMDLTADSWTVMRFTEHENEAGNLEWLIRKDGCMHCAEPGCLKACPSPGAIVKYANGIVDFNQDKCIGCGYCITGCPFDIPRISQKDHKAYKCSLCSDRVSVGMEPACVKTCPTGAIVFGSKEDMKEHAAERIVDLKSRGYENAGLYDPEGVGGTHVMYVLHHADKPSLYAGLADQPSVSPLVSLWKGVTKPLALLAMGATVLAGFFHYVRVGPNRADDEEDHGQAEAPVHQVDPSVHTFDPHERR

SEQ ID NO: 67499 - DNA, 789 bp, Halobacterium sp. NRC-1
  CDS (1)..(789): transl_table=11
atgaccaactacggcctcgtcatcgatcaggaacgatgcatcggctgccagtcgtgttcgctcacgtgcaaacaggagaacaacgtcccgatggggcagttctggaaccgcgtgctcacgcagggcggcgaccacgttgacaccccgtcgggcgactaccccgagggcggcgacggtggcactctcgaaatgacctaccagccgacggcgtgccaacactgcgagaacgcgccctgtgtgaaggtctgcccggtgaacgccacgtacacccgggacgacggcatcgtggagatcgattacgacaaatgcatggggtgtcggtactgcatggcggcctgcccgtacaacgcccgtgtgttcaactgggacgagcccgagcaccgccccgaagacggcacgggagacgtggccgaacgaccacagggcgtcgtcgagaaatgcacgttctgcagccaccgcgtcgaggacggcctcgaccccgcctgcgtcgtgaactgtccggcggacgcccgcatcttcggtgacctggacgacgacgacagcaccgtctcgaagtacatcgcggagtacgacacccaccaactcctggacgagaagggaacggacccgagcacgtactacatcaacggcgagatgtcgcccggacgcccctggaagagcaagaagctcgaaagcgaactcgacgacgacgaggcagcgaaagcggcgcgacggcgcagcggcagcgtcgaaaacggatacgacgttaccccacacgtgccggcggagaccgcgggaggtgacgactga

SEQ ID NO: 67500 - protein, 262 aa, Halobacterium sp. NRC-1
MTNYGLVIDQERCIGCQSCSLTCKQENNVPMGQFWNRVLTQGGDHVDTPSGDYPEGGDGGTLEMTYQPTACQHCENAPCVKVCPVNATYTRDDGIVEIDYDKCMGCRYCMAACPYNARVFNWDEPEHRPEDGTGDVAERPQGVVEKCTFCSHRVEDGLDPACVVNCPADARIFGDLDDDDSTVSKYIAEYDTHQLLDEKGTDPSTYYINGEMSPGRPWKSKKLESELDDDEAAKAARRRSGSVENGYDVTPHVPAETAGGDD

SEQ ID NO: 67501 - DNA, 987 bp, Escherichia coli O157:H7 EDL933
  CDS (1)..(987): transl_table=11
gtgaacagacgtaattttattaaagcagcctcctgcggggcattgctgacgggcgcgctgccgtctgtcagtcatgcggctgctgaaaaccgcccgccaattccgggatcgctggggatgttgtacgactcgaccttgtgcgtaggctgccaggcttgcgtcaccaagtgtcaggatatcaacttccctgaacgtaacccgcaaggggaacagacctggtcgaacaacgacaaactgtcgccgtataccaataacatcattcaagtgtggaccagcggcacaggggtcaacaaagaccaggaggagaasggctacgcgtacattaagaaacagtgtatgcactgcgtcgatccgaactgtgtctctgtgtgcccggtctctgcactgaaaaaagatccgaaaaccggcattgtccattacgacaaagacgtgtgcaccggttgccgttactgcatggtcgcctgtccgtacaacgtgccgaagtacgactacaacaacccgtttggtgcgctgcataagtgcgagctgtgcaaccagaaaggtgtggaacgtctcgataaaggcggtctgcctggctgcgtagaagtgtgcccggcgggcgcggtgatttttggtacgcgtgaagagctgatggcggaggcgaaaaaacgtctggcgctgaagcctggcagcgaataccactatccgcgtcagacgctgaaatctggcgacacttacctgcatacggtgccgaaatattatccgcatctgtacggcgagaaagagggcggcggtactcaggttctggtactgacgggtgtgccttatgaaaatctcgacctgccgaaactggacgatctttctaccggtgcgcgttccgaaaatattcaacacaccctgtataaaggcatgatgctaccactggctgtgctggcgggcttgaccgtgctggttcgtcgcaacaccaaaaacgaccatcacgacggaggagacgatcatgagtcatga

SEQ ID NO: 67502 - protein, 328 aa, Escherichia coli O157:H7 EDL933
  misc_feature (103)..(103): Xaa can be any naturally occuring amino acid
MNRRNFIKAASCGALLTGALPSVSHAAAENRPPIPGSLGMLYDSTLCVGCQACVTKCQDINFPERNPQGEQTWSNNDKLSPYTNNIIQVWTSGTGVNKDQEEXGYAYIKKQCMHCVDPNCVSVCPVSALKKDPKTGIVHYDKDVCTGCRYCMVACPYNVPKYDYNNPFGALHKCELCNQKGVERLDKGGLPGCVEVCPAGAVIFGTREELMAEAKKRLALKPGSEYHYPRQTLKSGDTYLHTVPKYYPHLYGEKEGGGTQVLVLTGVPYENLDLPKLDDLSTGARSENIQHTLYKGMMLPLAVLAGLTVLVRRNTKNDHHDGGDDHES

SEQ ID NO: 67503 - DNA, 903 bp, Escherichia coli O157:H7 EDL933
  CDS (1)..(903): transl_table=11
atggcttatcaatctcaagatatcattcgtcgttccgcgactaacggtctgacccccgcgcctcaggcgcgggacttccaggaagaagtggcgaaactcatcgacgtcaccacctgtatcggctgtaaagcctgtcaggtggcgtgttcagagtggaacgacattcgcgataccgtcggcaataacattggggtgtacgacaaccccaatgatttaagcgccaaatcgtggacggtgatgcgcttctcggaagtggagcagaacgacaaactggaatggctgatccgcaaagacggctgtatgcactgttccgatccaggctgtctgaaagcgtgcccggcggaaggtgcaattattcagtatgccaacggtatcgtcgacttccagtccgagcagtgcattggctgcggttattgcattgcgggctgtccgttcgacattccgcgcctcaacccggaagacaaccgcgtctacaaatgtacgctgtgcgttgaccgcgtggtggttgggcaagaaccagcctgcgtgaagacctgcccaacgggcgcgattcacttcggtacgaaagagtcgatgaaaacgctggcgagcgagcgcgtggcggagctgaaaacccgcggttacgacaatgcgggcctgtacgatccggcaggcgtcggtggtacacacgttatgtacgtgctgcaccatgctgacaagccaaatctgtatcatggcttgccggagaacccggaaatcagcgaaaccgtgaaattctggaaaggcatctggaaaccgytcgcagctgttggctttgcggctaccttcgcagccagtatcttccactacgtgggtgtcggtccgaaccatgcggatgaggaagagaataatctgcacgaagagaaagacgaggagcgcaaatga

SEQ ID NO: 67504 - protein, 300 aa, Escherichia coli O157:H7 EDL933
  misc_feature (260)..(260): Xaa can be any naturally occuring amino acid
MAYQSQDIIRRSATNGLTPAPQARDFQEEVAKLIDVTTCIGCKACQVACSEWNDIRDTVGNNIGVYDNPNDLSAKSWTVMRFSEVEQNDKLEWLIRKDGCMHCSDPGCLKACPAEGAIIQYANGIVDFQSEQCIGCGYCIAGCPFDIPRLNPEDNRVYKCTLCVDRVVVGQEPACVKTCPTGAIHFGTKESMKTLASERVAELKTRGYDNAGLYDPAGVGGTHVMYVLHHADKPNLYHGLPENPEISETVKFWKGIWKPXAAVGFAATFAASIFHYVGVGPNHADEEENNLHEEKDEERK

SEQ ID NO: 67505 - DNA, 618 bp, Escherichia coli O157:H7
  CDS (1)..(618): transl_table=11
atgacaacccagtatggattttttattgattccagccgttgcaccggttgcaaaacctgcgagctggcttgtaaagactacaaagatttgatgccagaagtcagcttccgccgcatttatgaatatgctggtggcgactggcaggaagataacggtgtctggcaccagaacgtgtttgcctactatctgtcgatttcgtgcaaccactgcgaagatccggcttgtactaaagtctgcccgagcggtgcgatgcataaacgtgaagatggttttgttgtggtcgatgaagatgtgtgcattggctgccgctactgccatatggcttgcccgtatggcgcaccgcaatataacgaaacgaaaggccatatgaccaaatgcgatggttgttatgaccgtgttgcggagggtaaaaagccgatctgtgttgaatcttgtccgctgcgggcgctggatttcggccctatcgacgagctgcgtaaaaaacatggcgatctggcggccgttgcgccgttgccgcgagctcactttaccaaaccgaatattgtgatcaaacccaatgccaatagccgcccgaccggggataccactggctatctggcaaacccgaaggaggtgtga

SEQ ID NO: 67506 - protein, 205 aa, Escherichia coli O157:H7
MTTQYGFFIDSSRCTGCKTCELACKDYKDLMPEVSFRRIYEYAGGDWQEDNGVWHQNVFAYYLSISCNHCEDPACTKVCPSGAMHKREDGFVVVDEDVCIGCRYCHMACPYGAPQYNETKGHMTKCDGCYDRVAEGKKPICVESCPLRALDFGPIDELRKKHGDLAAVAPLPRAHFTKPNIVIKPNANSRPTGDTTGYLANPKEV

SEQ ID NO: 67507 - DNA, 885 bp, Escherichia coli O157:H7
  CDS (1)..(885): transl_table=11
atggctatggaaacgcaggacattatcaaaaggtccgcaactaactccatcacgccgccttctcaggtgcgtgattacaaagcagaagtcgcaaaacttatcgacgtttccacctgtatcggctgtaaagcctgtcaggtggcgtgttcggagtggaacgacatccgtgatgaagtggggcactgcgtcggggtttacgataaccccgccgatctgagcgccaagtcctggacggtgatgcgctttagcgaaaccgaacagagcggcaagctggagtggctgatccgtaaagatggctgtatgcactgtgaagatccgggctgcctgaaggcgtgcccgtctgccggtgcaatcattcagtacgctaacgggattgtcgatttccagtcggaaaactgcatcggctgtggttactgcattgccgggtgtccgtttaatattccgcgcctcaacaaagaggataaccgggtatataaatgcacgctctgcgtcgatcgcgtcagcgtcggccaggaaccggcttgtgtgaaaacctgtccgaccggggctatccacttcggcaccaagaaggagatgctggagctggcggaacagcgcgtggcgaaactgaaagcgcgtggttacgaacatgctggcgtctacaacccggaaggggtcggtggtacgcacgttatgtacgtgctgcatcacgccgatcagccggagctgtatcacggtctgccgaaagatccgaagatcgacacctcggtaagcctgtggaaaggcgcgttgaaaccgctggcagcggctggctttattgccacttttgcagggttgattttccactacatcggtattggcccgaataaggaagtggacgatgacgaggaggatcatcatgagtaa

SEQ ID NO: 67508 - protein, 294 aa, Escherichia coli O157:H7
MAMETQDIIKRSATNSITPPSQVRDYKAEVAKLIDVSTCIGCKACQVACSEWNDIRDEVGHCVGVYDNPADLSAKSWTVMRFSETEQSGKLEWLIRKDGCMHCEDPGCLKACPSAGAIIQYANGIVDFQSENCIGCGYCIAGCPFNIPRLNKEDNRVYKCTLCVDRVSVGQEPACVKTCPTGAIHFGTKKEMLELAEQRVAKLKARGYEHAGVYNPEGVGGTHVMYVLHHADQPELYHGLPKDPKIDTSVSLWKGALKPLAAAGFIATFAGLIFHYIGIGPNKEVDDDEEDHHE

SEQ ID NO: 67509 - DNA, 720 bp, Escherichia coli O157:H7
  CDS (1)..(720): transl_table=11
atgtcatggatagggtggacagttgcagccactgcattaggggataatcagatgtccttcactcgacgcaaatttgttctggggatgggaacagtaatcttttttactggttctgcgtcttctctgttagcgaacacgaggcaagaaaaggaagttcggtatgccatgattcatgacgagtcacggtgcaatggctgtaatatttgcgcccgcgcatgccgtaaaactaaccacgcccccgctcagggaagccgtttatcgatagcacacattccagtcaccgataacgacaacgaaacgcagtatcacttttttcgccagtcatgtcagcactgcgaagatgctccgtgcatcgacgtatgcccgacaggggcgtcgtggcgtgatgagcaggggatcgtgcgggtagaaaaatcgcagtgcatcggctgcagttattgcattggcgcttgtccgtaccaggttcgctaccttaaccctgtcactaaagtggcagataaatgtgatttctgcgctgagtcccgactggcaaaaggctttccgcccatttgcgtcagcgcttgcccggaacacgcattgatctttggtcgcgaagatagccctgaaattcaggcgtggttgcaggataataaatactatcaatatcagctacctggtgccgggaaaccgcatctgtatcgccggttcggtcaacatttgattaaaaaggaaaatgtatga

SEQ ID NO: 67510 - protein, 239 aa, Escherichia coli O157:H7
MSWIGWTVAATALGDNQMSFTRRKFVLGMGTVIFFTGSASSLLANTRQEKEVRYAMIHDESRCNGCNICARACRKTNHAPAQGSRLSIAHIPVTDNDNETQYHFFRQSCQHCEDAPCIDVCPTGASWRDEQGIVRVEKSQCIGCSYCIGACPYQVRYLNPVTKVADKCDFCAESRLAKGFPPICVSACPEHALIFGREDSPEIQAWLQDNKYYQYQLPGAGKPHLYRRFGQHLIKKENV

SEQ ID NO: 67511 - DNA, 630 bp, Escherichia coli O157:H7
  CDS (1)..(630): transl_table=11
atgagccaatttaaagaatttgcatctgtcagcgacaaacaattagggttctttattgactcttcgcgttgttcgggctgtaaagcgtgtcaggtggcctgtaaagacaaaaacaaccttgaggttgggcgacgttttcgccgcgtgtatgaagtgaacggaggtggcttcatcgccactggagagggcggtgtgagtcataatgtctttgcttataccctttctgtttcctgtaaccattgcgcggatccgatctgtaccaaaaattgcccgacgatggcgatgcataagcgtcccggagacggtattgtgcgcgtgaatactgataagtgcgtcggttgcggttactgcgcctggtcctgtccttacggcgcaccacaaatgaatgagcagaccgggcagatgtcgaaatgcgatttctgtattgatctgcaagctaaaggagaacaacccatttgcgtggcaacgtgcccgttgggggcgattaagttcggccctattgatgagttgcgtgaaaagtatggcgatgtcagtgatgtgaaaggtttacctgattcgtcgattacgcagccaaatctggtgattaaaccgcatcagggcgcggaaaaggaggcgtcacatcatgcatga

SEQ ID NO: 67512 - protein, 209 aa, Escherichia coli O157:H7
MSQFKEFASVSDKQLGFFIDSSRCSGCKACQVACKDKNNLEVGRRFRRVYEVNGGGFIATGEGGVSHNVFAYTLSVSCNHCADPICTKNCPTMAMHKRPGDGIVRVNTDKCVGCGYCAWSCPYGAPQMNEQTGQMSKCDFCIDLQAKGEQPICVATCPLGAIKFGPIDELREKYGDVSDVKGLPDSSITQPNLVIKPHQGAEKEASHHA

SEQ ID NO: 67513 - DNA, 687 bp, Sulfolobus solfataricus P2
  CDS (1)..(687): transl_table=11
atgtccacacaagtttcaaacccatatatacaatttgggaatactcaaccttgtaaacactggggattcgtggttaaggtagaccaatgtctaggctgtgatgcttgtgttgctgcgtgtacaatagagaatcaaacgccattctggcgaggtctatttagaactcatgttgaagatctagaattaggagaatatcccaacactcagagagtcttcgtacctagattgtgtatgcaatgtgaaaacccgccatgttattatgtatgtccaactggcgctacccaaattgttgctggaggtattgtagtggttgacgagtataaatgtatgggatgtctttactgtgttgaggcatgtccatatggtgctagatacttctacacttacgaggatattgagaagtccaaggagtattttggattgaattcaattcacgtggttcctcacgtagataaatgtactttctgctacggtacagccccagaaggcacttatactcctgcatgtgtaagaacttgtccgggtcatgccagagtatttgggtgtcttgatgatcctaatagtgaggttagtatattagttaatactgggcaagcagtagtgttgaatccggaattaaacgttcaacctaaagttttttacgtgtttaataggcagttgggtaggggaggaggtggtaactcatga

SEQ ID NO: 67514 - protein, 228 aa, Sulfolobus solfataricus P2
MSTQVSNPYIQFGNTQPCKHWGFVVKVDQCLGCDACVAACTIENQTPFWRGLFRTHVEDLELGEYPNTQRVFVPRLCMQCENPPCYYVCPTGATQIVAGGIVVVDEYKCMGCLYCVEACPYGARYFYTYEDIEKSKEYFGLNSIHVVPHVDKCTFCYGTAPEGTYTPACVRTCPGHARVFGCLDDPNSEVSILVNTGQAVVLNPELNVQPKVFYVFNRQLGRGGGGNS

SEQ ID NO: 67515 - DNA, 882 bp, Sulfolobus solfataricus P2
  CDS (1)..(882): transl_table=11
atgggttcgcaacagaaccctcctcttaaggtgataaatatgtcttctccccaaaatacaaccacaccacaaattaaattagatataagacaaggtggtgttcaacacgctccaccgtttagcttaaaggcaaactacgccataattactgatttaaacaagtgtttcggctgtggaggctgtcagatgtcatgcaaggaatggaacacatcggggatgtttggaccattaccagacctaaatccatacggagaattagacgttatgttctggctaagagtactctatgtagaagtaggaacatatccccagacaaaggtctacaatataccaataaactgcttccactgtataaacgcaccttgtacagaagtttgcccagtaggtgctacattcaagagaacagaggatggtatagtattagtcgactataacgaatgcatagggactaagtactgtatttacgcatgcccatacgggaatagattcttcgattacgtagaaggagttacaaagaagtgcacccattgtttcgataggatttatgatcctacattacccccagaggagaggataccggcgtgtatccacggatgtatggttcaagctagaatttgggctaatatcttagacccaactgaccctggtacaattttattctatgataaaggaggatttgtaatgggaccagaaactggagcacagccagcaagtggttatttgccatggcgtagcaaatacgctgaaagtgatgtccaattgttaagtgaagctgagtactacaacgtatggactgctaatggtgtagtgcaactcggcgcccaggggaacaactctacctatacagaagggaatggatcaaattccagctcaaattcataa

SEQ ID NO: 67516 - protein, 293 aa, Sulfolobus solfataricus P2
MGSQQNPPLKVINMSSPQNTTTPQIKLDIRQGGVQHAPPFSLKANYAIITDLNKCFGCGGCQMSCKEWNTSGMFGPLPDLNPYGELDVMFWLRVLYVEVGTYPQTKVYNIPINCFHCINAPCTEVCPVGATFKRTEDGIVLVDYNECIGTKYCIYACPYGNRFFDYVEGVTKKCTHCFDRIYDPTLPPEERIPACIHGCMVQARIWANILDPTDPGTILFYDKGGFVMGPETGAQPASGYLPWRSKYAESDVQLLSEAEYYNVWTANGVVQLGAQGNNSTYTEGNGSNSSSNS

SEQ ID NO: 67517 - DNA, 1176 bp, Sulfolobus tokodaii str. 7
  CDS (1)..(1176): transl_table=11
atggagagaagtctaggatttatattcgatcctaacaaatgcatagtctgtaatgcttgcgttaatgcttgtaatgaacattatggaaacctgaactggagatcccttttagtgtttcaaaatgaggtaaaaattggtatttctattgcttgtaatcattgtgaaaaccccctttgtatgaaagtttgcccagctaatgctatacataaagatgatatgggaatagtttacataaatggtaatgaatgtataggttgtggttattgccaatgggcttgtccttatgaagaacctaagtttaaccatgaaggaataatgacaaagtgtgatttatgtaggcaaaggattttgaaaaaagaaggattgccttattgtgttgaatcatgtcctactggtgcactatctttcggttggatagataaacctaaatatgatgcaccttacctagcaccttatgatattacaaaacctaagcttgaaataaagaagcccaaagaggaagagatcaaggcttcaccgctaaagagaagaagagaggaaagatatattgaacttttactctttacaattctttctgaactctctctagggattcttataactaggattccgttttattccttaatctctctcattcttttagctattggtttagttccgtcgattttccacgttaatagaagagaaagggcttatagggttataatgaatttaaaatcttcttggcttagtagggaagtattctttggcggtttatcattcctttcattactactggaactcgtaacacctagtttatactacttatcagttatactaatttccttatctgtattttcgtccattatgatatatatgctaaagaccacaccctcttggtataatcctaatacaccgttatccttcataggtactatatttaccgtattcccattaggattttacttcactcactctctgctattcttactaattcctttagtttttggagttattgaaataagtcttgcaaggaaagagaaaatactacatataccgtatttgatactcttggtaatttctatctttatcccgttaataagtattctagcctcattagttggtatttcatcagaaatcatagcaagacgtaatttctttgaaaagattacatactacggtctaccaagtccataa

SEQ ID NO: 67518 - protein, 391 aa, Sulfolobus tokodaii str. 7
MERSLGFIFDPNKCIVCNACVNACNEHYGNLNWRSLLVFQNEVKIGISIACNHCENPLCMKVCPANAIHKDDMGIVYINGNECIGCGYCQWACPYEEPKFNHEGIMTKCDLCRQRILKKEGLPYCVESCPTGALSFGWIDKPKYDAPYLAPYDITKPKLEIKKPKEEEIKASPLKRRREERYIELLLFTILSELSLGILITRIPFYSLISLILLAIGLVPSIFHVNRRERAYRVIMNLKSSWLSREVFFGGLSFLSLLLELVTPSLYYLSVILISLSVFSSIMIYMLKTTPSWYNPNTPLSFIGTIFTVFPLGFYFTHSLLFLLIPLVFGVIEISLARKEKILHIPYLILLVISIFIPLISILASLVGISSEIIARRNFFEKITYYGLPSP

SEQ ID NO: 67519 - DNA, 813 bp, Sulfolobus tokodaii str. 7
  CDS (1)..(813): transl_table=11
atgtcctctataactctaaatccgaaagaaggtggaattcaaaaatcccttcctttcacgccaaagaaaaactatgctataataactgacttaaacaagtgtttcggctgtgctggctgtcaaatgtcatgtaaagaatggaacacctctggaatgtttggaccgttaccagatctaaatccatatggagaattagatgttatgttctggctaagagtgctttatgttgaagttggtaactatccgcaaactaaagtttacaacatcccaataaactgtttccactgtatgaatgccccttgtgtaccagtatgtccagttggtgctacgtttaagagagaagaagacggaatagtattagtagattataatgagtgcataggaactaaatactgtatttatgcatgtccttacggtaatagattcttcgattatgttgaaggtgttacaaagaagtgtactcattgttttgatagaatttatgatccaacactaccgccagaagaaagaatcccagcttgtatacacggctgcatggttcaagcgagaatatgggctgatagattagatcccactgaccctggtaatatactgtttatagataaaggtggatttgttttaggtccagaaaccggtgctgatccagctagcggttatttaccgtggcgtagtgcatacgccgctgataacgatgttgaattacttagcgagtcagaatattataacgtatggacttcaaatggtgtagttattttaggatctcaaggaaataactctacctacacagaacaaaacggtaattctacaagttaa

SEQ ID NO: 67520 - protein, 270 aa, Sulfolobus tokodaii str. 7
MSSITLNPKEGGIQKSLPFTPKKNYAIITDLNKCFGCAGCQMSCKEWNTSGMFGPLPDLNPYGELDVMFWLRVLYVEVGNYPQTKVYNIPINCFHCMNAPCVPVCPVGATFKREEDGIVLVDYNECIGTKYCIYACPYGNRFFDYVEGVTKKCTHCFDRIYDPTLPPEERIPACIHGCMVQARIWADRLDPTDPGNILFIDKGGFVLGPETGADPASGYLPWRSAYAADNDVELLSESEYYNVWTSNGVVILGSQGNNSTYTEQNGNSTS

SEQ ID NO: 67521 - DNA, 618 bp, Escherichia coli K12
  CDS (1)..(618): transl_table=11
atgaccacacaatatggattttttatcgattccagccgctgtactggctgtaaaacctgcgaactggcgtgcaaagattttaaagatcttggcccggaagtcagtttccgccgtatttatgaatacgctggcggcgactggcaggaagataatggcgtctggcaccagaacgtgttcgcttattatctctccatctcctgtaaccattgcgatgaccccgcatgtacaaaagtctgccccagcggcgcaatgcataagcgtgaagatggctttgtggtggttgatgaagatgtttgtatcggctgccgctactgccacatggcttgtccgtacggcgcgccacagtacaatgctgaaaaagggcacatgacgaagtgcgatggttgttattcgcgcgtcgccgaggggaaacaacccatatgtgtcgaatcctgcccgctgcgtgcacttgagttcggtccaattgaagagctgcgccagaagcacggcactcttgctgccgtcgcgccactgccgcgcgcgcatttcacaaaacccaatatcgttatcaaacctaacgccaacagccgcccgaccggcgataccactggttatctggctaatccggaggaagtgtaa

SEQ ID NO: 67522 - protein, 205 aa, Escherichia coli K12
MTTQYGFFIDSSRCTGCKTCELACKDFKDLGPEVSFRRIYEYAGGDWQEDNGVWHQNVFAYYLSISCNHCDDPACTKVCPSGAMHKREDGFVVVDEDVCIGCRYCHMACPYGAPQYNAEKGHMTKCDGCYSRVAEGKQPICVESCPLRALEFGPIEELRQKHGTLAAVAPLPRAHFTKPNIVIKPNANSRPTGDTTGYLANPEEV

SEQ ID NO: 67523 - DNA, 720 bp, Escherichia coli K12
  CDS (1)..(720): transl_table=11
atgtcatggatagggtggacagttgcagccactgcattaggggataatcagatgtccttcactcgacgcaaatttgttctggggatgggaacagtaatcttttttactggttctgcgtcttctctgttagcgaacacgaggcaagaaaaggaagttcggtatgccatgattcatgacgagtcacggtgcaatggctgtaatatttgcgcccgcgcatgccgtaaaactaaccacgtccccgctcagggaagccgtttatcgatagcacacattccagtcaccgataacgacaacgaaacgcagtatcacttttttcgccagtcatgtcagcactgcgaagatgctccgtgcatcgacgtttgcccgacgggggcgtcgtggcgtgatgagcaggggatcgtgcgggtagaaaaatcgcagtgcatcggctgcagttattgcattggcgcttgtccgtaccaggttcgctaccttaaccctgtcactaaagtggcagataaatgtgatttctgcgctgagtcccgactggcaaaaggctttccgcccatttgcgtcagcgcctgcccggaacacgcattgatctttggtcgcgaagatagcccagaaattcaggcgtggttgcagcaaaataaatactatcaatatcagctacctggtgccgggaaaccgcatctgtatcgccggttcggtcaacatttgattaaaaaggaaaatgtatga

SEQ ID NO: 67524 - protein, 239 aa, Escherichia coli K12
MSWIGWTVAATALGDNQMSFTRRKFVLGMGTVIFFTGSASSLLANTRQEKEVRYAMIHDESRCNGCNICARACRKTNHVPAQGSRLSIAHIPVTDNDNETQYHFFRQSCQHCEDAPCIDVCPTGASWRDEQGIVRVEKSQCIGCSYCIGACPYQVRYLNPVTKVADKCDFCAESRLAKGFPPICVSACPEHALIFGREDSPEIQAWLQQNKYYQYQLPGAGKPHLYRRFGQHLIKKENV

SEQ ID NO: 67525 - DNA, 753 bp, Salmonella typhimurium LT2
  CDS (1)..(753): transl_table=11
atgtggacgggagtcaatatggacagcagtaaacggcaatttctccagcagcttggcgtcctgaccgctggcgcctcgctggttccgctggctgaagcgaaatttcctttttcgccggagcggcatgaaggctctccccgacaccgttacgccatgcttatcgatctgcggcgttgtatcggctgtcagtcctgtaccgtaagttgcactattgaaaaccaaacgccgcaaggcgcgtttcgtacgacggtgaaccaataccaggtccagcgtgaaggtagtcaggaagtcacgaatgtgctgttgccgcgtctgtgcaaccattgcgataaccccccctgtgtgccggtctgcccggtacaagccacctttcagcgggaagatggcattgtggtggtggataacaaacgctgcgtcggctgcgcctattgtgtccaggcgtgtccttacgacgcccgatttatcaatcatgaaacgcaaactgccgataaatgcacgttttgcgtccatcgtctggaagccggactgttacccgcttgcgtagagtcctgcgtcggcggcgcgcgtattattggcgatatcaaagatccccatagccgcatcgccaccatgcttcatcagcatcgcgacgctatcaaggtattaaagccggaaaacggcacgtcgccccatgttttctacctgggtctggacgacgcctttgtcaccccattaatgggccgtgcgcagcccgcgctttggcaggaggtctga

SEQ ID NO: 67526 - protein, 250 aa, Salmonella typhimurium LT2
MWTGVNMDSSKRQFLQQLGVLTAGASLVPLAEAKFPFSPERHEGSPRHRYAMLIDLRRCIGCQSCTVSCTIENQTPQGAFRTTVNQYQVQREGSQEVTNVLLPRLCNHCDNPPCVPVCPVQATFQREDGIVVVDNKRCVGCAYCVQACPYDARFINHETQTADKCTFCVHRLEAGLLPACVESCVGGARIIGDIKDPHSRIATMLHQHRDAIKVLKPENGTSPHVFYLGLDDAFVTPLMGRAQPALWQEV

SEQ ID NO: 67527 - DNA, 618 bp, Salmonella typhimurium LT2
  CDS (1)..(618): transl_table=11
atgacaacccagtatggattttttattgattccagtcgttgcaccggttgcaaaacctgcgaactggcctgcaaggactacaaagatctcactcccgacgtcagcttccgccgcatttatgagtatgcgggcggtgactggcaggaagataacggcgtctggcaccagaacgtctttgcctattatctctccatttcatgcaaccactgcgaagacccggcctgtaccaaagtctgcccgagcggcgcgatgcacaagcgcgatgacggttttgtggtggtgaacgaagaggtctgtatcggctgccgctactgccacatggcctgcccgtacggcgcgccgcagtacaacgcggccaaaggtcatatgaccaagtgcgacggctgttatgaccgtgtcgctgacggcaagaaaccgatttgcgtggagtcctgcccgctgcgggcactggactttggcccgatagacgaactgcgtaaaaaacacggtgagctggctgccgtcgcgccgttgccgcgcgcgcatttcacgaagccgaatattgtgattaaacccaacgccaacagccgcccgaccggggacactaccggttatctggccaatccgaaggaggtataa

SEQ ID NO: 67528 - protein, 205 aa, Salmonella typhimurium LT2
MTTQYGFFIDSSRCTGCKTCELACKDYKDLTPDVSFRRIYEYAGGDWQEDNGVWHQNVFAYYLSISCNHCEDPACTKVCPSGAMHKRDDGFVVVNEEVCIGCRYCHMACPYGAPQYNAAKGHMTKCDGCYDRVADGKKPICVESCPLRALDFGPIDELRKKHGELAAVAPLPRAHFTKPNIVIKPNANSRPTGDTTGYLANPKEV

SEQ ID NO: 67529 - DNA, 630 bp, Salmonella typhimurium LT2
  CDS (1)..(630): transl_table=11
atgagtcagtttacacattacccgccggtgagcgataaacaactgggatttttcatcgactcctcacgctgctccggttgtaaagcctgccaggtggcctgcaaagacaaaaacaatctggaagtaggccgtcgtttccgccgcgtctatgaagtcaagggcggaagtttcatcccgaccgggcagggtggggtcagcaataacgtatttgcttatacgctttccatttcctgcaaccactgtgcggaccctgtctgcaccaaaaattgcccgactaccgctatgcataaacgcccgggtgacggcattgtgcgcgttgataccgacaaatgcgtcggctgtggctattgcgcctggtcctgcccttatggcgcgccgcagcttaacgagcagaccggccaaatgtctaagtgcgacatgtgcgttgatttactggcgaaaggtgaaccgcccgtctgtgttgcgacctgtccgctggaggccatcaagtttggtccgattgatgaactgcgcgcgaagtacggtagcgtatgcgacgttaacgggctgccagattcatccataaccaaacctaatctggttgtcaaagcgcatcagggcgcagaaaaagagggtaaacgccatgcatga

SEQ ID NO: 67530 - protein, 209 aa, Salmonella typhimurium LT2
MSQFTHYPPVSDKQLGFFIDSSRCSGCKACQVACKDKNNLEVGRRFRRVYEVKGGSFIPTGQGGVSNNVFAYTLSISCNHCADPVCTKNCPTTAMHKRPGDGIVRVDTDKCVGCGYCAWSCPYGAPQLNEQTGQMSKCDMCVDLLAKGEPPVCVATCPLEAIKFGPIDELRAKYGSVCDVNGLPDSSITKPNLVVKAHQGAEKEGKRHA

SEQ ID NO: 67531 - DNA, 903 bp, Salmonella typhimurium LT2
  CDS (1)..(903): transl_table=11
atggcttatcaatcgcaagacatcattcgtcgttccgccactaacggtttcacccccgcgccccaggcgcgggaccaccaggaagaggtggcgaaactcatcgacgtcaccacctgtatcggctgtaaagcgtgtcaggtggcgtgctccgagtggaacgacatccgtgatgaagtgggcaataacgtcggggtgtatgacaacccggcggacttaaccgcgaaatcctggacggtgatgcgcttctcggaagtggaacagaacgacaaactggagtggctgatccgtaaggatggctgtatgcactgcgccgatccaggctgcctgaaggcctgtccggcggaaggggcgatcattcagtacgctaacggtattgtcgacttccagtccgagcagtgtatcggctgcggctactgtatcgctggctgcccgttcaacgtgccgcgcctcaacccggaagacaaccgcgtctataaatgtacgctgtgcgttgaccgcgtgaccgtcgggcaagaaccggcctgcgtgaagacctgtccaaccggcgccattcattttggctcgaaagaggatatgaaaacgctggcgggcgagcgtgtggcggaactaaaaacccgtggttatgacaacgcgggtctgtacgatccggcgggagtaggcggtacgcatgtcatgtacgtgctgcatcatgccgacaagccgaatctgtatcacggtctgccggaaaacccggaaatcagcgaaaccgttaagttctggaaaggcgtctggaaaccgctcgccgcgttcggttttgccgcgacctttgccgccagcgtcttccactatgtcggcgtcggcccgaaccgcgcggaagaggaagatgacaacctgcatgaagagaaagacgaggtgcgcaaatga

SEQ ID NO: 67532 - protein, 300 aa, Salmonella typhimurium LT2
MAYQSQDIIRRSATNGFTPAPQARDHQEEVAKLIDVTTCIGCKACQVACSEWNDIRDEVGNNVGVYDNPADLTAKSWTVMRFSEVEQNDKLEWLIRKDGCMHCADPGCLKACPAEGAIIQYANGIVDFQSEQCIGCGYCIAGCPFNVPRLNPEDNRVYKCTLCVDRVTVGQEPACVKTCPTGAIHFGSKEDMKTLAGERVAELKTRGYDNAGLYDPAGVGGTHVMYVLHHADKPNLYHGLPENPEISETVKFWKGVWKPLAAFGFAATFAASVFHYVGVGPNRAEEEDDNLHEEKDEVRK

SEQ ID NO: 67533 - DNA, 696 bp, Ralstonia solanacearum GMI1000
  CDS (1)..(696): transl_table=11
atggcgcgcatgaaattcatctgtgacagcgagcgctgcatcgagtgcaacgcctgcaccaccgcctgcaagaacgagcacgaggtgccgtggggcgtgagccggcgccgcgtggtcaccatcaacgacggcatggtcggcgcggagaaatccatctcggtggcgtgcatgcactgctccgacgcgccctgcatggcggtctgcccggtcgactgcttctaccgcaccgaggacggcgtggtgctgcacgacaaggacgtctgcatcggctgcggctactgttcgtacgcctgcccgttcggcgcgccgcagttcccgagccagggcaccttcggggtgcgcggcaagatggacaagtgcaccttctgcgcgggcgggccggagcccaacggcagcgatgccgagttcgagaagtacggccgcaaccggctggccgagggcaagctgccgctgtgcgcggagatgtgctcgaccaaggcgctgctgggcggcgacggggatgtcattgccgacatcctgcgcaatcgtgtcatgaagcggggaaaaggagcggagctgttcggctgggggacggcctacggaggcgcaggcaagagcgcccaggccgcaccggctgccccaactgctccagctgctccagctgctccagctgcccccgccgccaagccggacgcaccggcctcgggagcgtactag

SEQ ID NO: 67534 - protein, 231 aa, Ralstonia solanacearum GMI1000
MARMKFICDSERCIECNACTTACKNEHEVPWGVSRRRVVTINDGMVGAEKSISVACMHCSDAPCMAVCPVDCFYRTEDGVVLHDKDVCIGCGYCSYACPFGAPQFPSQGTFGVRGKMDKCTFCAGGPEPNGSDAEFEKYGRNRLAEGKLPLCAEMCSTKALLGGDGDVIADILRNRVMKRGKGAELFGWGTAYGGAGKSAQAAPAAPTAPAAPAAPAAPAAKPDAPASGAY

SEQ ID NO: 67535 - DNA, 645 bp, Pyrobaculum aerophilum str. IM2
  CDS (1)..(645): transl_table=11
gtgtctatccaaactactaggagggatgtgttaaaggccacagccgccgctgttataacactagccgttccgatatcggcgcaagctacagaaaaacgccgctgggctatgtatatcgacgtcagcaagtgttatggctgttatgcgtgtatggtggcttgcgccgccgagaataacgtgcctataggcgttttcagaacgtggattgagcgccacgtcacaaagggaggcacagttatcttcgtgccaaagcagtgtaatcactgcgaaaatgcgccgtgtgtgaagccatgtcccacaggcgctacttataaaactgaagatggacttgtcttagtaaatgacgacctttgtattggctgtggcgcgtgtatacaagcatgtccatacggcgccagattctttaacccagtgaagggagttgttgataaatgtacattctgttcccacagaatttaccaaggcaaattgccggcatgtgtagagacatgcccaaccggggcgagagtatttggcgatttaaacgaccccacatcgccagttttaaaactagttaacacaaacgcaacacaacggctgaaagtagaaactggcgcggagccaatgatcttctatagaaacttgccctcagaggcgggcctatga

SEQ ID NO: 67536 - protein, 214 aa, Pyrobaculum aerophilum str. IM2
MSIQTTRRDVLKATAAAVITLAVPISAQATEKRRWAMYIDVSKCYGCYACMVACAAENNVPIGVFRTWIERHVTKGGTVIFVPKQCNHCENAPCVKPCPTGATYKTEDGLVLVNDDLCIGCGACIQACPYGARFFNPVKGVVDKCTFCSHRIYQGKLPACVETCPTGARVFGDLNDPTSPVLKLVNTNATQRLKVETGAEPMIFYRNLPSEAGL

SEQ ID NO: 67537 - DNA, 846 bp, Pyrobaculum aerophilum str. IM2
  CDS (1)..(846): transl_table=11
gtgtccctgaccttccccaagcccaacgaaggagtcgcggtgcttgtggatatagacaagtgtattggatgccgcgcttgccaagtggcttgtaaagactggaacggaaggccggcggttaagacggagtttgcgggatctctcacgttgcctaaatggctcacggcggaggactggaaggttgtgttcttctatgagggcaaaactggcaagaagttaatgacgcctgctggagaagtgactttcagccagtttgaattggcgcccttgccgtacaattgtatgcactgcgccgctgccccgtgcgccagggcttgtcccgtcggtgcgattaaagtcactggcgagggggcagtcgttataaataaagaagagtgtataggatgtggatactgcgaagccgcctgtccatatgacgtccccaagaagggatctgatggaagatactacaagtgtactttctgtgtagataggattcaaaacggccgcgctcctgcgtgcgtagaggtatgtccaacgaatgtgttcacatttggcccagctagcgaagttatagccaaggcaagggaagagcagaggcgcggaagatatgtctacgggcttgaggtaaacgattatgttggcggctcagtccgttggatatatgtgacatcggataggagggcctttgcggttaagcaacacttctctaacgcaagcccgcgggctgcacaacaaataagagaggtgttaaagccgctgactttatacggaggggcgttgctggccgtgggtttgacgatagccggcatagcggcttggcgccagcgcagaaaagaggaaaaggaagaggctgggactaaataa

SEQ ID NO: 67538 - protein, 281 aa, Pyrobaculum aerophilum str. IM2
MSLTFPKPNEGVAVLVDIDKCIGCRACQVACKDWNGRPAVKTEFAGSLTLPKWLTAEDWKVVFFYEGKTGKKLMTPAGEVTFSQFELAPLPYNCMHCAAAPCARACPVGAIKVTGEGAVVINKEECIGCGYCEAACPYDVPKKGSDGRYYKCTFCVDRIQNGRAPACVEVCPTNVFTFGPASEVIAKAREEQRRGRYVYGLEVNDYVGGSVRWIYVTSDRRAFAVKQHFSNASPRAAQQIREVLKPLTLYGGALLAVGLTIAGIAAWRQRRKEEKEEAGTK

SEQ ID NO: 67539 - DNA, 699 bp, Pyrobaculum aerophilum str. IM2
  CDS (1)..(699): transl_table=11
atgaggccggtatttgtcattgacataaataaatgcgttgggtgccgcgcctgcgtagccgcgtgtattattgaatacggccaggtattcacagcggcgcgcccgtctaaccaggggaagccgcagacagtgaaattgaggacttgggttgagtggagggagggctatgacggcaagccgtataggaagttcatatcctcgttgtgttaccactgtgaggataccccgtgtcaaagagtctgtccaactggtgcaacctacaagactccagagggcgttgtgttaattgataaagatctatgtataggctgtggatactgcattatcgcctgtccatatggctctcgttatagacctgagccgcatgaatggcatgaggctgagaacaagccgcttgttaaagaggttgaagaggttacgcaatatggcggggtattattcaaatcgccagtgccaaacaaatgggcgtttagaattgactctgtggataaatgtacattctgctaccaccggtataaaggcgatgggaagttatggacgccggcttgtgttgaggtttgtccaactggctcaagattattcggcgatttggacaatcccaacgatcctgtggcagatttagtacgcaaaggcgtggccaggctagctaggccagatttaaagactggtggaagagtttattacgtgggggagctatga

SEQ ID NO: 67540 - protein, 232 aa, Pyrobaculum aerophilum str. IM2
MRPVFVIDINKCVGCRACVAACIIEYGQVFTAARPSNQGKPQTVKLRTWVEWREGYDGKPYRKFISSLCYHCEDTPCQRVCPTGATYKTPEGVVLIDKDLCIGCGYCIIACPYGSRYRPEPHEWHEAENKPLVKEVEEVTQYGGVLFKSPVPNKWAFRIDSVDKCTFCYHRYKGDGKLWTPACVEVCPTGSRLFGDLDNPNDPVADLVRKGVARLARPDLKTGGRVYYVGEL

SEQ ID NO: 67541 - DNA, 567 bp, Pyrobaculum aerophilum str. IM2
  CDS (1)..(567): transl_table=11
atgactcgcctagcccacctctgggatcaatcccgttgcataggatgcacagcgtgtatagcggcttgcaatgttgcaaactacagctcagatacaaaggaaaacaagacgtggggctggttacgctctaacattagacgaatagagatattaaggggaccgagacctatgcttctgctagtgcagtgtcaacactgcgacaatgcgccatgcgtcgcggtatgtcctactggcgcgtcgtataaagacgtagatgggctggtgaaaatgaggcccgagctgtgcataggctgtaaatactgtatggtcgcatgcccctatgaggccagatggcttgatgaagataccggcttacctaggaagtgcatgggagaggagtgtctaagtcgcgtttcacaaggcctacagccagtgtgcgtagaggtgtgtcccgcaggtgccagggcttttggcgatattgacaaccccacatctgagatatcgcgccgccttgccaaaagccgctacattagactattagaaaacaaaggaacagagccaaagtacttcgtagtcgtggggccatga

SEQ ID NO: 67542 - protein, 188 aa, Pyrobaculum aerophilum str. IM2
MTRLAHLWDQSRCIGCTACIAACNVANYSSDTKENKTWGWLRSNIRRIEILRGPRPMLLLVQCQHCDNAPCVAVCPTGASYKDVDGLVKMRPELCIGCKYCMVACPYEARWLDEDTGLPRKCMGEECLSRVSQGLQPVCVEVCPAGARAFGDIDNPTSEISRRLAKSRYIRLLENKGTEPKYFVVVGP

SEQ ID NO: 67543 - DNA, 600 bp, Chlorobium tepidum TLS
  CDS (1)..(600): transl_table=11
atggcccgttatggaatggtaatggatatgcgtacctgcgtcggctgtcaggcctgcatggcggcgtgttcgaccgaaaaccagaccccgttctggagcgagaagtttcggacgcatgtggaggacaaggagacaggagccttccccgatgtacgccgggtgcagcttccgcgcctctgcatgcactgcgaaaacaccccctgcctgtcggcctgcccgaccggggcgacccatatgaacaaggacggcatcgtgctggtcaactatgaccgttgcatcggctgctacgcctgctgcatcgcctgcccgtacgacgcccgctacgcctacgacagcgaggatgtccagaaggagcgcgaactgtacggcaaactggtcacgcacgacgtgccacatgtggacaaatgcaccttctgcgtgcagcgcctgtcggaaaaactcgaaccggcctgcgtcgccacctgcccgacccacacgcgcatcttcggcgacctcgatgaccgcaagagcgaggtgcacaagctcgccgcgagcggcaaggcgcaggcgctcaaccagggcctcggcacctcgccgaaagtattctacatcccatcataa

SEQ ID NO: 67544 - protein, 199 aa, Chlorobium tepidum TLS
MARYGMVMDMRTCVGCQACMAACSTENQTPFWSEKFRTHVEDKETGAFPDVRRVQLPRLCMHCENTPCLSACPTGATHMNKDGIVLVNYDRCIGCYACCIACPYDARYAYDSEDVQKERELYGKLVTHDVPHVDKCTFCVQRLSEKLEPACVATCPTHTRIFGDLDDRKSEVHKLAASGKAQALNQGLGTSPKVFYIPS

SEQ ID NO: 67545 - DNA, 777 bp, Chlorobium tepidum TLS
  CDS (1)..(777): transl_table=11
atgagtcaaaaccgtagagaatttctgaaaaaggccggtctgggcgctctcgccggcctgggtgccgccgcgggtctgttcccggcgttcgcgcttgagaataccgatatgtcgagctttaccaccaagccgacgccgggcaaggtgcgctggggaatgctggttgatacccgcaagtgcctcggcgactgcaaggagtgcatcgtccgttgccaccacgatcacaacgtgccggacttcggccatacgaagaacgaggtcaaatggatatggaagagcggttatgagaatgcgtttccgaccgccagcacgcagttccagaatcccgaagtgctggaacgccaggtgctgacgctctgcaaccactgcaccgagccgccctgcaccaaagcctgcccgaccgaggcgacctttaagcgctgggacggcatcgtctccatcgactaccatcgctgcattggctgccgcttctgcatggccgcctgcccgtacggttcgcgcagcttcaactggctcgatccgcgtccgcacatcaaggagctgagcaacacctacccgacacggatgcgcggcgtggtcgagaagtgcaacttctgctcggagcggctcgtcaagggcgagcttccggcctgcgtcgtcagctgtgcggagaatgcgcttaccttcggcgacctgaacgatccaaattcggagatccgcaagatgctcgccacgaacgaaaccatgcagcgcaagccggaactcggcacgctgccatcagtcttttacatcatctaa

SEQ ID NO: 67546 - protein, 258 aa, Chlorobium tepidum TLS
MSQNRREFLKKAGLGALAGLGAAAGLFPAFALENTDMSSFTTKPTPGKVRWGMLVDTRKCLGDCKECIVRCHHDHNVPDFGHTKNEVKWIWKSGYENAFPTASTQFQNPEVLERQVLTLCNHCTEPPCTKACPTEATFKRWDGIVSIDYHRCIGCRFCMAACPYGSRSFNWLDPRPHIKELSNTYPTRMRGVVEKCNFCSERLVKGELPACVVSCAENALTFGDLNDPNSEIRKMLATNETMQRKPELGTLPSVFYII

SEQ ID NO: 67547 - DNA, 618 bp, Shigella flexneri 2a str. 301
  CDS (1)..(618): transl_table=11
atgacaacccagtatggattttttattgattccagccgttgcgccggttgcaaaacctgcgagctggcttgtaaagactacaaagatttgacgccagaagtcagtttccgccgcatttatgaatatgctggcggcgactggcaggaagataacggtgtctggcaccagaacgtgtttgcctactatctgtcgatttcgtgcaaccactgcgaagatccggcttgtactaaagtctgcccgagcggtgcgatgcataaacgcgaagatggttttgttgtggtcgatgaagatgtatgcattggctgccgttactgtcatatggcttgcccgtatggcgcaccgcaatataacgaaacgaaaggccatatgaccaaatgcgatggttgttatgaccgtgttgcggagggtaaaaagccgatctgtgttgaatcttgcccgctgcgggcgctggatttcggccctatcgacgagctgcgtaaaaaacatggcgatctggcggccgttgcgccgttgccgcgagctcactttaccaaaccgaatattgtgatcaaacccaatgccaatagccgcccgaccggggataccactggctatctggcaaacccgaaggaggtgtga

SEQ ID NO: 67548 - protein, 205 aa, Shigella flexneri 2a str. 301
MTTQYGFFIDSSRCAGCKTCELACKDYKDLTPEVSFRRIYEYAGGDWQEDNGVWHQNVFAYYLSISCNHCEDPACTKVCPSGAMHKREDGFVVVDEDVCIGCRYCHMACPYGAPQYNETKGHMTKCDGCYDRVAEGKKPICVESCPLRALDFGPIDELRKKHGDLAAVAPLPRAHFTKPNIVIKPNANSRPTGDTTGYLANPKEV

SEQ ID NO: 67549 - DNA, 618 bp, Shigella flexneri 2a str. 301
  CDS (1)..(618): transl_table=11
atgaccacacaatatggattttttatcgattccagccgctgtactggctgtaaaacctgcgaactggcgtgcaaagattttaaagatcttggcccggaagtcagtttccgccgtatttatgaatatgctggctgcgactggcaggaagataatggcatctggcaccagaacgtgttcgcttattatctctccatctcctgtaaccattgcgatgaccccgcatgtacaaaagtctgccccagcggcgcaatgcataagcgtgaagatggctttgtggtggttgatgaagatgtttgtatcggctgccgctactgccacatggcttgtccgtacggcgcaccacagtacaatgctgaaaaagggcacatgacgaagtgcgatggttgttattcgcgcgtcgccgaggggaaacaacccatatgcgtcgaatcctgcccgctgcgtgcacttgagttcggtccaattgaagagctgcgccagaagcacggcactctggctgccgtcgcgccactgccgcgcgcgcatttcacaaaacccaatatcgttatcaaacctaacgccaacagccgcccgaccggcgataccactggttatctggctaatccggaggaagtgtaa

SEQ ID NO: 67550 - protein, 205 aa, Shigella flexneri 2a str. 301
MTTQYGFFIDSSRCTGCKTCELACKDFKDLGPEVSFRRIYEYAGCDWQEDNGIWHQNVFAYYLSISCNHCDDPACTKVCPSGAMHKREDGFVVVDEDVCIGCRYCHMACPYGAPQYNAEKGHMTKCDGCYSRVAEGKQPICVESCPLRALEFGPIEELRQKHGTLAAVAPLPRAHFTKPNIVIKPNANSRPTGDTTGYLANPEEV

SEQ ID NO: 67551 - DNA, 915 bp, Shewanella oneidensis MR-1
  CDS (1)..(915): transl_table=11
atggcgactcaagatatcattcaacgttccggcacttcgcaagccactccgcctgcacaggcaagagtgggtggcgtgaagcaaattgcgaagttgtttgacgcgactaagtgtaatggctgtaaagcctgtcaggtagcttgctcagaatggaatgacctgcgtgaagaggtgggttcgttccaagggacttatcaaaaccctgcatctctgtctccagagtgctggaccttgatgaagtacaacgagatcgaagaccaaggcaaattgcgctggcagtttactcactctgcctgtatgcactgcgccgatcccgcttgcttaaaggcttgctcgacctctggcgcaatcattcagcatgccaatggcactgtggatttcgattcggacaaatgtattggctgtggttattgtgccagtgcctgcccattcgatatcccgaagatcagcgccgtcgacaacaaggcctacaagtgcactatgtgttctgaccgcttggctgttgggctggaaccttcctgcgttaagtcctgtaccacgggtgcgctgcgttttggtacgcgcgaagacatgctgttcgcctccgaaaagcgtgttaacgagctgaaagaacgtggtttccctaaggcgggactctataacccagagggcgtgggtggtactggcatgctgatgatattgcatgatgtcactcagcctgaaacctacgaaatgcctaaggatccgcaaatcccattgtctgtcaccctgtggcaggactgggtgaaaccactgggtactgtcggacttcttgcgacggctgctgtggcttgcctgcataagatcaccgtcggtcgcaacatagtggaagaggaccaacccggctatcaaccgccagaggaagaggttaagcaagaagaggaggccaagaaatga

SEQ ID NO: 67552 - protein, 304 aa, Shewanella oneidensis MR-1
MATQDIIQRSGTSQATPPAQARVGGVKQIAKLFDATKCNGCKACQVACSEWNDLREEVGSFQGTYQNPASLSPECWTLMKYNEIEDQGKLRWQFTHSACMHCADPACLKACSTSGAIIQHANGTVDFDSDKCIGCGYCASACPFDIPKISAVDNKAYKCTMCSDRLAVGLEPSCVKSCTTGALRFGTREDMLFASEKRVNELKERGFPKAGLYNPEGVGGTGMLMILHDVTQPETYEMPKDPQIPLSVTLWQDWVKPLGTVGLLATAAVACLHKITVGRNIVEEDQPGYQPPEEEVKQEEEAKK

SEQ ID NO: 67553 - DNA, 675 bp, Shewanella oneidensis MR-1
  CDS (1)..(675): transl_table=11
atgactcaacaaacacaatatggtttctatttcgatagcagcaaatgtactggctgtaaaacttgtcatattgcctgtaaggaccgcatgactggcttggttcgtgcaaaagacgatgtgatgaataatggtgtcgctaatttgcccggtattatttggcgccgtgtttatgaatatggcggcggcaattggtcgcaaaatgtcgatggtagttttgagcaaaatgtctttgcctactacatgtctattggttgtaaccattgcagccagcctgtgtgtgttaaagcctgcccaacaggtgcaatgcataagcgccgcgaagatggcttagtccaagttgccactgaactatgtattggttgtgaaagttgtgcgagggcttgcccatatgatgcaccacagctggatatcgagcgtaaggtgatgaccaagtgtgatggttgcagcgatagacttgctgaaggtaaaaagcctatttgcgttgattcttgtcctttacgggcacttgactttgacactatggataatttacgagcgaaatatggagagggggatggtcatattgctcccttaccatcgccatcgattacttcgccaaacttgattatcaaggccaatcgaaatggtcaaccagttggtggtagtgggcaattattaaaccctgcagaagtgtaa

SEQ ID NO: 67554 - protein, 224 aa, Shewanella oneidensis MR-1
MTQQTQYGFYFDSSKCTGCKTCHIACKDRMTGLVRAKDDVMNNGVANLPGIIWRRVYEYGGGNWSQNVDGSFEQNVFAYYMSIGCNHCSQPVCVKACPTGAMHKRREDGLVQVATELCIGCESCARACPYDAPQLDIERKVMTKCDGCSDRLAEGKKPICVDSCPLRALDFDTMDNLRAKYGEGDGHIAPLPSPSITSPNLIIKANRNGQPVGGSGQLLNPAEV

SEQ ID NO: 67555 - DNA, 567 bp, Shewanella oneidensis MR-1
  CDS (1)..(567): transl_table=11
atgacgaaaagatatgtgatggtgcacgatgagaacaagtgcatcggctgccaagcctgtaacgtggcttgccgcagtgaaaacggcgttccagaaggggttacccgtttgcaggtgagagtcgaagggccctatggcgaaatgcccaatctgcactttaagtaccacagggtgtcttgtcagcagtgtgaagatgcgccttgtgtgaaggtgtgtccaacgggcgcggcctatgtgggcgaagatggcattgtctccatccacggcgacaagtgtgtgggttgtatgtactgcgtggcggcgtgcccctacaaagtgcgttttatgaatcccgaaaccaaagtggctgacaagtgtaacttctgtaaggacacccgcttagcccgtggtgaagagccagcctgtgtgactgtgtgtccaaccgatgccttggtgtttggcgatgctaacgatccacaaagtgaagtggccacactgctcaacactaagatcacttaccaagataagacccatttaggcactaaacctagggtatatcgcgttcctaccaaaagaggggggatttga

SEQ ID NO: 67556 - protein, 188 aa, Shewanella oneidensis MR-1
MTKRYVMVHDENKCIGCQACNVACRSENGVPEGVTRLQVRVEGPYGEMPNLHFKYHRVSCQQCEDAPCVKVCPTGAAYVGEDGIVSIHGDKCVGCMYCVAACPYKVRFMNPETKVADKCNFCKDTRLARGEEPACVTVCPTDALVFGDANDPQSEVATLLNTKITYQDKTHLGTKPRVYRVPTKRGGI

SEQ ID NO: 67557 - DNA, 618 bp, Shewanella oneidensis MR-1
  CDS (1)..(618): transl_table=11
atgcaagaaccaacccaatacggtttttatgtcgataccactaagtgcagtggttgcaaaacgtgtcaagtggcctgtaaggatcgcagtgatatcgaggtcggtaaacagtggcgcagaacctacgaatattgtggtggaaattggactgctgatgggcagggtgcttaccatcaagatgtatttgcctattatatttcaataagttgcaaccattgtagcaatccggtgtgtgttaaagcttgccctacgggggctatgtataaagagcgcagcactggcttagtgaaagtgaatcaggatctgtgtattggctgcgaaagctgtgctcgtgcttgtccttatgatgcaccacagatcgatccacaacgtaaagtgatgactaagtgtgatggttgcagcgaccgtgttgccaagggcctcaaaccaagttgtgtgatgtcctgcccgcagcgcgccttagattttggtttaattgccgagttaaagcaacagtatggcaacgatagcgatatatcaggtttgccatcatcttctattactcacccaaatttagtgttaaaggtgcatgctaaatcagggcagcgtggggagattattaacatcacagaagtgtaa

SEQ ID NO: 67558 - protein, 205 aa, Shewanella oneidensis MR-1
MQEPTQYGFYVDTTKCSGCKTCQVACKDRSDIEVGKQWRRTYEYCGGNWTADGQGAYHQDVFAYYISISCNHCSNPVCVKACPTGAMYKERSTGLVKVNQDLCIGCESCARACPYDAPQIDPQRKVMTKCDGCSDRVAKGLKPSCVMSCPQRALDFGLIAELKQQYGNDSDISGLPSSSITHPNLVLKVHAKSGQRGEIINITEV

SEQ ID NO: 67559 - DNA, 951 bp, Pseudomonas putida KT2440
  CDS (1)..(951): transl_table=11
atggccagccaagacatcatcgcccgctcggccaccactaccgtgccgccctcggtgcgtcagcaggaggaggtcgccaagctgatcgacactaccaagtgcatcggctgcaaggcctgccaggtggcgtgctcggagtggaatgaactgcgtgacgaggttggccacaaccacggcacctacgacaacccccaggacctcactgccgagacctggacactgatgcgctttaccgagcatgagcgcgacgacggcaacctggagtggctgatccgcaaggacggttgcatgcactgtgccgacccaggttgcctgaaggcatgcccgagcccgggcgcgatcatcaagcacgccaacggtatcgtcgacttcaaccaggaccactgcatcggctgcggctactgcatcaccggctgcccgttcaacatcccgcgtatctcgcagaaagaccacaaggcgtacaagtgcaccctgtgttccgatcgcgtgagcgtggggctggagccggcatgcgtgaaaacctgcccgaccggggcgatcgtgttcggcagcaaggacgagatgaaagtgcatgcggccgagcgcatcgtcgatctgaagtcgcggggctacgacaaggccgggctgtacgacccggacggcgtcggtggtacccacgtgatgtacgtgctgcaccatgccgacacgccgaagctgtatgccggcctgccggaccagccagtgatcagcccgttggtagggttgtggaagggcttcaccaagccgctggcgctgttggccatgggcgcggcggtgctggcggggttcttccactatgtgcggatcggcccacagcgtgtcgaggaggatgaacacccgacaccgccggacgaaagcgtgcatcaagtggacccgtcggtccatgtctatgatccgaagcagcccggtgggcaaggggagcagcggccatga

SEQ ID NO: 67560 - protein, 316 aa, Pseudomonas putida KT2440
MASQDIIARSATTTVPPSVRQQEEVAKLIDTTKCIGCKACQVACSEWNELRDEVGHNHGTYDNPQDLTAETWTLMRFTEHERDDGNLEWLIRKDGCMHCADPGCLKACPSPGAIIKHANGIVDFNQDHCIGCGYCITGCPFNIPRISQKDHKAYKCTLCSDRVSVGLEPACVKTCPTGAIVFGSKDEMKVHAAERIVDLKSRGYDKAGLYDPDGVGGTHVMYVLHHADTPKLYAGLPDQPVISPLVGLWKGFTKPLALLAMGAAVLAGFFHYVRIGPQRVEEDEHPTPPDESVHQVDPSVHVYDPKQPGGQGEQRP

SEQ ID NO: 67561 - DNA, 618 bp, Escherichia coli CFT073
  CDS (1)..(618): transl_table=11
atgacaacccagtatggattttttattgattccagccgttgcaccggttgcaaaacctgcgagctggcttgtaaagactacaaagatttgacgccagaagtcagcttccgccgcatttatgaatatgctggtggcgactggcaggaagataacggtgtctggcaccagaacgtgtttgcctactatctgtcgatttcatgtaaccactgcgaagatccggcttgtaccaaagtctgcccaagcggtgcgatgcataaacgtgaagatggttttgtcgttgtcgatgaagatgtgtgtattggctgtcgttactgccatatggcctgcccgtatggcgcaccgcagtacaacgcaaccaaaggtcatatgaccaaatgtgatggttgctatgaccgcgtcgcagaaggtaaaaaaccgatctgcgtcgaatcttgcccgctacgggcgctggatttcggacctatcgacgagctgcgtaaaaaacacggcgatctggcggctgttgcgccgttgccgcgtgcgcacttcaccaaaccgaatattgtgatcaaacctaacgccaatagccgcccaaccggggataccactggctatctggcaaacccgaaggaggtgtga

SEQ ID NO: 67562 - protein, 205 aa, Escherichia coli CFT073
MTTQYGFFIDSSRCTGCKTCELACKDYKDLTPEVSFRRIYEYAGGDWQEDNGVWHQNVFAYYLSISCNHCEDPACTKVCPSGAMHKREDGFVVVDEDVCIGCRYCHMACPYGAPQYNATKGHMTKCDGCYDRVAEGKKPICVESCPLRALDFGPIDELRKKHGDLAAVAPLPRAHFTKPNIVIKPNANSRPTGDTTGYLANPKEV

SEQ ID NO: 67563 - DNA, 885 bp, Escherichia coli CFT073
  CDS (1)..(885): transl_table=11
atggctatggaaacgcaggacattatcaaaaggtccgcaactaactccatcacgccgccttctcaggtgcgtgattacaaagcagaagtagcgaaacttatcgacgtttccacctgtatcggctgtaaagcctgtcaggtggcgtgttcggagtggaacgacatccgtgatgaagtggggcactgcgtcggggtttacgataaccccgccgatctgagcgccaagtcctggacggtgatgcgctttagcgaaaccgaacagaacggcaagctggagtggctgatccgtaaagacggctgtatgcactgtgaagatccgggctgcctgaaggcgtgcccgtctgctggtgcaatcattcagtacgctaacgggattgtcgatttccagtcggaaaattgcatcggctgtggttactgcattgccggttgtccgtttaatattccgcgcctcaacaaagaggataaccgggtatataaatgcaccctctgcgtcgatcgcgtcagcgtcggccaggaaccggcttgtgtgaaaacctgtccgaccggggctatccacttcggcaccaagaaggagatgctggagctggcggaacagcgcgtagcgaaactgaaagcgcgtggttacgaacatgctggcgtctacaacccggaaggggtcggtggtacgcacgttatgtacgtgctgcatcatgccgatcagccggagctgtatcatggtctgccgaaagatccgaagatcgatacctcggtaagcctgtggaaaggcgcgttgaaaccgctggcagcggctggctttattgccacttttgccgggttgattttccactacatcggtattggcccgaataaggaagtggacgatgacgaggagggaaatcatgagtaa

SEQ ID NO: 67564 - protein, 294 aa, Escherichia coli CFT073
MAMETQDIIKRSATNSITPPSQVRDYKAEVAKLIDVSTCIGCKACQVACSEWNDIRDEVGHCVGVYDNPADLSAKSWTVMRFSETEQNGKLEWLIRKDGCMHCEDPGCLKACPSAGAIIQYANGIVDFQSENCIGCGYCIAGCPFNIPRLNKEDNRVYKCTLCVDRVSVGQEPACVKTCPTGAIHFGTKKEMLELAEQRVAKLKARGYEHAGVYNPEGVGGTHVMYVLHHADQPELYHGLPKDPKIDTSVSLWKGALKPLAAAGFIATFAGLIFHYIGIGPNKEVDDDEEGNHE

SEQ ID NO: 67565 - DNA, 987 bp, Escherichia coli CFT073
  CDS (1)..(987): transl_table=11
gtgaacagacgtaattttattaaagcagcctcctgcggggcattgctgacgggcgcgctgccgtctgtcagtcatgcggctgctgaaaaccgcccgccaattccgggatcgctggggatgttgtacgactcgaccttgtgcgtaggctgccaggcttgcgtcaccaagtgtcaggatatcaacttccctgaacgtaacccgcaaggggaacagacctggtcgaacaacgacaaactgtcgccgtataccaataacatcattcaggtgtggaccagcggcacaggggtcaacaaagaccaggaggagaatggctacgcgtacattaagaaacagtgtatgcactgcgtcgatccgaactgtgtctctgtgtgcccggtctctgcgctgaaaaaagatccgaaaaccggcattgtccattacgacaaagatgtgtgcaccggctgccgttactgcatggtcgcctgcccatacaacgtgccgaagtacgactacaacaacccgtttggtgcgctgcataagtgcgagttgtgcaaccagaaaggtgtggaacgtctcgataaaggcggtctgcctggctgcgtagaagtgtgcccggcgggcgcggtgatttttggtacgcgtgaagagctgatggcggaggcgaaaaaacgtctggcgctgaagccgggcagcgaataccactatccgcgtcagacgctgaaatctggcgacacttacctgcatacggtgccgaaatattatccgcatctgtacggcgagaaagagggcggcggtactcaggttctggtactgacgggtgtgccttatgaaaatctcgacctgccgaaactggacgatctttctactggtgcgcgttccgaacatgtccaacacaccctgtataaaggcatgatgctaccactggctgtgctggcgggcttaaccgtgctggttcgtcgcaacactaaaaacgaccatcacgacggaggagacgatcatgagtcatga

SEQ ID NO: 67566 - protein, 328 aa, Escherichia coli CFT073
MNRRNFIKAASCGALLTGALPSVSHAAAENRPPIPGSLGMLYDSTLCVGCQACVTKCQDINFPERNPQGEQTWSNNDKLSPYTNNIIQVWTSGTGVNKDQEENGYAYIKKQCMHCVDPNCVSVCPVSALKKDPKTGIVHYDKDVCTGCRYCMVACPYNVPKYDYNNPFGALHKCELCNQKGVERLDKGGLPGCVEVCPAGAVIFGTREELMAEAKKRLALKPGSEYHYPRQTLKSGDTYLHTVPKYYPHLYGEKEGGGTQVLVLTGVPYENLDLPKLDDLSTGARSEHVQHTLYKGMMLPLAVLAGLTVLVRRNTKNDHHDGGDDHES

SEQ ID NO: 67567 - DNA, 600 bp, Vibrio vulnificus CMCP6
  CDS (1)..(600): transl_table=11
atgaaattcctctgcgacaccaaacgctgcatcgaatgcaacggttgtgtgaccgcttgtaaaaatgaaaacgacgacgcattagagtggggcattcagcgccgccgcgttgttaccttgaacgatggtgaaccgggcgaaaactccatctcagtggcctgtatgcactgtaccgatgccccttgtatggcggtttgtcctgcagactgttttgaacataccgaagatggcattgtgctccacaacaaagatctgtgtattggttgtggttactgcctgtttgcttgcccatttggtgcgcctcagttcccgaaacaagcctcatttggcgagcgtggcaaaatggacaaatgcaccttctgcgccggtggtccaaacaccgaaccgggctcagaagaagagcgtctgaagtatggtgccaaccgtatcgcagaaggcaaactgccaatgtgtgcttcgctgtgttcaactaaggccctcttggcaggtgatgcagagaaaatctccgacatcttccgtcaacgtgtcgtggaacgtggtgcaaaagaggccggttggaccaacggtgaagatctatcctacgatgcaactcgcagctaa

SEQ ID NO: 67568 - protein, 199 aa, Vibrio vulnificus CMCP6
MKFLCDTKRCIECNGCVTACKNENDDALEWGIQRRRVVTLNDGEPGENSISVACMHCTDAPCMAVCPADCFEHTEDGIVLHNKDLCIGCGYCLFACPFGAPQFPKQASFGERGKMDKCTFCAGGPNTEPGSEEERLKYGANRIAEGKLPMCASLCSTKALLAGDAEKISDIFRQRVVERGAKEAGWTNGEDLSYDATRS

SEQ ID NO: 67569 - DNA, 687 bp, Vibrio vulnificus CMCP6
  CDS (1)..(687): transl_table=11
atgagttgttcaagacgaaatttccttgctggtggtggcgcgttgatcatgacaacgggcattgctggcacttctatggtgactgggcgcttagcatttgcggaagaggataagggccaagcaattcgttatggcatgatccacgacgagaccgcctgtatcggatgtacggcttgtaccgatgcctgccgagaggtgaacaaagtccctgaaggcgtaagtcgattggagatcatacgcagtgagccgcacggtgagtacccgaatgtcgattaccgtttcacccgtaaatcttgccaacactgtgaaaacccaccttgtgtttatgtttgtcctaccggtgcggcgtacaaagatgaaaaaaccggcatcgtggatgtccacaaagaaaaatgtgtcggttgcggctattgccttgccgcgtgtccctatcaagtgcgcttctttaacccagtggatcactcggccgacaaatgcaatttctgtcgagacaccaatttggcgcaaggcaagctacccgcctgtgtggaatcttgtccaactaaggcactgatttttggtgatttaaatgatccgcaaagtgacgtgaatcgagtattggctgagaaggtctattaccgagacaaagtgcacttaggcacgaaacccaaattattcaaaatcccacatcaaaaaggggaggtgtag

SEQ ID NO: 67570 - protein, 228 aa, Vibrio vulnificus CMCP6
MSCSRRNFLAGGGALIMTTGIAGTSMVTGRLAFAEEDKGQAIRYGMIHDETACIGCTACTDACREVNKVPEGVSRLEIIRSEPHGEYPNVDYRFTRKSCQHCENPPCVYVCPTGAAYKDEKTGIVDVHKEKCVGCGYCLAACPYQVRFFNPVDHSADKCNFCRDTNLAQGKLPACVESCPTKALIFGDLNDPQSDVNRVLAEKVYYRDKVHLGTKPKLFKIPHQKGEV

SEQ ID NO: 67571 - DNA, 597 bp, Bradyrhizobium japonicum USDA 110
  CDS (1)..(597): transl_table=11
atggcacgtatgaagtttctctgcgacgccgaccgttgcatcgagtgcaacgcctgcgtcacggcctgcaagaacgagcacgaggtcccctggggcatcaaccgccgcagggtcgtcaccatcgccgatggcaagccgggcgaacgatcggtctcgatggcttgcatgcactgcacggatgcgccgtgcgcggcagtgtgcccggtgaactgtttctataccaccgccgatggcgtggtcctgcactccaaggatctctgcatcggctgcggctactgcttctacgcctgtccgtttggcgcgccgcaatatccgaaggtcggcaatttcggctcgcgcggaaaaatggacaaatgtacctattgcgccggcggacccgaggccgatggcagcaaggaggaatacgagaaatacggtgcgaaccgcctggccgagggcaagctgccgctgtgtgccgagatgtgctcgaccaagtcgctgctcgccggcgacggcgagatcatcgcccagatctataaggagcgcgtgctgaagcgcggctacggctcaggagcgtggggctggaagaccgcctatcgcgagacgatcgagtcctga

SEQ ID NO: 67572 - protein, 198 aa, Bradyrhizobium japonicum USDA 110
MARMKFLCDADRCIECNACVTACKNEHEVPWGINRRRVVTIADGKPGERSVSMACMHCTDAPCAAVCPVNCFYTTADGVVLHSKDLCIGCGYCFYACPFGAPQYPKVGNFGSRGKMDKCTYCAGGPEADGSKEEYEKYGANRLAEGKLPLCAEMCSTKSLLAGDGEIIAQIYKERVLKRGYGSGAWGWKTAYRETIES

SEQ ID NO: 67573 - DNA, 687 bp, Vibrio parahaemolyticus RIMD 2210633
  CDS (1)..(687): transl_table=11
atgaagtgttcaagacgaaattttttagccagtagcggcgcattgattttgaccactggcgttgctggcacctctgttgttagtgcttctctttatgccagtgatagcgagcaaaccaaacgttttggcatggttcatgatgaaaatgcgtgtataggatgtactgcgtgtactgaagcatgccgcgaagtgaataaagtgccagaaggggtgacccgcctaaaaattcatcgcagcgaacccattggggaatttcctgatgttgagtaccagtttacgcgtgaatcttgtcagcactgtgataatccaccatgtgtgtatgtttgccctacgggtgctgcgtataaagatgaatctacgggcatagttgatgtgcacaaagagcgatgtgtcggctgtggctattgtttggcggcttgtccttatcaagtgcgctttttcaaccctgttgaccattctgcagacaaatgtaacttctgccgtgataccaacctagcacaaggtaagcagccagcttgcgtggaatcttgcccaacaaaagcactcatctttggtgatttgaatgacccaactagcgaggtaagcaaagtcattgataaccatcttgtgtatcgcgataagtcacatttaggaacgcaacctaagctgtttaaaattccgcataacaaaggggaggtgtcatcatga

SEQ ID NO: 67574 - protein, 228 aa, Vibrio parahaemolyticus RIMD 2210633
MKCSRRNFLASSGALILTTGVAGTSVVSASLYASDSEQTKRFGMVHDENACIGCTACTEACREVNKVPEGVTRLKIHRSEPIGEFPDVEYQFTRESCQHCDNPPCVYVCPTGAAYKDESTGIVDVHKERCVGCGYCLAACPYQVRFFNPVDHSADKCNFCRDTNLAQGKQPACVESCPTKALIFGDLNDPTSEVSKVIDNHLVYRDKSHLGTQPKLFKIPHNKGEVSS

SEQ ID NO: 67575 - DNA, 768 bp, Vibrio parahaemolyticus RIMD 2210633
  CDS (1)..(768): transl_table=11
atggattccaccaaacgtcgctttcttagcgccattacagcgggtgccgcgttggtccccattgcaggtattggcaccgcaaccgcgggcaatgttattcgcaataaccaatccgccgaccgaaaaggacaagtcggaaaacgttacgccatggtgatcgatttacgtaaatgcgtcggctgccaagcgtgcaccgtaggttgcagtattgaaaaccaagcgccaatcggtcagttccgaaccacagtgaaacaatacgaagtcacgctcgatgacggttccacaaccacacaagaagcaaaggcctttatgctgcctcggctttgtaatcactgcgataacccgccgtgcgtagccgtttgtcccgttcaagcaacctttcagcgagaagatggcatcgtcatggtggataacagtcgctgcgtagcgtgtgcgtattgtgtacaagcctgcccttatgatgcacgttttatcaatgaagacacactcaccgctgacaaatgcaccttctgtgcacaccgcttagaacaaggtttgttacccgcttgtgtggaaacttgcgtgggcggcgctcgcgtgattggtgatttgaatgatccatcaagtgaagtccgccgcttaattacgaagcaccaagacaacatcaaagtgctaaagcccgatgaaaagaccaagccacacgtgttttacatcggcatggatgaacgcttcaccagccacatcgacgggcagccagctatttacgccccacaaggagatcgcgcatga

SEQ ID NO: 67576 - protein, 255 aa, Vibrio parahaemolyticus RIMD 2210633
MDSTKRRFLSAITAGAALVPIAGIGTATAGNVIRNNQSADRKGQVGKRYAMVIDLRKCVGCQACTVGCSIENQAPIGQFRTTVKQYEVTLDDGSTTTQEAKAFMLPRLCNHCDNPPCVAVCPVQATFQREDGIVMVDNSRCVACAYCVQACPYDARFINEDTLTADKCTFCAHRLEQGLLPACVETCVGGARVIGDLNDPSSEVRRLITKHQDNIKVLKPDEKTKPHVFYIGMDERFTSHIDGQPAIYAPQGDRA

SEQ ID NO: 67577 - DNA, 630 bp, Salmonella enterica subsp. enterica serovar Typhi Ty2
  CDS (1)..(630): transl_table=11
atgagccagtttacacattacccgccggtgagcgataaacaactgggatttttcatcgactcctcacgctgctccggttgtaaagcctgccaggtggcctgcaaagacaaaaacaatctggaagtaggccgtcgtttccgccgcgtctatgaagtcaagggcggaagtttcatcccgaccgggcagggcggggtcagcaataacgtatttgcttatacgctttctatttcctgcaaccactgtgcggatcctgtctgcaccaaaaattgcccgactaccgctatgcataaacgcccaggtgacggcattgtgcgcgttgataccgacaaatgcgtcggctgtggctattgcgcctggtcctgcccttatggcgcgccgcagcttaacgagcagaccggccaaatgtccaagtgcgacatgtgcgttgatttactggcgaaaggtgaatcgcccggctgtgtcgcgacctgtccgctggaggccatcaagtttggcccgattgatgaactgcgcgcgaagtacggtagcgtatgcgacgttaacgggctgccagattcatccataaccaaacctaatctggttgtcaaagcgcatcagggcgcagaaaaagagggtaaacgccatgcatga

SEQ ID NO: 67578 - protein, 209 aa, Salmonella enterica subsp. enterica serovar Typhi Ty2
MSQFTHYPPVSDKQLGFFIDSSRCSGCKACQVACKDKNNLEVGRRFRRVYEVKGGSFIPTGQGGVSNNVFAYTLSISCNHCADPVCTKNCPTTAMHKRPGDGIVRVDTDKCVGCGYCAWSCPYGAPQLNEQTGQMSKCDMCVDLLAKGESPGCVATCPLEAIKFGPIDELRAKYGSVCDVNGLPDSSITKPNLVVKAHQGAEKEGKRHA

SEQ ID NO: 67579 - DNA, 618 bp, Salmonella enterica subsp. enterica serovar Typhi Ty2
  CDS (1)..(618): transl_table=11
atgacaacccagtatggattttttattgattccagccgttgcaccggttgcaaaacctgcgaactggcctgcaaggactacaaagatctcactcccgacgtcagcttccgccgcatttatgagtatgcgggcggtgactggcaggaagataacggcgtctggcaccagaacgtctttgcctactatctctccatctcctgtaaccactgcgaagacccggcctgtaccaaagtctgcccgagcggcgcgatgcacaagcgcgatgacggttttgtggtggtgaatgaagaggtctgtatcggctgccgctactgccacatggcctgcccgtacggcgcgccgcagtacaacgcggccaaaggtcatatgaccaagtgcgacggctgttatgaccgggtggcggaaggcaagaaaccgatttgcgtggaatcctgcccgctgcgggcgctggatttcggcccgatagacgaactgcgcaaaaaacacggtgagctggctgccgtcgcgccgttgccgcgcacgcatttcacgaagccgaatattgtgattaaacccaacgccaacagccgcccgaccggggacaccaccggttatctggccaatccgaaggaggtataa

SEQ ID NO: 67580 - protein, 205 aa, Salmonella enterica subsp. enterica serovar Typhi Ty2
MTTQYGFFIDSSRCTGCKTCELACKDYKDLTPDVSFRRIYEYAGGDWQEDNGVWHQNVFAYYLSISCNHCEDPACTKVCPSGAMHKRDDGFVVVNEEVCIGCRYCHMACPYGAPQYNAAKGHMTKCDGCYDRVAEGKKPICVESCPLRALDFGPIDELRKKHGELAAVAPLPRTHFTKPNIVIKPNANSRPTGDTTGYLANPKEV

SEQ ID NO: 67581 - DNA, 558 bp, Salmonella enterica subsp. enterica serovar Typhi Ty2
  CDS (1)..(558): transl_table=11
atgagacgtgcgtttttagtgaatagcgataagtgcatcggctgccgcggctgtgctatggcgtgtaaaagctttaaccaactggagccggatcgcttctggcgctacgtttatccgttggataaagacatctatccacatgaagagcgggcgttttactcgctggcctgtaaccactgcgaacatccggcctgcgtcgccgcctgtccggtcgaagcctataccaaacgtgaagatggcgtggtggtgcataaccctgagcgctgcatcggctgtaaaaactgtattcgtaactgtccttatggcgcgccgcgttttaatgaagagacgcgtaaagcggaaaaatgcagtatatgctacgagcgtcttgatatcggtatgaatccggcgtgcgtgaacgcctgtccggtgggcgccttgtcgattatcgatttggatgccgatcctgtgcccgataatgcggtgcagtatccgccagggttcccgcatatgccacagctcaatccaggaacgcgctttattctggcgcgccagcctaagcagccggaggacaagtaa

SEQ ID NO: 67582 - protein, 185 aa, Salmonella enterica subsp. enterica serovar Typhi Ty2
MRRAFLVNSDKCIGCRGCAMACKSFNQLEPDRFWRYVYPLDKDIYPHEERAFYSLACNHCEHPACVAACPVEAYTKREDGVVVHNPERCIGCKNCIRNCPYGAPRFNEETRKAEKCSICYERLDIGMNPACVNACPVGALSIIDLDADPVPDNAVQYPPGFPHMPQLNPGTRFILARQPKQPEDK

SEQ ID NO: 67583 - DNA, 903 bp, Salmonella enterica subsp. enterica serovar Typhi Ty2
  CDS (1)..(903): transl_table=11
atggcttatcaatcgcaagacatcattcgtcgttccgccactaacggtttcacccccgcgccccaggcgcgggaccaccaggaagaggtggcgaaactcatcgacgtcaccacctgtatcggctgtaaagcgtgtcaggtggcgtgctccgagtggaacgacatccgtgatgaagtgggcaataacgtcggggtgtatgacaacccggcggacttaactgcgaaatcctggacggtgatgcgcttctcggaagtggaacagaacgacaaactggagtggctgatccgtaaggatggctgtatgcactgcgccgatcccggctgcctgaaggcctgtccggcggaaggggcgatcattcagtacgctaacggtattgtcgacttccagtccgagcagtgtatcggctgcggctactgtatcgctggctgcccgttcaacgtgccgcgcctcaacccggaagacaaccgcgtctataaatgtacgctgtgcgttgactgtgtggtggtcggccaggaaccggcctgcgtgaagacctgtccaaccggcgctattcattttggctcgaaagaggatatgaaaacgctggcgggcgagcgggtggcggaactcaaaacccgtggttatgacaatgcgggtctgtacgatccggcgggcgtaggcggtacgcatgtcatgtacgtgctgcatcatgccgacaagccgaatctgtatcacggtctgccggagaacccggaaatcagcgaaaccgttaagttctggaaaggcgtctggaaaccgctcgccgcgttcggttttgccgcgacctttgccgccagcgtcttccactatgtcggcgtcggcccgaaccgcgcggaagaggaagatgacaacctgcatgaagagaaagacgaggtgcgcaaatga

SEQ ID NO: 67584 - protein, 300 aa, Salmonella enterica subsp. enterica serovar Typhi Ty2
MAYQSQDIIRRSATNGFTPAPQARDHQEEVAKLIDVTTCIGCKACQVACSEWNDIRDEVGNNVGVYDNPADLTAKSWTVMRFSEVEQNDKLEWLIRKDGCMHCADPGCLKACPAEGAIIQYANGIVDFQSEQCIGCGYCIAGCPFNVPRLNPEDNRVYKCTLCVDCVVVGQEPACVKTCPTGAIHFGSKEDMKTLAGERVAELKTRGYDNAGLYDPAGVGGTHVMYVLHHADKPNLYHGLPENPEISETVKFWKGVWKPLAAFGFAATFAASVFHYVGVGPNRAEEEDDNLHEEKDEVRK

SEQ ID NO: 67585 - DNA, 618 bp, Shigella flexneri 2a str. 2457T
  CDS (1)..(618): transl_table=11
atgaccacacaatatggattttttatcgattccagccgctgtactggctgtaaaacctgcgaactggcgtgcaaagattttaaagatcttggcccggaagtcagtttccgccgtatttatgaatatgctggcggcgactggcaggaagataatggcatctggcaccagaacgtgttcgcttattatctctccatctcctgtaaccattgcgatgaccccgcatgtacaaaagtctgccccagcggcgcaatgcataagcgtgaagatggctttgtggtggttgatgaagatgtttgtatcggctgccgctactgccacatggcttgtccgtacggcgcaccacagtacaatgctgaaaaagggcacatgacgaagtgcgatggttgttattcgcgcgtcgccgaggggaaacaacccatatgcgtcgaatcctgcccgctgcgtgcacttgagttcggtccaattgaagagctgcgccagaagcacggcactctggctgccgtcgcgccactgccgcgcgcgcatttcacaaaacccaatatcgttatcaaacctaacgccaacagccgcccgaccggcgataccactggttatctggctaatccggaggaagtgtaa

SEQ ID NO: 67586 - protein, 205 aa, Shigella flexneri 2a str. 2457T
MTTQYGFFIDSSRCTGCKTCELACKDFKDLGPEVSFRRIYEYAGGDWQEDNGIWHQNVFAYYLSISCNHCDDPACTKVCPSGAMHKREDGFVVVDEDVCIGCRYCHMACPYGAPQYNAEKGHMTKCDGCYSRVAEGKQPICVESCPLRALEFGPIEELRQKHGTLAAVAPLPRAHFTKPNIVIKPNANSRPTGDTTGYLANPEEV

SEQ ID NO: 67587 - DNA, 678 bp, Haemophilus ducreyi 35000HP
  CDS (1)..(678): transl_table=11
atgagttgcacccgtagagattttgtctcaggagtaggtgctatcgctgttgtagcaagctcatcgcttgctacaacagtcactcttgcgactgataagaaagaaaaaaatattcgttatgctatggttcatgatgaaacctcttgcattggttgtacggcgtgtatggaggcgtgtcgtaccactaataaggtgcctgaaggcgtttctcgtttagagattattcggagtgagccctatggtgagtttcctaatgttgagtatgaatttttccgtcaatcttgccaacattgtactaatgcaccttgtgttgcggtatgtccaaccggtgcttcatttgttgatcctaacacaggtattgttgatgtagattcagatctctgtgttggttgtcaatattgtattgcggtttgtccatatcgagtacgttttattcatcctgagaaaaagtcggcagataaatgtaatttctgtcgtgatactaatttggcggaaggtaaacaacccgcttgtgttgaggcttgtccaactaaggcattaacgtttggtgatatgaatgattcgaacagcgctgtctttcaaaaagtgaagaataatccggtttatcgtactaaagtcgcattaggcactgaaccaaatttatatcatattccatttggtaagggggagcatagataa

SEQ ID NO: 67588 - protein, 225 aa, Haemophilus ducreyi 35000HP
MSCTRRDFVSGVGAIAVVASSSLATTVTLATDKKEKNIRYAMVHDETSCIGCTACMEACRTTNKVPEGVSRLEIIRSEPYGEFPNVEYEFFRQSCQHCTNAPCVAVCPTGASFVDPNTGIVDVDSDLCVGCQYCIAVCPYRVRFIHPEKKSADKCNFCRDTNLAEGKQPACVEACPTKALTFGDMNDSNSAVFQKVKNNPVYRTKVALGTEPNLYHIPFGKGEHR

SEQ ID NO: 67589 - DNA, 774 bp, Bordetella parapertussis 12822
  CDS (1)..(774): transl_table=11
atgcacaacgcgccctcctccgaccggccgcccgcgcccagcaaacgcggttttctcaaggaattgctggggctggccgccacggccaccgtcatccccatcgcccccgaagcgcgcgccggcatgaacgcccagccgccgcgccgtcccggcgccgcgggcaagcgctacggcatggtggtcgacctacgccaatgcatcggctgccaggcctgcacggtcagctgttcgatggaaaacctgccgcccatcgggcaattccgcaccaccgtgctgcagtacgaggtgctgcccgacgatggcggcccctgttcgatggtgatgctgccgcgcctgtgcaaccactgcgacaacccgccgtgcgtgccggtgtgcccggtgcaggccaccttccagcgcgaggacggcatcgtgctggtggacaacgaacgctgcgtgggctgcggctactgcgtgcaggcctgcccctacgacgcccgcttcatcaaccacgagacccagaccgccgacaagtgcacgttctgcgagcaccgcctggaggcgggcctgctgccggcctgcgtggagagctgcgtgggcggggcgcgcgtcatcggcgacctgaacgaccccgccagcgccgtctcgcggctgctggccgagcaccgcgacgaggtcaaggtgctcaagcccgacatgcgcaccgatccgcatgtgtattacatcggcctgcccgacgcgttcgtcaaccagatcgatggccaggccggcgtgcgcctggccggccggcactga

SEQ ID NO: 67590 - protein, 257 aa, Bordetella parapertussis 12822
MHNAPSSDRPPAPSKRGFLKELLGLAATATVIPIAPEARAGMNAQPPRRPGAAGKRYGMVVDLRQCIGCQACTVSCSMENLPPIGQFRTTVLQYEVLPDDGGPCSMVMLPRLCNHCDNPPCVPVCPVQATFQREDGIVLVDNERCVGCGYCVQACPYDARFINHETQTADKCTFCEHRLEAGLLPACVESCVGGARVIGDLNDPASAVSRLLAEHRDEVKVLKPDMRTDPHVYYIGLPDAFVNQIDGQAGVRLAGRH

SEQ ID NO: 67591 - DNA, 630 bp, Bordetella parapertussis 12822
  CDS (1)..(630): transl_table=11
atggctcgaatgaaatttgtctgtgatgcagagcgctgtatcgagtgcaatgcctgcgtgacggcatgcaagaacgagcacgaagtcccctggggcgtgaaccgccgccgcgtggtgacgctcaacgacggcgtgcccggcgagaagtccatttcggtggcctgcatgcactgcagcgacgcgccctgcatggcggtgtgcccggtcaactgcttctaccgcaccgacgagggtgtggtgctgcacaacaaggacacctgtatcggctgcggctactgttcgtacgcctgtccgttcggcgcgccgcagttcccctccgaaggggccttcggcgtgcgcggcaagatggacaagtgcacgttctgcgccggcgggccggaagagcacggcagcgccgaggagttcgaaaagtacggccgcaaccggctggccgagggcaagctgccggcctgcgccgaaatgtgttcgaccaaggcgctgctggccggcgacggcgacgtggtggccgacatcttccgcacccgcgtgatccatcgcggcaagggcgtggaggtctggggctggggcaccgcctatggctccaagcaggccgggcagccgccggccgccgacgccaaggccaagccatga

SEQ ID NO: 67592 - protein, 209 aa, Bordetella parapertussis 12822
MARMKFVCDAERCIECNACVTACKNEHEVPWGVNRRRVVTLNDGVPGEKSISVACMHCSDAPCMAVCPVNCFYRTDEGVVLHNKDTCIGCGYCSYACPFGAPQFPSEGAFGVRGKMDKCTFCAGGPEEHGSAEEFEKYGRNRLAEGKLPACAEMCSTKALLAGDGDVVADIFRTRVIHRGKGVEVWGWGTAYGSKQAGQPPAADAKAKP

SEQ ID NO: 67593 - DNA, 774 bp, Bordetella bronchiseptica RB50
  CDS (1)..(774): transl_table=11
atgcacaacgcgccctcctccgaccggccgcccgcgcccggcaaacgcggttttctcaaggaattgctggggctggccgccacggccaccgtcatccccatcgcccccgaagcgcgcgccggcatgaacgcccagccgccgcgccggcccggcgccgcgggcaagcgctacggcatggtggtcgacctgcgcaaatgcatcggctgccaggcctgcacggtcagctgttcgatggaaaacctgccgcccatcgggcaattccgcaccaccgtgctgcagtacgaggtgctgcccgacgatggcggcccctgttcgatggtgatgctgccgcgcctgtgcaaccactgcgacaacccgccgtgcgtgccggtgtgtccggtgcaggccaccttccagcgcgaggacggcatcgtgctggtggacaacgaacgctgcgtgggctgcggctattgcgtgcaggcctgcccctacgacgcccgcttcatcaaccacgagacccagaccgccgacaagtgcacgttctgcgagcaccgcctggaggcgggcctgctgccggcctgcgtggagagctgcgtgggcggggcgcgcgtcatcggcgacctgaacgaccccgccagcgccgtctcgcgcctgctggccgagcaccgcgacgaggtcaaggtgctcaagcccgacatgcgcaccgatccgcatgtgtattacatcggcctgcccgacgcgttcgtcaaccagatcgatggccaggccggcgtgcgcctggccggccggcactga

SEQ ID NO: 67594 - protein, 257 aa, Bordetella bronchiseptica RB50
MHNAPSSDRPPAPGKRGFLKELLGLAATATVIPIAPEARAGMNAQPPRRPGAAGKRYGMVVDLRKCIGCQACTVSCSMENLPPIGQFRTTVLQYEVLPDDGGPCSMVMLPRLCNHCDNPPCVPVCPVQATFQREDGIVLVDNERCVGCGYCVQACPYDARFINHETQTADKCTFCEHRLEAGLLPACVESCVGGARVIGDLNDPASAVSRLLAEHRDEVKVLKPDMRTDPHVYYIGLPDAFVNQIDGQAGVRLAGRH

SEQ ID NO: 67595 - DNA, 630 bp, Bordetella bronchiseptica RB50
  CDS (1)..(630): transl_table=11
atggctcgaatgaaatttgtctgtgatgcagagcgctgtatcgagtgcaatgcctgcgtgacggcatgcaagaacgagcacgaagtcccctggggcgtgaaccgccgccgcgtggtgacgctcaacgacggcgtgcccggcgagaagtccatttcggtggcctgcatgcactgcagcgacgcgccctgcatggcggtgtgcccggtcaactgcttctaccgcaccgacgagggtgtggtgctgcacaacaaggacacctgtatcggctgcggctactgttcgtacgcctgtccgttcggcgcgccgcagttcccctccgaaggggccttcggcgtgcgcggcaagatggacaagtgcacgttctgcgccggcgggccggaagagcacggcagcgccgaggagttcgaaaagtacggccgcaaccggctggccgagggcaagctgccggcctgcgccgaaatgtgttcgaccaaggcgctgctggccggcgacggcgacgtggtggccgacatcttccgcacccgcgtgatccatcgcggcaagggcgcggaggtctggggctggggcaccgtctatggctccaagcaggccgggcagccgccggccgccgacgccaaggccaagccatga

SEQ ID NO: 67596 - protein, 209 aa, Bordetella bronchiseptica RB50
MARMKFVCDAERCIECNACVTACKNEHEVPWGVNRRRVVTLNDGVPGEKSISVACMHCSDAPCMAVCPVNCFYRTDEGVVLHNKDTCIGCGYCSYACPFGAPQFPSEGAFGVRGKMDKCTFCAGGPEEHGSAEEFEKYGRNRLAEGKLPACAEMCSTKALLAGDGDVVADIFRTRVIHRGKGAEVWGWGTVYGSKQAGQPPAADAKAKP

SEQ ID NO: 67597 - DNA, 888 bp, Chromobacterium violaceum ATCC 12472
  CDS (1)..(888): transl_table=11
atgccattgcaatccctggatatccaccgccgctccgccagcccgaccgaaagccccaaggtccgccagacgctggaagtggccaagctgatcgacacctccacctgcataggctgcaaggcctgccaggtggcttgttccgaatggaacgacatccgcgaggaagtcggccacaacatcggggtctacgacaaccccaccgacctgtccgccaaggcctggacggtgatgcgcttcgccgaggaggaaagcaacggcaagctggagtggctgatccgcaaggacggctgcatgcactgcgccgaccccggctgtttgaaagcctgtccgtcgccgggcgccatcgtgcagtacagcaacggcatcgtcgacttccaccaggaaaactgcatcggctgcggttactgcatcgccggctgtccgttcaatattccgcgcatcagcaaggaagacaacaaggcttacaagtgcacgctgtgctcggaccgcgtcgccgtcggcctggagccggcttgcgtcaagacctgtcccaccggggccatccagttcggctccaaggaagacatgaaggaagtggcggcggaacgggtggcggatctgaagcggcgcggctatcaacacgccggcctgtacgatccgcaaggcgtgggcggcacccacgtgatgtacgtgctgcaccacgccgacaagccggaacagtactccggcctgccgaacaaccccgaaatcagccccaccgtgcagctgtggaagggcttgctcaagccgctggcgacgataggcatcgccgccgccggcctgttcggcttcctgcactacatcaccgtcgggcccaaccgcgccgatgacgaagcggaaagcgaaacccgcgaggaggacaagcaatga

SEQ ID NO: 67598 - protein, 295 aa, Chromobacterium violaceum ATCC 12472
MPLQSLDIHRRSASPTESPKVRQTLEVAKLIDTSTCIGCKACQVACSEWNDIREEVGHNIGVYDNPTDLSAKAWTVMRFAEEESNGKLEWLIRKDGCMHCADPGCLKACPSPGAIVQYSNGIVDFHQENCIGCGYCIAGCPFNIPRISKEDNKAYKCTLCSDRVAVGLEPACVKTCPTGAIQFGSKEDMKEVAAERVADLKRRGYQHAGLYDPQGVGGTHVMYVLHHADKPEQYSGLPNNPEISPTVQLWKGLLKPLATIGIAAAGLFGFLHYITVGPNRADDEAESETREEDKQ

SEQ ID NO: 67599 - DNA, 678 bp, Wolinella succinogenes DSM 1740
  CDS (1)..(678): transl_table=11
atggaacaggatggcagaagaagactatttttgaaatatataggagcgggcaccgcggtggtgggttcggcgctctcaggggtgagggccaatcaagaggtggaatctgtaggagagaagcctcattatgggatggtatttgaccaaaacaagtgcgtgggatgcacggagtgcgaggtgatgtgtaaaaaggtcaatagtgttccgcaggggcaagctagactctatgtgcaaaacaaaactaaccccgagactccaatggagaagcgatacactcgtgtctcctgccagcagtgcgaggatgcaccatgcgtttcggtctgtccaaccaaggcttgtcataaagatgaacaaacaggaatcgtcacaatgaatcctgaggattgcatcgcttgcaaatattgcatcgtggcgtgtccctatgatgttcgattcatcaatcatgagaccaaggcagcggagaattgcaatttctgtcttggcactaagctggccaaaaatgaggagcccgcgtgcgttcaagcctgtaaatacaaagcgctcgtctttggcgatctcaatgacaaagattcctatatcaatcagattttaggggtcaaagattcggtgcgcatgaagccattttttggcaccaaacccagcttgcgctacatacctgttgtgaaagtaggagtttag

SEQ ID NO: 67600 - protein, 225 aa, Wolinella succinogenes DSM 1740
MEQDGRRRLFLKYIGAGTAVVGSALSGVRANQEVESVGEKPHYGMVFDQNKCVGCTECEVMCKKVNSVPQGQARLYVQNKTNPETPMEKRYTRVSCQQCEDAPCVSVCPTKACHKDEQTGIVTMNPEDCIACKYCIVACPYDVRFINHETKAAENCNFCLGTKLAKNEEPACVQACKYKALVFGDLNDKDSYINQILGVKDSVRMKPFFGTKPSLRYIPVVKVGV

SEQ ID NO: 67601 - DNA, 564 bp, Wolinella succinogenes DSM 1740
  CDS (1)..(564): transl_table=11
atggcaagatacgcgatggccttagactataaaaactgtatcaactgcaaggcgtgcgaaaccgcctgcaaagaagagaacaatgtccccttgggcgatgagtattatcgaatttgggtgggagtgaaagagacagagggtgaatatcctttacttaacttttctcaaatgcgtttcatcccaagccaatgccaacattgcgaaaatgctccctgccaagaggtctgccctaccaatgcaacctattatgatgagcgcggctttgtttcggttgatcccaagaagtgcatcatgtgcacctactgcatgacagcttgcccctacgatgcaagatatgttgatcctagggctcatatcgttcaaaagtgcaacttctgttcagagacacgattggcacgaggagagactacgaccgcttgtcaagccacttgccccaccaaagtcagagtctttggcgacttggacgatccccatagtgaaatctctaagctcctccgagagcgtgagcattggacgatcaagccacatttgggcaccaagcctaagctcttttatctagtatag

SEQ ID NO: 67602 - protein, 187 aa, Wolinella succinogenes DSM 1740
MARYAMALDYKNCINCKACETACKEENNVPLGDEYYRIWVGVKETEGEYPLLNFSQMRFIPSQCQHCENAPCQEVCPTNATYYDERGFVSVDPKKCIMCTYCMTACPYDARYVDPRAHIVQKCNFCSETRLARGETTTACQATCPTKVRVFGDLDDPHSEISKLLREREHWTIKPHLGTKPKLFYLV

SEQ ID NO: 67603 - DNA, 699 bp, Wolinella succinogenes DSM 1740
  CDS (1)..(699): transl_table=11
atggcaaaaaattatgcaatggtcatagacctgaatcgatgcgttggatgtggcgcctgcgacttggcttgtaaaagcgaaaacaatacacccgtgggaatccattggtcaaatcacgtggtggagaccacaggggttttccctaatgtaggctttacttatagacccactctttgtaatcactgcgatgatgctccttgtgtgagggcttgtccaacgggagcgatgtataaagataaagagagtggcatgacgctccacaatgctgataagtgcattgggtgcaagagctgtatgttggcagacccctatcacgtcatctactacaactccaaacaacctcactataagtggacgactactaagcctacggtaatggggatgttttcacccaaggagatggcggataagtcaggtgctccctacccatactttaacgtggagcgaggtaaaacctatgaggcattacgttttaaaggcttggtggagaagtgcagtttttgtgatcatcgagtcaaggcaggcctcatgccgcattgcgtggtctcttgtccgggagatgcaagaatctttggcgatctgaatgatcccaaaagttctgtgagtcagcttttggctcaatatcctgcagagacgcttcttcctcacaaaggaaccaaagcgaaagtgttctatatccgaagttatgcgagggcttaa

SEQ ID NO: 67604 - protein, 232 aa, Wolinella succinogenes DSM 1740
MAKNYAMVIDLNRCVGCGACDLACKSENNTPVGIHWSNHVVETTGVFPNVGFTYRPTLCNHCDDAPCVRACPTGAMYKDKESGMTLHNADKCIGCKSCMLADPYHVIYYNSKQPHYKWTTTKPTVMGMFSPKEMADKSGAPYPYFNVERGKTYEALRFKGLVEKCSFCDHRVKAGLMPHCVVSCPGDARIFGDLNDPKSSVSQLLAQYPAETLLPHKGTKAKVFYIRSYARA

SEQ ID NO: 67605 - DNA, 810 bp, Wolinella succinogenes DSM 1740
  CDS (1)..(810): transl_table=11
atggcacacaagacgccactgagccgtcgagattttgtgcaaaaagcagggattttgcttgcaggaggaacggcgcttggagggaatcaagcccaagcgatcagcctccaaaatcctggtcgagatgccaaagaggctcgttatattggacaagagggaaagcgctttgggatggtgattgatctgagattgtgtgtgggatgccaagcctgcacgagcgcttgtaaaagtgaaaatagagtccccaaagataagtttcgaacctatgttcctgaatatgaattagggagctatccgagcgtgcgaaaagcttttttacctcagctttgcaaccactgcgaagccccttcgtgcgtgagcgtctgtcctacgggagccaccttcaagcgcacggatggaatcgtggttgtggacaacaccatttgctgggggtgtggctactgtcttaatgcctgtccttatgacaaacgctatttcaatcctctcaccaaagttgcagacaaatgcactctttgcgcccatcgagtggatgcagggctcttaccagcgtgtgtggagagctgcgtaggaggggcgagaatttttggtgacttgaatgatcctcatagcgcagtctcaaagctgcttcaaaacgctcccgcttcagtgctcaaccctgctcaggggactaaaccaagagttttttacatcggacttagccatgagatacagagcattcccgtgagtcaagccgtgctggatgattgggcaaagaagctagatggcttagcccctagcgaatgggctagcacctatgaaggaggaaaatag

SEQ ID NO: 67606 - protein, 269 aa, Wolinella succinogenes DSM 1740
MAHKTPLSRRDFVQKAGILLAGGTALGGNQAQAISLQNPGRDAKEARYIGQEGKRFGMVIDLRLCVGCQACTSACKSENRVPKDKFRTYVPEYELGSYPSVRKAFLPQLCNHCEAPSCVSVCPTGATFKRTDGIVVVDNTICWGCGYCLNACPYDKRYFNPLTKVADKCTLCAHRVDAGLLPACVESCVGGARIFGDLNDPHSAVSKLLQNAPASVLNPAQGTKPRVFYIGLSHEIQSIPVSQAVLDDWAKKLDGLAPSEWASTYEGGK

SEQ ID NO: 67607 - DNA, 654 bp, Wolinella succinogenes DSM 1740
  CDS (1)..(654): transl_table=11
atggaaaaaaatcaacaatttggattctatctcgaccagacaagatgcgtgggctgtcgaacctgtcaaatggcttgcaaggatggcaaagattctccactgggagtgaattttagacgcgtagtggagttcgagggaggcgcttggctcaccgaaaatccagacacccccacacccgtgggtgtcttcgcctactacacctccatagcgtgcaatcattgcgacgatcccgcctgtatcaaagcctgcccaacgggcgcgatgcacaaagggctatatggaattgtcgaggtgaatcaaagtcgctgtatcggctgtaaagcctgcgcgatggcctgtccttatggagcgccccaatttgactcacgccaaggacacatgagcaagtgcgatggttgcaaaactcgtttggaggagaatctagccccactttgcgtggaatcatgcccctttagagcgcttgaggcaggccctatcacagagcttagagccaagcatggccacgctgcttccatcgccccccttcccccttatgagcgcacccgtcccaatctctgcctcaaaccagagaaaaattcccagccctcaggtgattctagaggcattttccatcttccacaaaaccattcggaggtgaatcatgacattgtctaa

SEQ ID NO: 67608 - protein, 217 aa, Wolinella succinogenes DSM 1740
MEKNQQFGFYLDQTRCVGCRTCQMACKDGKDSPLGVNFRRVVEFEGGAWLTENPDTPTPVGVFAYYTSIACNHCDDPACIKACPTGAMHKGLYGIVEVNQSRCIGCKACAMACPYGAPQFDSRQGHMSKCDGCKTRLEENLAPLCVESCPFRALEAGPITELRAKHGHAASIAPLPPYERTRPNLCLKPEKNSQPSGDSRGIFHLPQNHSEVNHDIV

SEQ ID NO: 67609 - DNA, 798 bp, Vibrio vulnificus YJ016
  CDS (1)..(798): transl_table=11
atgatgttcatgccaataaagccaaagtgttgggcttggagcgcaaagagaaaatcaagatgtgtgtggattgccactctgactttaaccagaaagaagaggagaggtaatatgagttgttcaagacgaaatttccttgctggtggtggcgcgttgatcatgacaacgggcattgctggcacttctatggtgactgggcgcttagcatttgcggaagaggataagggccaagcaattcgttatggcatgatccacgacgagaccgcctgtatcggatgtacggcttgtaccgatgcctgccgagaggtgaacaaagtccctgaaggcgtaagtcgattggagatcatacgcagtgagccgcacggtgagtacccgaatgtcgattaccgttttacccgtaaatcttgccaacactgtgaaaacccaccttgcgtttacgtgtgtcctaccggtgcggcgtacaaagatgaaaaaaccggcatcgtggatgtccacaaagaaaaatgtgtcggttgcggctattgccttgccgcgtgcccatatcaagtacgtttctttaacccagttgatcactcggccgataaatgtaatttttgtcgtgacaccaatttggcgcaaggcaagctacccgcctgtgtggaatcttgtccaactaaggcactgatttttggtgatttaaatgatccgcaaagtgacgtgaatcgagtattggctgagaaggtctattaccgagacaaagtgcacttaggcacgaaacccaaattattcaaaatcccacatcaaaaaggggaggtgtag

SEQ ID NO: 67610 - protein, 265 aa, Vibrio vulnificus YJ016
MMFMPIKPKCWAWSAKRKSRCVWIATLTLTRKKRRGNMSCSRRNFLAGGGALIMTTGIAGTSMVTGRLAFAEEDKGQAIRYGMIHDETACIGCTACTDACREVNKVPEGVSRLEIIRSEPHGEYPNVDYRFTRKSCQHCENPPCVYVCPTGAAYKDEKTGIVDVHKEKCVGCGYCLAACPYQVRFFNPVDHSADKCNFCRDTNLAQGKLPACVESCPTKALIFGDLNDPQSDVNRVLAEKVYYRDKVHLGTKPKLFKIPHQKGEV

SEQ ID NO: 67611 - DNA, 609 bp, Vibrio vulnificus YJ016
  CDS (1)..(609): transl_table=11
atggctagaatgaaattcctctgcgacaccaaacgctgcatcgaatgcaacggctgtgtgaccgcttgtaaaaatgaaaacgacgacgcattagagtggggcattcagcgccgccgcgtagttaccttgaacgatggtgaaccgggcgaaaactccatctcagtggcctgtatgcactgtaccgatgccccttgtatggcggtttgtcctgcagactgttttgaacataccgaagatggcattgtgctccacaacaaagatctgtgtatcggttgtggttactgcctgtttgcttgcccatttggtgcgcctcagttcccgaaacaagcctcatttggcgagcgtggcaaaatggacaagtgtactttttgcgccggtggtccaaacaccgaaccgggctcagaagaagagcgtcagaagtatggtgccaaccgtatcgcagaaggcaaactgccaatgtgtgcttcgctgtgttcaactaaggccctcttggcaggtgatgcagagaaaatctccgatatcttccgtcaacgtgtcgtggaacgtggtgcaaaagaggccggttggaccaacggtgaagatctatcctacgatgcaactcgcagctaa

SEQ ID NO: 67612 - protein, 202 aa, Vibrio vulnificus YJ016
MARMKFLCDTKRCIECNGCVTACKNENDDALEWGIQRRRVVTLNDGEPGENSISVACMHCTDAPCMAVCPADCFEHTEDGIVLHNKDLCIGCGYCLFACPFGAPQFPKQASFGERGKMDKCTFCAGGPNTEPGSEEERQKYGANRIAEGKLPMCASLCSTKALLAGDAEKISDIFRQRVVERGAKEAGWTNGEDLSYDATRS

SEQ ID NO: 67613 - DNA, 768 bp, Vibrio vulnificus YJ016
  CDS (1)..(768): transl_table=11
atggattctagtaaacgtcgttttctcagcgccgtaagggcgggcgcagcgcttatccccatagctgggataggcacggcaactgcaggcacggtgatcagaaataacaaccaagccgatcgtaaaggtcaggtgggtaaacgttacgcaatggtggttgacctgcgtaaatgtgtcggctgtcaggcgtgcaccgtgggttgcagtattgagaaccaagcgccaataggccagttccgcacaacggttaaacagtatgaagtgactttagatgatggttcatcggtgatgcaagaagtgaagtctttcatgttgccgcgtctttgcaatcactgtgataacccaccttgtgttgcggtgtgtccggtccaagctacctaccaacgtgaagatggcatcgtgatggtggataacagccgctgtgtggcttgcgcatattgcgtgcaagcctgtccttatgatgcgcgctttattaaccaagagacgctgaccgcagataaatgcacgttctgcgcccaccgtcttgaagaaggactattacccgcttgtgttgaaacctgtgttggcggcgcccgtgtgattggcgatcttaacgatccaagtagcgaagtgaatcgtctacttaatgtgtatcgtgacgacattaaagtgcttaagccaaacgaagagaccaaaccgcatgtgttctacatcggcatgaatgaacgtttcaccaatcatatcgaaggccaagcggcgatttatgatccgcaaggagaaagcgtatga

SEQ ID NO: 67614 - protein, 255 aa, Vibrio vulnificus YJ016
MDSSKRRFLSAVRAGAALIPIAGIGTATAGTVIRNNNQADRKGQVGKRYAMVVDLRKCVGCQACTVGCSIENQAPIGQFRTTVKQYEVTLDDGSSVMQEVKSFMLPRLCNHCDNPPCVAVCPVQATYQREDGIVMVDNSRCVACAYCVQACPYDARFINQETLTADKCTFCAHRLEEGLLPACVETCVGGARVIGDLNDPSSEVNRLLNVYRDDIKVLKPNEETKPHVFYIGMNERFTNHIEGQAAIYDPQGESV

SEQ ID NO: 67615 - DNA, 774 bp, Geobacter sulfurreducens PCA
  CDS (1)..(774): transl_table=11
atgaatagacgcgagtttctcagacggagcatggtggttgtcgcggggttggcggtgccggcggcggctctggagcttgtcgacccgaaaaggctgctggcggcacggccggagttgcgctgggcctttctggttgatacctacaaatgcgtggggtgtggcttctgtgtcaaggcgtgcaaggtggagaacgaggtcccctacgaggccaacgtgactcgtacgtgggtcgagcgttacgtggtgaaaccggatggcgaggttctcattgattcgccacgtggcgcccgcgacggtttcaccgataagagaatcgaggtcggaacggggaaaccccgggacgtgggggatgaagaggtggaaaaagccttctttgtcccaaaactctgcaatcagtgcgacaacccgccctgcgtccaggtctgccccgtgggggccacctacaagaccgtcgacggggtcgtgctcgtggaccgctcatggtgcatcggctgcggctattgcatcatggggtgcccgtacggggtccgtttttttcatccggtgcacaaggtggcggagaagtgcaacttctgttaccaccggatttcccaggggcaggcgacggcgtgcgtcgacgcctgcccgttcggcgcccgccggatcggcaatcttcgcgatccgcatgacccgatcaccaagatcatcatggccgggcgggtcggcatcctcaaggaagagtacggaaccaagccccaggtctactatgtggggctctccaaggaggtacgctag

SEQ ID NO: 67616 - protein, 257 aa, Geobacter sulfurreducens PCA
MNRREFLRRSMVVVAGLAVPAAALELVDPKRLLAARPELRWAFLVDTYKCVGCGFCVKACKVENEVPYEANVTRTWVERYVVKPDGEVLIDSPRGARDGFTDKRIEVGTGKPRDVGDEEVEKAFFVPKLCNQCDNPPCVQVCPVGATYKTVDGVVLVDRSWCIGCGYCIMGCPYGVRFFHPVHKVAEKCNFCYHRISQGQATACVDACPFGARRIGNLRDPHDPITKIIMAGRVGILKEEYGTKPQVYYVGLSKEVR

SEQ ID NO: 67617 - DNA, 834 bp, Geobacter sulfurreducens PCA
  CDS (1)..(834): transl_table=11
atgagtgccggagccatcgactattcaaaaaccaagacgttcctgatcgataccaccaagtgcaccggctgccgcggctgccaggtggcctgcaagcagtggaaccagctgaaggccgagaatacgaccttcttcaccggcgaaggctaccagaacccgccggggatgagtgaattcaccttcacccgggtcaagttcaaggactaccagaagcacggccagaacgagttcgccttctacaaggagatgtgcatgcactgcaacgatcccgcatgcgcctccgtctgccccgtgggtgccttcgagaagaccgccgaagggccggtggtctaccactccaagaagtgcatcggctgccgtttctgcatggtggcatgccccttcggcatccccaagtacgagtggagcaaggcgttcccgctggtcaagaagtgcacgggctgctacagccgggtgaagaacggcctcgatcccgcctgcgccaccgcctgccccacggccataacctacggtccccgggatgaaatgatcaaggaggccgagaagcggatgtccgccaggcccgaccgctacgtgaaagtggtctacggcaaggaagaggccggcggcaccacggtcctctacctgacccagcagcccctggacgagctcggcttcaagccggtcaccaagcggccgctgccgtcctacacctggcaggccctgcgcctcgtgccggggatcttcctgaccgtgggcggcaccctctccctcattacctggttccagcaccgcaaggaccgggtccggaaggaagaagaggagcagaagaaccgcaaggaggggaaccaatga

SEQ ID NO: 67618 - protein, 277 aa, Geobacter sulfurreducens PCA
MSAGAIDYSKTKTFLIDTTKCTGCRGCQVACKQWNQLKAENTTFFTGEGYQNPPGMSEFTFTRVKFKDYQKHGQNEFAFYKEMCMHCNDPACASVCPVGAFEKTAEGPVVYHSKKCIGCRFCMVACPFGIPKYEWSKAFPLVKKCTGCYSRVKNGLDPACATACPTAITYGPRDEMIKEAEKRMSARPDRYVKVVYGKEEAGGTTVLYLTQQPLDELGFKPVTKRPLPSYTWQALRLVPGIFLTVGGTLSLITWFQHRKDRVRKEEEEQKNRKEGNQ

SEQ ID NO: 67619 - DNA, 918 bp, Geobacter sulfurreducens PCA
  CDS (1)..(918): transl_table=11
atgaaaagcacgactagacgcgatttcctcaagatgatggggatgaccggcgccgcctgcctggcgtgcgccgcgcccctgtcggcctccacgggcccggccggcgagagcgaaaccgccatcgccatgctttacgacgccaccaagtgcgtggggtgcaaggcgtgcatggcagcctgcaagcgggtcaacatggagcagaacaatctctcctacgagtacctgcccaccgacggggacaaactctgggacgcccccaaggacctgtccggcgacacccgcacggtcatcaagctctacaaggagtccgacacccgcttctcctacgtgaagcactcctgtatgcactgcacgaagcccggctgcgtgtccgcctgcccggtcaaggccatgaccaaggacccggtcaccggcgtggtggcctacaacaagaacgcctgcatcggctgccgctactgccaggtggcctgtccctacaacatcccccgcttccagtgggacaaggcgctgccccagatcgtcaagtgcgatttctgcaaggacacgaacctgaaggccaaggggatgcccgcctgcagcgagacctgccccgccggcgccattgccttcggcaagcgcacggatcttctggccgaggcccacaaccggatcaaggagaacccggaccgctacattccaaaggtctacggcgagaaggaagttggcggcgccaaccacctgtatctggccgccttcccgttccagaagctgggcctgcccgaactgaaggaggagtcgcccgccgccttctccgagcatatccagcacaccatctacaaggggttcatcgccccggttgccctctacgggaccctggcggccattgccctcaggaacaagaagaagcaggaagatctcggacacggggaggacgattaa

SEQ ID NO: 67620 - protein, 305 aa, Geobacter sulfurreducens PCA
MKSTTRRDFLKMMGMTGAACLACAAPLSASTGPAGESETAIAMLYDATKCVGCKACMAACKRVNMEQNNLSYEYLPTDGDKLWDAPKDLSGDTRTVIKLYKESDTRFSYVKHSCMHCTKPGCVSACPVKAMTKDPVTGVVAYNKNACIGCRYCQVACPYNIPRFQWDKALPQIVKCDFCKDTNLKAKGMPACSETCPAGAIAFGKRTDLLAEAHNRIKENPDRYIPKVYGEKEVGGANHLYLAAFPFQKLGLPELKEESPAAFSEHIQHTIYKGFIAPVALYGTLAAIALRNKKKQEDLGHGEDD

SEQ ID NO: 67621 - DNA, 480 bp, Geobacter sulfurreducens PCA
  CDS (1)..(480): transl_table=11
atgcagaagctgatccgcgtcgagccggccaaatgcgtcggctgcaagtcgtgcgagctggcctgttcgttcaggcaccgcggggagttcgcgcccagcaaggcccgcatcgtcaatgaggttttcctggaggaggccaagttcatcaccgtcacctgcatgcagtgcgacgatccctggtgcctcaaggcatgccccaagggggccatcgccaaagatgcggccagcggcgtggtggcagtggacgagctgaagtgcgtgggctgccgcacctgcgtcagcgcctgtcccttcggcatgatcaagtaccttcccgagaccaggaaggccgacaagtgcacgctctgcgctcccgatgtacccgaatgcgtcatcttctgccccacccactgcctgacattcgccgaggaagacgcgccgctgcgggcaaaggtgctcaaattcgtccagaccgtcaaagacggccagatggaggtgtga

SEQ ID NO: 67622 - protein, 159 aa, Geobacter sulfurreducens PCA
MQKLIRVEPAKCVGCKSCELACSFRHRGEFAPSKARIVNEVFLEEAKFITVTCMQCDDPWCLKACPKGAIAKDAASGVVAVDELKCVGCRTCVSACPFGMIKYLPETRKADKCTLCAPDVPECVIFCPTHCLTFAEEDAPLRAKVLKFVQTVKDGQMEV

SEQ ID NO: 67623 - DNA, 975 bp, Mycobacterium avium subsp. paratuberculosis K-10
  CDS (1)..(975): transl_table=11
atgggccagctgaccggaccgaccgacccggccgccgacgccggctgggcggatcgcaagccgcgcaagggttttttcaccgacacctcgatctgcatcgggtgcaaggcctgcgaggtcgcctgcaaggaatggaaccgcaacccgcaggacggcgacctcgagctgctgggctcgtcctacgacaacaccggcgcgctgggcgccagcacctggcggcacgtggccttcgtcgaacagggtcgcgaacgcatcgagcaggcacgcgaatccggcagggcgctcatcgatttgggcatgccgaccctccccggcgcggcctccgagccgaccgagccggcggtgccgcacaccccggagttccgctggctgatgtcctcggacgtctgcaagcactgcacgcacgccggctgcctggacgtctgccccaccggcgcgctgtttcgcaccgaattcggcacggtggtggtgcagcacgacgtctgcaacggatgcggcacctgcgtggcgggctgcccgttcggggtcgtcgagcggcgcaacgacgggacctacgcgacaccggcgcaacggccggaccgccccagcgaggagatcgtcaccggcgtcgcgcagaagtgcacgctgtgttacgaccggctgctcgaggacgagatcccggcgtgcgccaagacctgccccaccacctcgatcaagttcggcgaccacgacgacctggtggccatggcgcgccggcgggtggccgccctgcacgcccaggggctcaccgaggcccggctgtacggggccaacgagcacgacggcgtcggcggcaccggctccatcttcttgctgctcgacgaacccgaggtctacggtctgccgcccgacccgcgggtgtgcaccgccgacctgacgaccatgttcaagcgggccgggctggccgcggccggcatggtcggggcggccgtgctggcgttttggaggagccggtga

SEQ ID NO: 67624 - protein, 324 aa, Mycobacterium avium subsp. paratuberculosis K-10
MGQLTGPTDPAADAGWADRKPRKGFFTDTSICIGCKACEVACKEWNRNPQDGDLELLGSSYDNTGALGASTWRHVAFVEQGRERIEQARESGRALIDLGMPTLPGAASEPTEPAVPHTPEFRWLMSSDVCKHCTHAGCLDVCPTGALFRTEFGTVVVQHDVCNGCGTCVAGCPFGVVERRNDGTYATPAQRPDRPSEEIVTGVAQKCTLCYDRLLEDEIPACAKTCPTTSIKFGDHDDLVAMARRRVAALHAQGLTEARLYGANEHDGVGGTGSIFLLLDEPEVYGLPPDPRVCTADLTTMFKRAGLAAAGMVGAAVLAFWRSR

SEQ ID NO: 67625 - DNA, 3102 bp, Bdellovibrio bacteriovorus HD100
  CDS (1)..(3102): transl_table=11
atgaaaaaagcgcttcgcccgaaagtggagcgcgacacaaaatactggaacagtcttgaacaatggagcaacgatccagagttcaacaaaattgcttccactgaattccagtcctctccattgcgtgagagtgacgatgaaggcggctgggcacgccgtgaattcctgaagctgatgggtgcatcccttgcgatggcttctgcaggttgcatccgtcgtccggttcagaaaatcgttccttacaataaacaaccagaagaagtgactctgggtatggcgaactactatacctctgcttacttcgatggttctgacgctttgggtgttttggttaaaacacgtgaaggccgtcctattaaaattgaagcaaaccctggtcatccattcagcatcagcggtttgagcatccgttcccaggcttctttgttgtccatgtatgatcctgaaagactgaaaggtcctcagcgcaacctgttcaacgaaaagaaatccaacagccaggttatcgacgttaagtgggaagacctggataaaaaagttgctgagcagctgaaaaaaggtgacgttgtcatcctttccggcaacgtggcttctccggcaacccgcgcggtgatcggtgatttcgctcaaggtttcaaagccaaacacgtggtttgggaagctctttccaatgacgacgttcgtgaaggtcaaaaagcctcttacggcgacgacgtggttccggcgttccgcttcgataaagcgaaaatgatcgtttccatcgacgctgacttcctgggtacatggatttctcctacagcgttcacgaatcagttcgttgaaggccgtaaagacatcaaaaacatgaaccgtttggtgtccttcgattctaattactctttgactggcgccaatgcggacatccgcatgaaaatcaagccttcccagcaactggatgttgtgatgggtcttcttcacgaaatcatcgtgaagaaaggtgcttcctctcacgctggcaacagcgcggtgaaagcggctttggctccgtttgctgacgtggctaaaaaactgaatgtggaacctgctttgttcgcgaaagtggcggcagatctttgggctaatcagggcacttccctggtggttgcaggtggtatcaccactctgactgaaaaatccaaagaacttcaggtggcagtgaacttcctgaactccatcctgggtaacgacggcaagacagttgaccacaacggtggaaacaaaggtgacaaagcttctcaggcggatatggctgctttgatcaaagacatgaaagatggcaaagtgaaaactttgatcatccaccgtgtgaatccaggcttcgttctgggcgcggacatgggctttgctgaggctatcaaaaaagtcgacctggttgtttacacaggtgaccgtatcgacgaaacaggcgtctttgctgactacatcactccggacaaccacgcgttggaatcctggagcgatatggaactggcttccggtgtttacagcatctgccagccgtccatccgtccaatgtacgacactcgttccttccagttgtcattgatgacttgggcgtaccttgcgaacatgggtccatcccgtcttcgtgactacgagaccttctatgattacctgcgcgtcttctggaaatctgacatcttccctaaatacggaaaaggtcagtccttcgaggacttctggcagacggctctgcaaaaaggttatgtcggggagatcaactctggttcttcttctcgttccttcaaagtggatgcattcacatccatcaaacctgcagcggcaaaagaaggctttgaactggctctttattccacttctcaacacggtgatggatcgcttgcgaacgtttcctggttgcatgagcttccagatccagtgaccaaagcagtttgggacaactatgtgatggtttctttggcgacggctgaaaagcacggcctgaaacaagcgactgtggttgaactgactgtgggcggtaaaaccctggaacttccagtgttgatccagccgggtctgcatgatgacgttttggcagtggctgtcggcttcggtcgcacgcgcgctggtaaagtgggtaatggcatcggtcaaaacgcctttgtctttgtgactgctaaagacggtaaaactgttgccgctggttcttcagcgactttcaagaaaacttccaaaaagtatgaacttgcgatcacgcaaggtcaccacacaatggaaggccgtacgatcgccgttgaagcgacattggctgattacaacaaaaagaaatccacaggcatcccgcacccacacgtttggtccatctggtccggccacgaatacagtggtcacaaatggggcatggcggttgatcttcactcctgcacaggctgttcttcctgcgtgattgcatgtcaatccgagaacaacatcccggttgtgggtaagcgctatgtgatcgaaggtcgtgaaatgcactggttgcgtatcgaccgttactacatcggcaatccggaaaacgcagaagcggtcttccagccggtgatgtgccaacactgtgacaatgctccgtgcgaaacggtgtgtccggttctggcgacggttcactctgacgagggtctgaacgacatggtttacaaccgttgcgttggtactcgttattgcgcgaataactgcccgtacaaagtacgtcgtttcaactggttcaactatgcgaaactgatcgagaagccgatgcacatggctctgaatccttctgtgggtgttcgtacccgcggggtgatggagaaatgtacattctgcgttcaaagaatccaggatgccaaaacagtggctcgcaatgaaaaacgtcagttgaaagacggggatgttaaggttgcgtgtcagactgcatgtcctgcaggcggtatcgtattcggcgacctgaacgatccaaacagtgcggtagccaaaatcttcaaaactgaagaacgtggttacgcacttcttgaagagtggcatgcggctccgtccgttcgctatctttccaagatccgtaacaatgataaagaatcaactggtgatcaaaaaggtcacggtactgcaaaacaaggtgagcactcatga

SEQ ID NO: 67626 - protein, 1033 aa, Bdellovibrio bacteriovorus HD100
MKKALRPKVERDTKYWNSLEQWSNDPEFNKIASTEFQSSPLRESDDEGGWARREFLKLMGASLAMASAGCIRRPVQKIVPYNKQPEEVTLGMANYYTSAYFDGSDALGVLVKTREGRPIKIEANPGHPFSISGLSIRSQASLLSMYDPERLKGPQRNLFNEKKSNSQVIDVKWEDLDKKVAEQLKKGDVVILSGNVASPATRAVIGDFAQGFKAKHVVWEALSNDDVREGQKASYGDDVVPAFRFDKAKMIVSIDADFLGTWISPTAFTNQFVEGRKDIKNMNRLVSFDSNYSLTGANADIRMKIKPSQQLDVVMGLLHEIIVKKGASSHAGNSAVKAALAPFADVAKKLNVEPALFAKVAADLWANQGTSLVVAGGITTLTEKSKELQVAVNFLNSILGNDGKTVDHNGGNKGDKASQADMAALIKDMKDGKVKTLIIHRVNPGFVLGADMGFAEAIKKVDLVVYTGDRIDETGVFADYITPDNHALESWSDMELASGVYSICQPSIRPMYDTRSFQLSLMTWAYLANMGPSRLRDYETFYDYLRVFWKSDIFPKYGKGQSFEDFWQTALQKGYVGEINSGSSSRSFKVDAFTSIKPAAAKEGFELALYSTSQHGDGSLANVSWLHELPDPVTKAVWDNYVMVSLATAEKHGLKQATVVELTVGGKTLELPVLIQPGLHDDVLAVAVGFGRTRAGKVGNGIGQNAFVFVTAKDGKTVAAGSSATFKKTSKKYELAITQGHHTMEGRTIAVEATLADYNKKKSTGIPHPHVWSIWSGHEYSGHKWGMAVDLHSCTGCSSCVIACQSENNIPVVGKRYVIEGREMHWLRIDRYYIGNPENAEAVFQPVMCQHCDNAPCETVCPVLATVHSDEGLNDMVYNRCVGTRYCANNCPYKVRRFNWFNYAKLIEKPMHMALNPSVGVRTRGVMEKCTFCVQRIQDAKTVARNEKRQLKDGDVKVACQTACPAGGIVFGDLNDPNSAVAKIFKTEERGYALLEEWHAAPSVRYLSKIRNNDKESTGDQKGHGTAKQGEHS

SEQ ID NO: 67627 - DNA, 588 bp, Thermus thermophilus HB27
  CDS (1)..(588): transl_table=11
atgccccgctacgccatggccattgacctaagcctctgcgtgggctgcgccgcctgcgccgtggcctgcaagatggaaaacgaggtccctcccggggtcttcaacctctggatccgggagcgggaggtgggggaataccccaacctggtggtggagttccgccccgagcagtgcctgcactgcgaaaaccccccttgcgtgcccgtctgccccacgggggccagctaccaaaccaaagacggcctggtgctggtagaccccaaaaagtgcatcgcctgcggggcctgcattgccgcctgcccctacgatgcccgctacctgcacccggcaggttacgtgagcaagtgcaccttctgcgcccaccggctggaaaagggcaaggtgccggcctgcgtggagacctgccccacctactgccgcacctttggcgacctggaggacccggaaagccccgtggccaaggcccttaaggcggcagagcgggtggacgtgctaaggcccgagcagggtacaaggcccaagctcttctacctgaacgccccttccaagaaggggctcacccgggaaagcgaggtgcaccatggctga

SEQ ID NO: 67628 - protein, 195 aa, Thermus thermophilus HB27
MPRYAMAIDLSLCVGCAACAVACKMENEVPPGVFNLWIREREVGEYPNLVVEFRPEQCLHCENPPCVPVCPTGASYQTKDGLVLVDPKKCIACGACIAACPYDARYLHPAGYVSKCTFCAHRLEKGKVPACVETCPTYCRTFGDLEDPESPVAKALKAAERVDVLRPEQGTRPKLFYLNAPSKKGLTRESEVHHG

SEQ ID NO: 67629 - DNA, 1002 bp, Desulfovibrio vulgaris subsp. vulgaris str. Hildenborough
  CDS (1)..(1002): transl_table=11
atgagcagatactgtatcgtcaccgaccaggaccgctgcatcagctgcaaggcgtgcgaggtgcattgcaaggtcgccaacaacgtccccgtcggggcgcgtctgggcatgcacatcgcctccggaccgcacgacgtggacggcaggcccgacatccgcaccatgttcatgccctgcttccagtgcgacgaaccgtggtgcgttcccgtttgccccacaggggccatcgccaagcgcgaaagcgacggcatcgtcgccatcgacgcggacacgtgcgtcggctgcaaggcgtgcatcaccgcctgcccgtggcgcgtaccgcaatggaaccccgtcaccgaaaaggccgtcaaatgcgacctgtgccgcgaccgtctcgacgccgggctgcgacccgcctgcgtcaccgcctgcaccacacacgcccttgaactggtttccgcagaggtgggcgcatccctgccctgtaccggcatcgacgccgtgcgcaaggtggcggcgcgcccggtgcctgcctccatgccccccgccccgaaaggtcagcggcagccgcgcctcggtgatgtggagaaggccatcgccgcaggagaggtgcagaccctcgtagtgctgtgtcaggccctcgacgacgccctgccaacgccgtacgaggcaggttgcatcccgcagggcatggccctttcggacgcccgcctgcgccccgacctcggtgacgtgcccctgccgccacagaccatgctgcgcaaggtgcgctgcgcccgtcgctttgccgccaagtcgcttccgaagttccttgccgcaggactgaaggcccttctcgtcttcgcctgccccccgacgatgtgcgccagccatgaggacggcaaaatccccgccacgggcctcgccgacctcgcccgggcctgtgcggatgccggggtgcgccttgtcgtgcacgaagcctgcccagcaggccccgacgccgtccgcgatgcggtggccgccttcagccggcaggcctga

SEQ ID NO: 67630 - protein, 333 aa, Desulfovibrio vulgaris subsp. vulgaris str. Hildenborough
MSRYCIVTDQDRCISCKACEVHCKVANNVPVGARLGMHIASGPHDVDGRPDIRTMFMPCFQCDEPWCVPVCPTGAIAKRESDGIVAIDADTCVGCKACITACPWRVPQWNPVTEKAVKCDLCRDRLDAGLRPACVTACTTHALELVSAEVGASLPCTGIDAVRKVAARPVPASMPPAPKGQRQPRLGDVEKAIAAGEVQTLVVLCQALDDALPTPYEAGCIPQGMALSDARLRPDLGDVPLPPQTMLRKVRCARRFAAKSLPKFLAAGLKALLVFACPPTMCASHEDGKIPATGLADLARACADAGVRLVVHEACPAGPDAVRDAVAAFSRQA

SEQ ID NO: 67631 - DNA, 768 bp, Desulfovibrio vulgaris subsp. vulgaris str. Hildenborough
  CDS (1)..(768): transl_table=11
atgtcttctttcaaggaattcaagatcaagtgggggatggtcatcgacctcgacaaatgtacgggctgcggcgcgtgcatggttgcctgtcaggccgagaacaacatcgccccgcagcctgatgccagcaacaagctgaagtcgctgaactggcttgtggtgtacgaactcaacaacggcaagccgttccccgagcacgacgtggcctacctgccccgtccgtgcatgcagtgcggcaagccttcatgcgtgtcggtgtgccctgtcgtggcgaccgacaagaacgaggaaggcggcatcgtcagccaggtgtacccgcgatgcatcggttgccggtactgcatggcctcgtgcccctaccatgcccgttacttcaactggttcgaccccacgtggcccgaaggtatggacaagaccctcacccccgacgtctccgtacgtccgcgcggtgtcgtggaaaagtgcaccttctgccaccaccgcttcatgcaggccaaggataaggcccgtgtcgaaggacgcgaccccagcgccctgcgtgacggtgactacgtgacctcgtgcaccgaggcgtgccccaacggcgccatcatcttcggggacttcaacaaccccgagcatcgtgtgcatgaactccacaagagcaagtatgccttcaggctgctcgaacgcctcggcaccgacccgcaggtgtactacctgagccgccgtgaatgggtgcgtcgccttggcgacaactatctcgaacacgaaaaggtcaaggggtag

SEQ ID NO: 67632 - protein, 255 aa, Desulfovibrio vulgaris subsp. vulgaris str. Hildenborough
MSSFKEFKIKWGMVIDLDKCTGCGACMVACQAENNIAPQPDASNKLKSLNWLVVYELNNGKPFPEHDVAYLPRPCMQCGKPSCVSVCPVVATDKNEEGGIVSQVYPRCIGCRYCMASCPYHARYFNWFDPTWPEGMDKTLTPDVSVRPRGVVEKCTFCHHRFMQAKDKARVEGRDPSALRDGDYVTSCTEACPNGAIIFGDFNNPEHRVHELHKSKYAFRLLERLGTDPQVYYLSRREWVRRLGDNYLEHEKVKG

SEQ ID NO: 67633 - DNA, 786 bp, Desulfovibrio vulgaris subsp. vulgaris str. Hildenborough
  CDS (1)..(786): transl_table=11
atgaacaacagcagaagacgattcctgaagatcgccagcctctcggttttcggccttggggccaagggcgtccttgatgtcgccgctggcaccaccccggacgccgctgcgctgaccggcaaatatgaagacggtgcgaccgcgctcaaggcgaaacgctgggccatggtcatcgacatgcgcaagttcacctcccccgaggactactcgcgcgtcatcgaggcctgtcactcgatccacaacgttccttccatcgaaggcaatcaggagatcaagtggctctggacggacacctacgaagcgaccttccctgacgacatgaacccccacctgtcgcaggaagttctcgaacgccgttatctgctcctgtgcaaccactgcgagaacccgccctgcgtgcgtgtgtgtcccaccaaggccacattcaagcgcgccgacggcatcgtcgtcatggactaccaccgttgcatcggttgccgcttctgcatggccggttgcccctacggcgcccgtagcttcaacttcggcgacccgcagccgcacatcaaggccatcaatccgaagttcccggcccgcacacgcggtgtcgtggaaaagtgcaccttctgtagcgaacggcttgccgtgggccagctgcccgcgtgcgtggaggcctccaacggcgccattctcttcggcgacctggatgacccgaactcgcccgtacgtaaggccctgaacgaaaactacagcattcgccgcaagcccagtgtaggcacccagcccggcgtctactacatcgtctag

SEQ ID NO: 67634 - protein, 261 aa, Desulfovibrio vulgaris subsp. vulgaris str. Hildenborough
MNNSRRRFLKIASLSVFGLGAKGVLDVAAGTTPDAAALTGKYEDGATALKAKRWAMVIDMRKFTSPEDYSRVIEACHSIHNVPSIEGNQEIKWLWTDTYEATFPDDMNPHLSQEVLERRYLLLCNHCENPPCVRVCPTKATFKRADGIVVMDYHRCIGCRFCMAGCPYGARSFNFGDPQPHIKAINPKFPARTRGVVEKCTFCSERLAVGQLPACVEASNGAILFGDLDDPNSPVRKALNENYSIRRKPSVGTQPGVYYIV

SEQ ID NO: 67635 - DNA, 699 bp, Erwinia carotovora subsp. atroseptica SCRI1043
  CDS (1)..(699): transl_table=11
atggaagaattatctcgccgtcgttttattgcctatatgggaagtgcgattgccgttagtggaaatatcggtctcgtacaagctcaaaatgagccagaaaaaacgcagggtaaattagccgttaaatatggcttattacataacgaaatgcgttgtatcggatgcaaagcctgtatcaaggcctgcaaagagacgaataacgtccctgatggcgtaacccggctggacatactgcaaaccgtcgacattcccgccgtcgagaaaacgcgcgccatcaagcaatttttccgtaagtcctgccagcactgtgagaatccgccctgcgttgccgtctgcccaacgggggcgtcctttaaagatgcgctcaccggcattgttgacgtcaacgataaacgctgcgtgggttgtcgctactgtattgccgcgtgcccttatcatgtgcgtttcatcaaccccgtcacgaaaacggcagacaaatgcaatttttgtcgggaaaccaatctggcggcagggaaacagcccgcctgcgtcgaaatctgccccactaaagcgttggtatttggcgatctcaacgaccctgaaagcaacattgccaagatgatcgagagcaacgcgacctaccgctccaaggtttatttgggcaccgaacctcaactctatcgtatgcctgggaaacgaggagtaatcgacaatgcataa

SEQ ID NO: 67636 - protein, 232 aa, Erwinia carotovora subsp. atroseptica SCRI1043
MEELSRRRFIAYMGSAIAVSGNIGLVQAQNEPEKTQGKLAVKYGLLHNEMRCIGCKACIKACKETNNVPDGVTRLDILQTVDIPAVEKTRAIKQFFRKSCQHCENPPCVAVCPTGASFKDALTGIVDVNDKRCVGCRYCIAACPYHVRFINPVTKTADKCNFCRETNLAAGKQPACVEICPTKALVFGDLNDPESNIAKMIESNATYRSKVYLGTEPQLYRMPGKRGVIDNA

SEQ ID NO: 67637 - DNA, 1011 bp, Erwinia carotovora subsp. atroseptica SCRI1043
  CDS (1)..(1011): transl_table=11
gtggacagacgtaattttctaaaactggctactggcggggtgatgacggtcggcatcgccccctctgcgttggctaaagcagagaacaagccgccaattccgaactcgcttggcatgctgtatgactcaacgctgtgcgtggggtgtcaggcatgcgtcagccagtgtcagcgcatcaaccacagtgatgcaccgcatggtgcgacatacgcctacgcgggtacggaaccgatgtggtctaacaacgataagctcagcccctacaccaacaacattattcaggtgtggagtgatgggagcggcgtacataaagaccagacggaaaatggttacgcctatatcaaaaaacagtgcatgcactgtgtggatcccaattgtgtatccgtctgcccggtgcaagcattacgcaaagacgcccatacaggcatcgtgcattacgatcccgatgtgtgtaccggttgccgttactgcatcgtggggtgcccgtttaatgtgccgaaatatgactatgacgacccgttcggaaaaattcacaagtgtgagctttgcaatcagaagggcgttgagcggttggataacggagggttgccggggtgtgttgaagtctgcccgacgggggcggtgattttcggcacgcgggagcaactgctggatgaagctaaaatgcgccttgcagggaaaacaggcgagccttaccggttcccacgccagacattgcaggggaacgaccggtacgaacatcctcttccacattaccagcagcatgtatacggcgagttggaggggggcggaacacaggtgctggtgttgactggcgtaccgtttgaaaacttagggttgccactgctggatagcctatcaacgggggcgcgttccgaacatgtacagcactccttgtataaaggcatggttctgccgtttgctgcactggccgggatcactttcctggtgcagcgcaacatgggtaagcacgatcaggacgaaaaagaggatgaacatgacgatgcataa

SEQ ID NO: 67638 - protein, 336 aa, Erwinia carotovora subsp. atroseptica SCRI1043
MDRRNFLKLATGGVMTVGIAPSALAKAENKPPIPNSLGMLYDSTLCVGCQACVSQCQRINHSDAPHGATYAYAGTEPMWSNNDKLSPYTNNIIQVWSDGSGVHKDQTENGYAYIKKQCMHCVDPNCVSVCPVQALRKDAHTGIVHYDPDVCTGCRYCIVGCPFNVPKYDYDDPFGKIHKCELCNQKGVERLDNGGLPGCVEVCPTGAVIFGTREQLLDEAKMRLAGKTGEPYRFPRQTLQGNDRYEHPLPHYQQHVYGELEGGGTQVLVLTGVPFENLGLPLLDSLSTGARSEHVQHSLYKGMVLPFAALAGITFLVQRNMGKHDQDEKEDEHDDA

SEQ ID NO: 67639 - DNA, 672 bp, Erwinia carotovora subsp. atroseptica SCRI1043
  CDS (1)..(672): transl_table=11
atgagttgctctcgtcgtcaatttcttgcccgtatgggcggggtgattgccatcaccagcacggcgggacaagtcgtcgcacagacgctgaatatcaacggcgtccgctacggcatgatccatgatgaatcgctctgtatcggctgtacggcctgcatggatgcctgccgtgaagtcaatcaggtgccggaaagtgtatcgcgtctgacgatcattcgcagcgaaccgattgggacattcccagacgtgaaatatcgctttttccgtcactcctgccagcactgtgaaaattcaccctgcgttgacgtatgtccaaccggagcctcgtttcgtgatgcggcaagcggcattgtggatgtgaatcccgatctgtgcgtcgggtgccaatactgtattgcggcttgcccttatcaggtgcgctttattcatccgcagacgaaaacggcggataagtgcgatttttgccgcaagactaacctgaaagccggaaaactgcccgcctgtgtgttgtcttgtccgacgaacgcgctgacgttcggtaaccttgacgaccctgacagcgacatttcccgtcagcttcgtcaacagccgacctatcgctacaaaatcgcgctcggcactcgtcctaaggtttatcgcgtaccgtttaaatacggggaggttcatcaatga

SEQ ID NO: 67640 - protein, 223 aa, Erwinia carotovora subsp. atroseptica SCRI1043
MSCSRRQFLARMGGVIAITSTAGQVVAQTLNINGVRYGMIHDESLCIGCTACMDACREVNQVPESVSRLTIIRSEPIGTFPDVKYRFFRHSCQHCENSPCVDVCPTGASFRDAASGIVDVNPDLCVGCQYCIAACPYQVRFIHPQTKTADKCDFCRKTNLKAGKLPACVLSCPTNALTFGNLDDPDSDISRQLRQQPTYRYKIALGTRPKVYRVPFKYGEVHQ

SEQ ID NO: 67641 - DNA, 642 bp, Propionibacterium acnes KPA171202
  CDS (1)..(642): transl_table=11
atgggagagaagaactatacggcaaaaggagccaagtacggcttcttctttgaccagacactgtgcaccgggtgcaaagcctgccaaatcgcctgcatcgacaaacacgacctgcccacgggggtgcggtggcgccgagtcgtcgagtacagcggaggaacttggcagatctcgggggacactttcaacccctcagtcttcacctactacacgtcagtctcatgcaaccactgcgaggacccgatctgcatgaaagtctgccctaccacggcaatgtcccgccgcgatgacggcaccgtctacgtcgaccaagacaagtgcgtgggatgtcgatactgtgagtgggcgtgcccgtatagcgcaccgcagtaccgcaaggacactggccgaatgagcaaatgcgatctgtgctacgactatcgcagtaagggtaaagagccagcctgtgtagccgcttgcccgtcgcgagctctggattggggacctatcgatgagctgcgcagcacatacggcaatgaggacgccatcgctccactgcctgatccttcggtaaccaaaccgcacctagtgatcactgcgcatcgtgacgcccagaggtgggacgagggcaccggcgagatcgctaataccaaggagatctga

SEQ ID NO: 67642 - protein, 213 aa, Propionibacterium acnes KPA171202
MGEKNYTAKGAKYGFFFDQTLCTGCKACQIACIDKHDLPTGVRWRRVVEYSGGTWQISGDTFNPSVFTYYTSVSCNHCEDPICMKVCPTTAMSRRDDGTVYVDQDKCVGCRYCEWACPYSAPQYRKDTGRMSKCDLCYDYRSKGKEPACVAACPSRALDWGPIDELRSTYGNEDAIAPLPDPSVTKPHLVITAHRDAQRWDEGTGEIANTKEI

SEQ ID NO: 67643 - DNA, 594 bp, Desulfotalea psychrophila LSv54
  CDS (1)..(594): transl_table=11
atggcaagaatgaaatttttatgcgatgtagaacgttgcatcgactgtagtggttgtatcgtcgcctgtaaagagggcaatcacgtgcccgttggagtgaaccgacgtcgtgttgtcacccttgaccagggaaagcctggtgaaaaatccatctccatctcatgtatgcactgtgccgatgcaccatgtatagctgtctgccccgttgatgcgatctatcaacgagatgatggcattgtcctggcggataagaaaaaatgtattggctgtggctattgctttatggcctgccctttcggtgcacctcaatttcccaagggagcagtttttggtgcccgtggtgccatggataagtgtaccttctgtgccggtggtcccgaagagactttcagcgacgaagagaaacgtctctacggacaaaacaggattgcagagggcaaaccaccgctctgctctggtatgtgtgccaccaaggcgcttcttgccggcgatgctgatattatagccgatgtctatcggaagcgtgtctttcaacgtggttcaggcgccggggcttggggctgggatcgggcatacaaaaaagacgataagtaa

SEQ ID NO: 67644 - protein, 197 aa, Desulfotalea psychrophila LSv54
MARMKFLCDVERCIDCSGCIVACKEGNHVPVGVNRRRVVTLDQGKPGEKSISISCMHCADAPCIAVCPVDAIYQRDDGIVLADKKKCIGCGYCFMACPFGAPQFPKGAVFGARGAMDKCTFCAGGPEETFSDEEKRLYGQNRIAEGKPPLCSGMCATKALLAGDADIIADVYRKRVFQRGSGAGAWGWDRAYKKDDK

SEQ ID NO: 67645 - DNA, 465 bp, Desulfotalea psychrophila LSv54
  CDS (1)..(465): transl_table=11
atgagtgacgttctcaagaacaatgagttccctgtgatgtgtaatcactgtgagaatcctccctgtgtgcgtgtttgtcctaccaaggctacctttatcgaggaacataatggcatcgtagagatggattaccatcgttgtattggttgtcgtttctgtatggtggcatgtccctatggagctcgaagctttaactgggaagatcctcgcccacatattaaagagtacaatcacgaatttccaacccgtatgcgtggtgttgtggagaagtgtactttttgtgcggaacgtttggcacttggtcaagaaccagcttgtcttgaagcaattaaggaatccggcgcaatgatctttggtgaccttaatgatccaaactctgaagtttcaaaggttctcaaagagaacccaaccattcagagaaagccgagttatggaactaaaccatcagtcttttacatagtgtga

SEQ ID NO: 67646 - protein, 154 aa, Desulfotalea psychrophila LSv54
MSDVLKNNEFPVMCNHCENPPCVRVCPTKATFIEEHNGIVEMDYHRCIGCRFCMVACPYGARSFNWEDPRPHIKEYNHEFPTRMRGVVEKCTFCAERLALGQEPACLEAIKESGAMIFGDLNDPNSEVSKVLKENPTIQRKPSYGTKPSVFYIV

SEQ ID NO: 67647 - DNA, 618 bp, Yersinia pseudotuberculosis IP 32953
  CDS (1)..(618): transl_table=11
atgacaacgcaatatggtttttacatcgactccagccgttgtacagggtgtaaaacgtgcgagttggcctgcaaagactttaaaaatctctcaccggatgtcagctttagacgtatttacgaatacgctggcggtgattggcagcaggataacgggacatggcaccagaatgtgttcgcttactacctgtctatcgcctgtaaccactgtagtgaccccgcctgtactaaggtgtgtccgagtggtgctatgcataagcgtaatgatggttttgtggtggttaacgaagatatctgcatcggttgccgctactgccatatggcctgcccttacggtgcgccgcaatatgatgctgaaaaagggcacatgaccaagtgcgacggttgttacgaacgggtggcggtagggaagaaacctatctgtgtcgattcctgtccactgcgtgcattggatatggcccctatcgatgaattacgcgaaaaatacggtgatttagctgaaattgcgcctctgcctgccgctcacttcacgctgccgaatatcgtactaaaacctaatgccaacagccgcccggtcagagataccaccggtcatctggcaaacccgaaggaggtataa

SEQ ID NO: 67648 - protein, 205 aa, Yersinia pseudotuberculosis IP 32953
MTTQYGFYIDSSRCTGCKTCELACKDFKNLSPDVSFRRIYEYAGGDWQQDNGTWHQNVFAYYLSIACNHCSDPACTKVCPSGAMHKRNDGFVVVNEDICIGCRYCHMACPYGAPQYDAEKGHMTKCDGCYERVAVGKKPICVDSCPLRALDMAPIDELREKYGDLAEIAPLPAAHFTLPNIVLKPNANSRPVRDTTGHLANPKEV

SEQ ID NO: 67649 - DNA, 714 bp, Symbiobacterium thermophilum IAM 14863
  CDS (1)..(714): transl_table=11
atgacccgctacgcctacttcgtggacctctccctctgcgccgggtgcgaggcctgcacggtggcgtgtcaggcgctgaacgggctggactggaacatccgctataccaaggtggaccggatggtggtgggcacctacccgaacgtgaaatccagcttcgtcaccacccagtgcctgcactgcgacgatccgccctgcgcggcggtctgccccaccggcgcgacgtacaagaccgccgacgggccggtgaagatcgacgacgagaactgtatcggctgccagtactgcatgacggcctgcccttacgaggccaggacgtacgatgcggctgcggacgtggtgcggaagtgctcgttctgccacgaccggctcggggcgggcgagcggcccgcctgcgagcagacctgcctgaccggcgcccgcatggtcggtgacctggacgatcctaccgacccgatccaccagcagatctcggccccggacgtgatccacatcgagggcaccagcttctactaccggctgccggagcacctggaccgggccgcgctcccggccgacttcaagccctcggtcgcgacgttcgcctggcagtcgatcgtccagcccgtgggccagatcctgatgggctccacggtcgccgcgctgctgctgagtctggcggtcaacgccttccggaaccgcggaaaggagggtgcacaggatggcaacggttaa

SEQ ID NO: 67650 - protein, 237 aa, Symbiobacterium thermophilum IAM 14863
MTRYAYFVDLSLCAGCEACTVACQALNGLDWNIRYTKVDRMVVGTYPNVKSSFVTTQCLHCDDPPCAAVCPTGATYKTADGPVKIDDENCIGCQYCMTACPYEARTYDAAADVVRKCSFCHDRLGAGERPACEQTCLTGARMVGDLDDPTDPIHQQISAPDVIHIEGTSFYYRLPEHLDRAALPADFKPSVATFAWQSIVQPVGQILMGSTVAALLLSLAVNAFRNRGKEGAQDGNG

SEQ ID NO: 67651 - DNA, 558 bp, Symbiobacterium thermophilum IAM 14863
  CDS (1)..(558): transl_table=11
gtggcacagaaaggcttttactatgacatgaccgcctgcgtcgggtgcaaggcttgctacatcgcgtgcaaggataagaacgacctgcccctgggggtcatgtaccgcaatgtctacacctttgagggcgggcggtacccgaagccgtggatcttcaacatctccatctcgtgcaaccactgcagcgacccgcggtgcgtgaccaactgcccgaccggcgcctcctacaagcgggaggaagacggcctggtcctggtcgaccaggaggcctgtatcgggtgccagtactgcgtctggtcgtgcccctacggcgcccggcactacctcgaggagcagggtgtcgtgggcaagtgcaacggctgcgtcgacctggtcgaacggggtcagaacccggcctgcgtggacgcctgcgtcatgcgcgcgctggagttcggcgacctggacgaactgaagcgcaggcatcccgaagccgaggtcttcaccagctggggagccccgggcgccgagctgaccgggccctcgatgctggtcaccctgaagccgcaagcccggcggtag

SEQ ID NO: 67652 - protein, 185 aa, Symbiobacterium thermophilum IAM 14863
MAQKGFYYDMTACVGCKACYIACKDKNDLPLGVMYRNVYTFEGGRYPKPWIFNISISCNHCSDPRCVTNCPTGASYKREEDGLVLVDQEACIGCQYCVWSCPYGARHYLEEQGVVGKCNGCVDLVERGQNPACVDACVMRALEFGDLDELKRRHPEAEVFTSWGAPGAELTGPSMLVTLKPQARR

SEQ ID NO: 67653 - DNA, 651 bp, Symbiobacterium thermophilum IAM 14863
  CDS (1)..(651): transl_table=11
atgacgacacagctcggctttcacgtggacatggagaagtgcatcggctgcaaggcatgcgaggcggcctgcaaggacttctaccggctgccgcccgagatccgctggcgccgggtgcgctccttcgagacgggcgagtttcccaaggccatccgggtccacctgagcctggcctgcaaccactgcgaggatccggcctgcatgaagggctgcccggtggaagcgtacaccaagcgggctgacggtctggtgatccacgaccccaccgcctgcatcggctgccaatactgcacctggacctgcccgtatagcgtgccccagttcgaccccgagcagggcgtggtctccaagtgcaacggctgctaccaactggtggaccagggccagctgccccgctgcgtccaggcctgcctgaccggtgcgctcagcttcggcgaggtggtggcccacgaggcgcagaagcggcaggcggtgcggcaggcgccgggcttcccggacccgtcggtcacccggccggcaacccggttcgcctggccggagaaagggccgcagcctgatcgtcaggtacgggtcgcgccacctgccggtgacgggacgagcgtcgggggtgcggcggaaaccgtggtggccgcggcgggggaggtgcggtag

SEQ ID NO: 67654 - protein, 216 aa, Symbiobacterium thermophilum IAM 14863
MTTQLGFHVDMEKCIGCKACEAACKDFYRLPPEIRWRRVRSFETGEFPKAIRVHLSLACNHCEDPACMKGCPVEAYTKRADGLVIHDPTACIGCQYCTWTCPYSVPQFDPEQGVVSKCNGCYQLVDQGQLPRCVQACLTGALSFGEVVAHEAQKRQAVRQAPGFPDPSVTRPATRFAWPEKGPQPDRQVRVAPPAGDGTSVGGAAETVVAAAGEVR

SEQ ID NO: 67655 - DNA, 771 bp, Symbiobacterium thermophilum IAM 14863
  CDS (1)..(771): transl_table=11
gtgcagccttcggcggccctgcgtgggcacctccccgagaccctggcacggtccttgcatccatctccgggtgaagtccacagatccagcaagggagtgacccccatgaccgcagcagcccgggatcccggctcccggcacgagccctactgggtgatggtcatcgacctgcagaagtgcatcggctgcgacacctgcaccgtctcctgcaaggccgaaaaccgcaccccgccgggcgtcagctacaacgttgtcctggaaatggagctcggcgagtaccccaacacccggcgggcgtacgtgccccggccctgcatgcagtgcgacagtccgccctgcgccggcgtctgcccggtgggcgccacctacaagggcgagagcggcattgtcgtcatcgacgacgaccggtgcatcggctgccggtactgcatcgccgcctgcccctacggcgcccggtccttcgacttcggcgagaactacgacgagatgctgggctacaccgaggtccaggcccccgagtatggggtcgaccgggggccgcgccgcaggggcgagacgcccatcggcacggtgcgcaagtgcacgttctgcctgcaccgcatccaccggggcgaggagcccgcctgcgtggagacctgcatcggcgacgcccggtactttggcgacctgaacgaccccaactcggtggtggccaagctggccgccagcccgcgggccttccggctgaaggaggagctgggcacgcagccccgggtcatctacctgaagtag

SEQ ID NO: 67656 - protein, 256 aa, Symbiobacterium thermophilum IAM 14863
MQPSAALRGHLPETLARSLHPSPGEVHRSSKGVTPMTAAARDPGSRHEPYWVMVIDLQKCIGCDTCTVSCKAENRTPPGVSYNVVLEMELGEYPNTRRAYVPRPCMQCDSPPCAGVCPVGATYKGESGIVVIDDDRCIGCRYCIAACPYGARSFDFGENYDEMLGYTEVQAPEYGVDRGPRRRGETPIGTVRKCTFCLHRIHRGEEPACVETCIGDARYFGDLNDPNSVVAKLAASPRAFRLKEELGTQPRVIYLK

SEQ ID NO: 67657 - DNA, 597 bp, Symbiobacterium thermophilum IAM 14863
  CDS (1)..(597): transl_table=11
atgcaatacgggttcttcatcgatgccaagtactgcgccggatgcaagacctgccagatcgcctgtaaggaccgggcgagcctcgaggttggccagctgttccgcaaggtggtgaactacgaggacggcggctgggtgcagcgcggtgaaggctgggtccacaacgtcacctcgtactggttctccatcagctgcaaccactgcgccgatccggcctgcgtgtacgtctgccccaccggggcgatgtacaagcggtccgacaacggcctcgtgctcgtgaaccaggacgactgcgtggggtgccagagctgcgtctgggcctgcccgtacgacgccccccagtacaaccctgaggtgggcagggtgcacaagtgcgacggctgcatcgaccgggtggaggccgggcagcggccggtctgcgtggacgcctgcccgtaccagctgatcgacttcggcgacatcgaggaactgcgggccaagcacggcggcacggcctgggtgcaggggctggccgatccgtcccgtacccgcccgtccctcctggtcaacccgccgaccggggccatcagctcgccgattggagggagccgcaagtga

SEQ ID NO: 67658 - protein, 198 aa, Symbiobacterium thermophilum IAM 14863
MQYGFFIDAKYCAGCKTCQIACKDRASLEVGQLFRKVVNYEDGGWVQRGEGWVHNVTSYWFSISCNHCADPACVYVCPTGAMYKRSDNGLVLVNQDDCVGCQSCVWACPYDAPQYNPEVGRVHKCDGCIDRVEAGQRPVCVDACPYQLIDFGDIEELRAKHGGTAWVQGLADPSRTRPSLLVNPPTGAISSPIGGSRK

SEQ ID NO: 67659 - DNA, 792 bp, Symbiobacterium thermophilum IAM 14863
  CDS (1)..(792): transl_table=11
atgacctacgggatgctcatcgacctgtccaagtgcatgggctgccggggctgccaggtggcctgcaagcagtggaacgacctcccgggtgaggacacgagcgtggggcccgacttcaccaacccgcagaagcgctcggcctacacctggaccaccatcgacttcgtgaccgccgaggtgaacggccgcaccgtggccaccttcaccaagtccggctgcatgcactgcctggagccggcctgcgagtcggtctgcatcgccggcgccatcaagcggcaggcgaacggcgcggtcaccatcgaccacgacaagtgcatcggctgccgctactgccagctgggctgccccttcggtgtgcccaagtacgagtacgacaagccggtgccccgcatgcagaagtgcaccctgtgctacgaccgcatctcggagggcctggagccggcctgcgcggccacctgccccagcggcgccatcctcttcggcgagcgggaagagctgctgaagctcgccaggcagcgcatcgccgaggggggcggccggtacatcgaccacgtgtacggcgagcacgaggcgggcggcaccgccgtcctgtacatctcccccgtgccgctggacctgaccgccctgaacaccgacgtcacgaccgagtcggtgcccggcttcacctggaaggccatgcggcagctgccggtcctggtgggcagcgtcgcagccctgtcgctgggactcatggcctactcgcggcggcgcgcccagcttgaggcgctggcgaaggggggtggcgagcagtga

SEQ ID NO: 67660 - protein, 263 aa, Symbiobacterium thermophilum IAM 14863
MTYGMLIDLSKCMGCRGCQVACKQWNDLPGEDTSVGPDFTNPQKRSAYTWTTIDFVTAEVNGRTVATFTKSGCMHCLEPACESVCIAGAIKRQANGAVTIDHDKCIGCRYCQLGCPFGVPKYEYDKPVPRMQKCTLCYDRISEGLEPACAATCPSGAILFGEREELLKLARQRIAEGGGRYIDHVYGEHEAGGTAVLYISPVPLDLTALNTDVTTESVPGFTWKAMRQLPVLVGSVAALSLGLMAYSRRRAQLEALAKGGGEQ

SEQ ID NO: 67661 - DNA, 876 bp, Symbiobacterium thermophilum IAM 14863
  CDS (1)..(876): transl_table=11
atgggtcgcgcagcaacctgggagacctggcggcctgatcccgccaacacccggcagcacgtcgccatgctggtcgacacctccgagtgcatcgggtgcaagggctgcgaggtcgcctgcaagcagtggaaccagaacgaggcccgcatcaaccaggatccgggcacctaccagagccacccggccctggacgcggagacctggaccgtcatccgcttctttgagaccgaagaagagaacggcatgtccatgtggctgatgcagaagcacagctgcatgcactgcaccgacgcgggctgcgtcaccgcctgccccaccgacgccctgcagtacggcgactacggcctggtgacgctgaaccaggatgcgtgcatcggctgcggctactgcgaggcggcctgcccgttcgactgcatccacgtcgaccggacggcctggggccagcgggcgcagaaggcgggcaagtgcaccttctgctacgaccgcatcgcccagggcatgcagcccgcgtgcgtcgccacctgcccaaccgactgcatcaagtacggcgaccgcgacgccctgatcgcgtggggccgggagcgggtggcacagcttcaggccatgggctacaagaacgccaacctctacggcgtcgacgagatgggcggcctgcaccacctctacgtgctgctggagccgcccgagacctacggcctgccggtcgcccccgaactctcgcccgtcctccggctgtggaagtacgtcctgcaacccatcggcaaggcggtgctgggcgtgggcctcttcggcctcatcgtcaactggctcgccgcccggcgggtcttcaagggcggcctctcgccccatgagaccgccgaatcgctgcacgactag

SEQ ID NO: 67662 - protein, 291 aa, Symbiobacterium thermophilum IAM 14863
MGRAATWETWRPDPANTRQHVAMLVDTSECIGCKGCEVACKQWNQNEARINQDPGTYQSHPALDAETWTVIRFFETEEENGMSMWLMQKHSCMHCTDAGCVTACPTDALQYGDYGLVTLNQDACIGCGYCEAACPFDCIHVDRTAWGQRAQKAGKCTFCYDRIAQGMQPACVATCPTDCIKYGDRDALIAWGRERVAQLQAMGYKNANLYGVDEMGGLHHLYVLLEPPETYGLPVAPELSPVLRLWKYVLQPIGKAVLGVGLFGLIVNWLAARRVFKGGLSPHETAESLHD

SEQ ID NO: 67663 - DNA, 939 bp, Mannheimia succiniciproducens MBEL55E
  CDS (1)..(939): transl_table=11
atgtccgcagtacaagaacaaaacattatcaagcgctccgccacttccggcgtcacgccgccgccgcaagtccgcaaagacgtggtggaagtcgctaaacttatcgatgtcaccacctgtatcggttgtaaagcctgtcaggtcgcttgttccgaatggaacgatatccgcgctccgcaggaacaatgcgttggggtttacgataatccccgcgacatgaacgcccaacaatggacggtaatgaagttcagcgaagtggaggaaaacgaccggctggaatggctgatccgcaaagacggctgtatgcactgcgccgaaccgggctgcttaaaagcctgtccggcaccgggcgccattatccaatacgccaacgggattgtggatttccaatcggaaaaatgtatcggttgcggttattgtatcgccggctgtccgtttaatgtgccgaaaatgagtaatgaagacaaccgcgtatacaaatgtaccctctgtgtggatcgcgtcaatgtgggtcaagagcccgcctgcgtaaaaacctgcccgaccggcgccattcatttcggctccaaagaggaaatgctgcactatgcggaaacccgggtggcggatttgaaatcccgcggctatgacaatgccggcatctataatcccgaaggcgtaggcggtactcatgtgatgtacgtgttgcaccacgcggacagaccggagctctatgccggcttaccgaaagatccggaaatcgacgttaccgtcaaactttggaaagacatcttaaaaccggtggcggcagtcgcgatgggtggcctggcattagccgaaatcgcccattatgtaggggtcggtccgaataatgaagaagatgtggaagatcacagcgcccacttcgaacgggaagatgcggaagaagaacaatcacatcataacaaaggtggcaaataa

SEQ ID NO: 67664 - protein, 312 aa, Mannheimia succiniciproducens MBEL55E
MSAVQEQNIIKRSATSGVTPPPQVRKDVVEVAKLIDVTTCIGCKACQVACSEWNDIRAPQEQCVGVYDNPRDMNAQQWTVMKFSEVEENDRLEWLIRKDGCMHCAEPGCLKACPAPGAIIQYANGIVDFQSEKCIGCGYCIAGCPFNVPKMSNEDNRVYKCTLCVDRVNVGQEPACVKTCPTGAIHFGSKEEMLHYAETRVADLKSRGYDNAGIYNPEGVGGTHVMYVLHHADRPELYAGLPKDPEIDVTVKLWKDILKPVAAVAMGGLALAEIAHYVGVGPNNEEDVEDHSAHFEREDAEEEQSHHNKGGK

SEQ ID NO: 67665 - DNA, 681 bp, Mannheimia succiniciproducens MBEL55E
  CDS (1)..(681): transl_table=11
atgacagcttgctcacgccgaaactttgtttccggaatgggtgcgttaatcctcacaacgggaacatcagttaaattatcggcacaaggtgaaaagcctaacgaaacggcgccaaaacgctatgcaatggtacatgacgaaacttcatgtatcggttgtacggcctgtatggatgcctgccgtgagactaaccaagtgccagaaggtgtttctcgtttggaaattctccgtagcgagcctcatggcgaatttccgaaccaggaatatgaatttttccgtcaatcttgtcaacattgcactaacgcgccttgtgtggcggtatgtccgacaggtgcttcgttcattgaccctgaaacgggtattgttgatgtaaacaaagatctttgcgtaggttgccaatattgtatcgccgtatgtccttatcgcgtacgttttattcatccggtgcataaaactgccgataaatgtaatttctgccgcgataccaatcttgcagcaggcaaacaaccggcttgtgttgaagcttgcccgactaaagcattaacctttggtgatatgaatgatccaaatagcgcggtcgcacgtaaagtaagagaaaatccggtgtatcgtaccaaattaacattaggtaccgagccgaatctttaccatatcccatttgcaaaaggagagcatagataa

SEQ ID NO: 67666 - protein, 226 aa, Mannheimia succiniciproducens MBEL55E
MTACSRRNFVSGMGALILTTGTSVKLSAQGEKPNETAPKRYAMVHDETSCIGCTACMDACRETNQVPEGVSRLEILRSEPHGEFPNQEYEFFRQSCQHCTNAPCVAVCPTGASFIDPETGIVDVNKDLCVGCQYCIAVCPYRVRFIHPVHKTADKCNFCRDTNLAAGKQPACVEACPTKALTFGDMNDPNSAVARKVRENPVYRTKLTLGTEPNLYHIPFAKGEHR

SEQ ID NO: 67667 - DNA, 993 bp, Mannheimia succiniciproducens MBEL55E
  CDS (1)..(993): transl_table=11
atggatagacgtaaatttataaaagcaggcatgcttggcggcgtcgcatctgcgctacctttaaatgccgctcatgcggaagtcaaaaatcaagaacctattcccggtgccttaggcatgttgtatgactctacgttatgtgtgggctgccaggcttgtgtggcggaatgccagaaaatcaacggaacgccggttaatccgaaaggcgaacaaacctggtccaataacgataaattatcgccttttacccgtaatgtcattcaggtttggtctgaaggtgaaggtaccaataaagatcagccgcaaaacggttatgcttacataaaaaaacaatgtatgcattgcgttgatccgaactgtgtaagcgtttgtccggttcaagccctgacgaaaaacccgaaaacaggtattgtgggctacgatccggatatttgcaccggttgccgttattgtatggtggcttgtccttttgacgtgcctaaatatgattatgataatcctctgggtcaaatcagcaaatgcgaactttgtaaccaaaaaggcgttgagcgcattgttcaaggcaaattgcccggctgttgccatgtttgcccgaccggcgccattatttttggttcccgcgaagaattaatggcggaggctaaacgccgtttaagtatgactcagggaacggattatgaatttccccgccaacatgtaaacagcaaagataaatatcaggcgaaaattcccgcttacgaacagcatatttacggtgaaattgaaggcggcggtactcaggtattggttttaagcggtgtaccttttgaaaacctcggtttgcctcaattagacgaaatagcaaccggcgcccgtgccgcccacttacaacatactttatacagaggcatgattcttcctttagtcggacttgcggggttaacctttataacttaccgcaatatgcacggtaaaaaaccagaacatcaccaagaggaggataataatgagtaa

SEQ ID NO: 67668 - protein, 330 aa, Mannheimia succiniciproducens MBEL55E
MDRRKFIKAGMLGGVASALPLNAAHAEVKNQEPIPGALGMLYDSTLCVGCQACVAECQKINGTPVNPKGEQTWSNNDKLSPFTRNVIQVWSEGEGTNKDQPQNGYAYIKKQCMHCVDPNCVSVCPVQALTKNPKTGIVGYDPDICTGCRYCMVACPFDVPKYDYDNPLGQISKCELCNQKGVERIVQGKLPGCCHVCPTGAIIFGSREELMAEAKRRLSMTQGTDYEFPRQHVNSKDKYQAKIPAYEQHIYGEIEGGGTQVLVLSGVPFENLGLPQLDEIATGARAAHLQHTLYRGMILPLVGLAGLTFITYRNMHGKKPEHHQEEDNNE

SEQ ID NO: 67669 - DNA, 798 bp, Burkholderia pseudomallei K96243
  CDS (1)..(798): transl_table=11
atgacgcaaatggcgctcgtgatcgatctgaacgtgtgcgtggggtgccacgcgtgcgtgacgagctgcaaggaatggaacacgtcgggcgacgcgggcgtgctgtctgacttgcgcccatatgacgccgatccgtccggcaccttcttcaaccgcgtgcagacgttcgaggcgggcgaatttccgctcgccgacacgatccacttcccgaagtcgtgcctgcattgcgaagacccgccgtgcgtgccggtctgcccgacgggcgcgagctacaagcgcgaggaagacgggctcgtgctcgtcgattacgacaagtgcatcggctgcaagtactgcacgtgggcgtgcccatatggcgcgcgcgagctcgacgaagtgcgcaaggagatgacgaagtgcacgctttgcgcggaccgcattcacgacgagacgctgcccgagcgcgatcgcaagcccgcgtgcgtgctcgcgtgcccgacgtcggcgcgcctgttcggcgacatccacgatccgaattcgaccgtgtcgcaggcaatccgcgagcgcggcggctatcagttgatgccggaatggggaacgcggcccgcgaatcattacctgccgcgccgcacgacgaccgcgtgcgggagcgggggcggcggtggtagcgacgggagcggaggcggcggttgcggtagcggcgccgcgtgcgcgtgccggccggcggacgcgaagcccgcgcccgcctcggccggcgacgcactcgcgcacgggcagccgaatctcgccgcgctcgcgaagcgcatccgatctgaatga

SEQ ID NO: 67670 - protein, 265 aa, Burkholderia pseudomallei K96243
MTQMALVIDLNVCVGCHACVTSCKEWNTSGDAGVLSDLRPYDADPSGTFFNRVQTFEAGEFPLADTIHFPKSCLHCEDPPCVPVCPTGASYKREEDGLVLVDYDKCIGCKYCTWACPYGARELDEVRKEMTKCTLCADRIHDETLPERDRKPACVLACPTSARLFGDIHDPNSTVSQAIRERGGYQLMPEWGTRPANHYLPRRTTTACGSGGGGGSDGSGGGGCGSGAACACRPADAKPAPASAGDALAHGQPNLAALAKRIRSE

SEQ ID NO: 67671 - DNA, 873 bp, Methylococcus capsulatus str. Bath
  CDS (1)..(873): transl_table=11
atggcattgcaatccctcgacatcgtccgccgctccgccaccacgacgcccagcccgcagcagcggcagacgacggaggtggccaagctcatcgacgtcaccaagtgcatcggctgcaaggcctgccagtcggcctgccaggagtggaacgatctgcgggaggaagtcggcatcaacgagggttcctaccagaacccgcacgatctcaccgccaattcctggaccctgatgcgctttaccgagaccgaggaaaacggcaccctcgaatggctgatccgcaaggacggctgcatgcactgcgccgaccccggctgcctcaaggcctgcccctcgccgggcgcgatcatccaatacagtaacggcatcgtcgatttccacgaggaaaactgcatcggctgcggctactgcatcgccggctgcccgttcgacattccccgcctttcccccaaggacggcaaggcctacaagtgcaccctgtgttcggaccgcgtgtcggtggggctggagccggcctgcatcaaatcctgcccgacccaggcgctggtgttcggcagcaaggaagacatgatcgaacacgccaacgagcgcatcgccgacctcaaggagcgcggcttcgagaacgccggcctctacgacccgccgggagtgggcggcacccacgtgatgtacgtgctgcaccatgccgacaagccgcagctctacgatggtctgccccaatcccctcggatcagcggtctggtcggcctgtggaaaggcatcttcaagcccctggccacggctgccctggcgctcaccgcactggccgggtttttccactatgtcacggtcggccccaacgagacgggggaggacgaagaggaggaaaaggcatga

SEQ ID NO: 67672 - protein, 290 aa, Methylococcus capsulatus str. Bath
MALQSLDIVRRSATTTPSPQQRQTTEVAKLIDVTKCIGCKACQSACQEWNDLREEVGINEGSYQNPHDLTANSWTLMRFTETEENGTLEWLIRKDGCMHCADPGCLKACPSPGAIIQYSNGIVDFHEENCIGCGYCIAGCPFDIPRLSPKDGKAYKCTLCSDRVSVGLEPACIKSCPTQALVFGSKEDMIEHANERIADLKERGFENAGLYDPPGVGGTHVMYVLHHADKPQLYDGLPQSPRISGLVGLWKGIFKPLATAALALTALAGFFHYVTVGPNETGEDEEEEKA

SEQ ID NO: 67673 - DNA, 693 bp, Photobacterium profundum SS9
  CDS (1)..(693): transl_table=11
atgacgtgttcaagacgaaattttttagcgggtgctggtgcggtgatttttaccaccggagttagcgctggtagcggtgtacttggtcgccaatcgttagtcgcgaccatggacgacggtgttaaacgctatggcatggtgcatgatgaaacattgtgtattggctgtactgcgtgtactgatgcttgtcgtgaagtaaacaaagtacctgaaggtgtttctcgactagaaatagtgcgcagtgagcctcagggagaatacccggatgtgagctatcagttcactcggatttcttgtcagcattgtgataatgcaccttgtgtgcatgtttgtccgacaggggcttctttcaaagatcctgatactggcattgtcgatgttgatcctttcaaatgcgtaggttgtggctattgccttgctgcgtgtccgtataaggttcgtttctttaatccagaaacaaaatctgcagataaatgtgatttttgtcgtaagaccaacctgaaggaaggcaaactgccagcctgtgttgaatcttgcccaactaagtcactgacgtttggtgatctgaatgatccaaacagtgaagtgtcgaagttattagagcaaaaaaccgtttatcgacaaaaggtggaattaggtacatcaccgaagttatataaagtgccttatggaaaaggggagataaaaggatga

SEQ ID NO: 67674 - protein, 230 aa, Photobacterium profundum SS9
MTCSRRNFLAGAGAVIFTTGVSAGSGVLGRQSLVATMDDGVKRYGMVHDETLCIGCTACTDACREVNKVPEGVSRLEIVRSEPQGEYPDVSYQFTRISCQHCDNAPCVHVCPTGASFKDPDTGIVDVDPFKCVGCGYCLAACPYKVRFFNPETKSADKCDFCRKTNLKEGKLPACVESCPTKSLTFGDLNDPNSEVSKLLEQKTVYRQKVELGTSPKLYKVPYGKGEIKG

SEQ ID NO: 67675 - DNA, 669 bp, Photobacterium profundum SS9
  CDS (1)..(669): transl_table=11
ttgttatcaggcattggtgcaataaccgcgggggccgcactaattccagtcgtacaagccagcaacgcctcaacaggcaacattgtggtgggcaataaatataaaaacaacaatcagcctgatcgcaaaggcatggtaggaaaacgctatgccatggtggtcgatttgcgtaaatgtgttggctgccaagcctgtacggtcggctgcagtattgaaaaccaagcgcctattggccaattccgcaccaccgtaaagcaatatgaagttacccttgatgatggtagtacaggcacgaaacaggtgaagtcttttatgctgccgcgtctgtgtaaccattgtgataacccaccctgcgtcaaagtctgcccagtacaggccacttaccaacgtgaagacggcattgttatggtcgataacaagcgctgtgttgcctgtgcctattgcgtacaggcttgcccttacgatgctcgcttcatcaatgaagaaacccttacagccgataaatgtacgttttgcgcacatcggttagagcaaggtttactgcctgcttgtgtggaaacgtgtgtaggtggtgcgcggatcattggggatttaaataacccaagcagcgaaataaaccgactgctcgttgaacataaagacgaactaaacaaccacctactaaagtag

SEQ ID NO: 67676 - protein, 222 aa, Photobacterium profundum SS9
MLSGIGAITAGAALIPVVQASNASTGNIVVGNKYKNNNQPDRKGMVGKRYAMVVDLRKCVGCQACTVGCSIENQAPIGQFRTTVKQYEVTLDDGSTGTKQVKSFMLPRLCNHCDNPPCVKVCPVQATYQREDGIVMVDNKRCVACAYCVQACPYDARFINEETLTADKCTFCAHRLEQGLLPACVETCVGGARIIGDLNNPSSEINRLLVEHKDELNNHLLK

SEQ ID NO: 67677 - DNA, 831 bp, Haloarcula marismortui ATCC 43049
  CDS (1)..(831): transl_table=11
atgacgaactatggcctcgtaatcgaccaggagcggtgtatcggctgtcaggcatgcgcagtgtcatgtaaacaggagaacaacgtcccgatgggacagttctggaaccgcgtcctcacggagggcggcgacaagatggacaccccgtccggtggctaccccgaagacggcggcagcggggcgctagatatgcagtaccagccgacggcgtgccagcactgcgaaaacgcgccctgcgtgaaggtctgtccggtcaacgcgacgtacacccgggacgacggaattgtcgaaatcgactacgacaaatgcatcggctgtcgctactgtatggccgcctgcccgtacaacgcgcgggtgttcaactgggacgaacccgaccatatgcccgaggaggggacgggcgacgttgccgcccggccacagggcgtcgtcgagaagtgtacgttctgtagccatcgcgtcgacgagggactcgacccggcctgtgtcgtcaactgtcctgccgacgcacgcatcttcggtgaccttgacgacgagggaagcaccgtctcgaagtacatcaacgagtacgagacggaccggctcctcgaagaccgcgggacgaacccgaagacacactacatcagcggcgagatgagccccggtcggccacagacgtcggataaaatggagagcgagctcgacgatgtctctccgtggtccgatgggtcagaggacgtgccagctgaggccggtgaaagcgacagcagtggctcgggtggaagccaccactccatcgagggtgatgcagctccacacgtcccagcagtggggtccggaggtgatgactga

SEQ ID NO: 67678 - protein, 276 aa, Haloarcula marismortui ATCC 43049
MTNYGLVIDQERCIGCQACAVSCKQENNVPMGQFWNRVLTEGGDKMDTPSGGYPEDGGSGALDMQYQPTACQHCENAPCVKVCPVNATYTRDDGIVEIDYDKCIGCRYCMAACPYNARVFNWDEPDHMPEEGTGDVAARPQGVVEKCTFCSHRVDEGLDPACVVNCPADARIFGDLDDEGSTVSKYINEYETDRLLEDRGTNPKTHYISGEMSPGRPQTSDKMESELDDVSPWSDGSEDVPAEAGESDSSGSGGSHHSIEGDAAPHVPAVGSGGDD

SEQ ID NO: 67679 - DNA, 663 bp, Haloarcula marismortui ATCC 43049
  CDS (1)..(663): transl_table=11
atgtcaacaggcaatgaagtgatgcacgacggcgtgatgagtaccggcgaggatgcgcgcatcttcccggatgttgaggcgtgtatcgactgtggtggctgtgttgtctcctgtaagcgtacgtgggacgtcccacgggacgaacagcgaatcagtatcgcgacgatgctcgaaggccaggaagccgcatcggggctcaacgccagcagcggccaggcgataggccaaggtgagtcacccggcgagacagcagtcccgatgcagtgctatcactgttcgaacgcgccgtgcgtctcggtgtgtccgaccgactcgctcatctcgaaggagaacggcttcgtgcgggtccgtgacgacctctgtatcggttgccagtactgcctctcggcgtgtccgttcggcgcgccacagttccccgacgaggacagcggggtcgccaacctcgtcggcagcggtggcaacatggacaagtgtaccatgtgcgaggaacgtcaagatgtcggcaaggggccggcctgcgccgaggagtgtgccaccgacgccatcctggtcgggacgccggcccagatatcggacgaactggacaacagggacagcggcacgttcttcaacgacgtggctatggacatcatctttggcgaggacgccagtgagttccaatga

SEQ ID NO: 67680 - protein, 220 aa, Haloarcula marismortui ATCC 43049
MSTGNEVMHDGVMSTGEDARIFPDVEACIDCGGCVVSCKRTWDVPRDEQRISIATMLEGQEAASGLNASSGQAIGQGESPGETAVPMQCYHCSNAPCVSVCPTDSLISKENGFVRVRDDLCIGCQYCLSACPFGAPQFPDEDSGVANLVGSGGNMDKCTMCEERQDVGKGPACAEECATDAILVGTPAQISDELDNRDSGTFFNDVAMDIIFGEDASEFQ

SEQ ID NO: 67681 - DNA, 630 bp, Salmonella enterica subsp. enterica serovar Paratyphi A str. ATCC
  CDS (1)..(630): transl_table=11
atgagtcagtttacacattacccgccggtgagcgataaacaactgggatttttcatcgactcctcacgctgctccggttgtaaagcctgccaggtggcctgcaaagacaaaaacaatctggaagtaggccgtcgtttccgccgcgtctatgaagtcaagggcggaagtttcatcccgaccgggcagggcggggtcagcaataacgtatttgcttatacgctttccatttcctgcaaccactgtgcggaccctgtctgcaccaaaaattgcccgactaccgctatgcataaacgcccgggcgacggcatcgtgcgcgttgataccgacaaatgcgtcggctgtggctattgcgcctggtcctgcccttacgacgcgccgcagcttaacgagcagaccagccaaatgtccaagtgcgacatgtgcgttgatttactggcgaaaggtgaactgcccgtctgcgtcgcgacctgtccgctggaggccatcaagtttggcccgattgatgaactgcgcgcgaagtacgatagcgtatgcgacgttaacgggctgccagattcatccataaccaaacctaatctggttgtcaaagcgcatcagggcgcagaaaaagagggtaaacgccatgcatga

SEQ ID NO: 67682 - protein, 209 aa, Salmonella enterica subsp. enterica serovar Paratyphi A str. ATCC
MSQFTHYPPVSDKQLGFFIDSSRCSGCKACQVACKDKNNLEVGRRFRRVYEVKGGSFIPTGQGGVSNNVFAYTLSISCNHCADPVCTKNCPTTAMHKRPGDGIVRVDTDKCVGCGYCAWSCPYDAPQLNEQTSQMSKCDMCVDLLAKGELPVCVATCPLEAIKFGPIDELRAKYDSVCDVNGLPDSSITKPNLVVKAHQGAEKEGKRHA

SEQ ID NO: 67683 - DNA, 618 bp, Salmonella enterica subsp. enterica serovar Paratyphi A str. ATCC
  CDS (1)..(618): transl_table=11
atgacaactcagtatggattttttattgattccagccgttgcaccggttgcaaaacctgcgaactggcctgcaaggactacaaagatttgaccccggatgtcagtttccggcggatatatgaatacgcaggcggcgactggcaggaagataacggcgtctggcatcagaacgtctttgcctactatctctccatttcgtgcaaccactgcgaagacccggcctgtaccaaagtctgcccgagcggcgcgatgcacaagcgcgatgacggttttgtggtggtgaacgaagaggtctgtatcggctgtcgctactgccacatggcctgcccgtacggcgcgccgcagtacaacgcggccaaaggtcatatgaccaagtgcgacggctgttatgaccgggtggcggaaggcaagaaaccgatttgcgtggaatcctgcccgctgcgggcgctggatttcggcccgatagacgaactgcgcaaaaaacacggtgagctggctgccgtcgcgccgttgccgcgcgcgcatttcacgaagccgaatattgtgattaaacccaacgccaacagccgcccgaccggggacaccaccggttatctggccaatccgaaggaggtataa

SEQ ID NO: 67684 - protein, 205 aa, Salmonella enterica subsp. enterica serovar Paratyphi A str. ATCC
MTTQYGFFIDSSRCTGCKTCELACKDYKDLTPDVSFRRIYEYAGGDWQEDNGVWHQNVFAYYLSISCNHCEDPACTKVCPSGAMHKRDDGFVVVNEEVCIGCRYCHMACPYGAPQYNAAKGHMTKCDGCYDRVAEGKKPICVESCPLRALDFGPIDELRKKHGELAAVAPLPRAHFTKPNIVIKPNANSRPTGDTTGYLANPKEV

SEQ ID NO: 67685 - DNA, 618 bp, Salmonella enterica subsp. enterica serovar Paratyphi A str. ATCC
  CDS (1)..(618): transl_table=11
atgacaacccagtatggattttttattgattccagccgttgcaccggttgcaaaacctgcgaactggcctgcaaggactacaaagatttgaccccggatgtcagcttccgccgcatttatgagtatgcgggcggcgactggcaggaagataacagcgtctggcaccagaacgtctttgcctactatctctccatctcctgtaaccactgcgaagacccggcctgtaccaaagtctgcccgagcggcgcgatgcacaagcgcgatgacggttttgtggtggtggatgaagacgtatgtatcggctgccgctactgccacatggcctgcccgtacggcgcgccgcagtacaacgccgccaaaggtcatatgaccaagtgcgacggctgttatgatcgggtggcggaaggcaagaaaccgatctgcgtggaatcctgcccgctgcgggcgctggactttggtcctatcgacgaactgcgcaaaaaacacagtgagctggctgccgtcgcgccgttgccgcgcgcgcatttcacgaagccgaatattgtgattaaacccaacgccaacagccgcccgaccggggacaccaccggttatctggccaatccgaaggaggtataa

SEQ ID NO: 67686 - protein, 205 aa, Salmonella enterica subsp. enterica serovar Paratyphi A str. ATCC
MTTQYGFFIDSSRCTGCKTCELACKDYKDLTPDVSFRRIYEYAGGDWQEDNSVWHQNVFAYYLSISCNHCEDPACTKVCPSGAMHKRDDGFVVVDEDVCIGCRYCHMACPYGAPQYNAAKGHMTKCDGCYDRVAEGKKPICVESCPLRALDFGPIDELRKKHSELAAVAPLPRAHFTKPNIVIKPNANSRPTGDTTGYLANPKEV

SEQ ID NO: 67687 - DNA, 558 bp, Salmonella enterica subsp. enterica serovar Paratyphi A str. ATCC
  CDS (1)..(558): transl_table=11
atgagacgtgcgtttttagtgaatagcgataagtgcatcggctgccgcggctgtgctatggcgtgtaaaagctttaaccaactggagccggatcgcttctggcgctacgtttatccgttggataaagacatctatccacatgaagagcgggcgttttactcgctggcctgtaaccactgcgaacatccggcctgcgtcgccgcctgtccggtcgaagcctataccaaacgtgaagatggcgtggtggtgcataaccctgagcgctgcatcggctgtaaaaactgtattcgtaactgtccttatggcgcgccgcgttttaatgaagagacgcgtaaagcggaaaaatgcagtatgtgctacgagcgtcttgatatcggtatgaatccggcgtgcgtgaacgcctgtccggtgggcgccttgtcgattatcgatttggatgccgatcctgtgcccgataatgcggtgcagtatccgccagggttcccgcatatgccacagctcaatccaggaacgcgctttattctggcgcgccagcctaagcagccggaggacaagtaa

SEQ ID NO: 67688 - protein, 185 aa, Salmonella enterica subsp. enterica serovar Paratyphi A str. ATCC
MRRAFLVNSDKCIGCRGCAMACKSFNQLEPDRFWRYVYPLDKDIYPHEERAFYSLACNHCEHPACVAACPVEAYTKREDGVVVHNPERCIGCKNCIRNCPYGAPRFNEETRKAEKCSMCYERLDIGMNPACVNACPVGALSIIDLDADPVPDNAVQYPPGFPHMPQLNPGTRFILARQPKQPEDK

SEQ ID NO: 67689 - DNA, 987 bp, Salmonella enterica subsp. enterica serovar Paratyphi A str. ATCC
  CDS (1)..(987): transl_table=11
gtgaacagacgtgactttattaaagcagcctccggtggagcattgctgttgggcgccgcgccgtctgtcagccatgcggctgcagaaaaccgtccgccgattccaggttcgttgggcatgctgtatgactccactctgtgcgttggctgtcaggcctgcgtcacaaagtgtcaggatatcaacttcccggcgcgtaacccggaaggggagcagacctggtcgaacaacgacaaactgtcgccgtataccaataacattatccaggtatggcgtagcggcacgggcgtgaacaaagatcaggaagagaacggctatgcctacatcaagaaacagtgtatgcactgcgttgatcctaactgcgtttccgtttgcccggtgtcggcgctgaaaaaagatccgaaaaccggcatcgtccactatgacaaagatgtctgcaccggctgccgttactgtatggtcgcctgcccgtacaacgtacctaagtacgactacaacaacccgtttggcgcgcttcacaagtgtgagttgtgtaaccagaaaggcgttgagcgtctggataaaggcggtttgcctgggtgcgtggaagtttgtccggcaggggccgtcattttcggtactcgtgaagagctgatggcggaagcgaaaaaacgtctggccctcaaaccaggcagtgaatatcactatccgcgccagacgttgaaaacggacgacacctatctgcatacggtgcctaaatactacccacacctctacggtgaaaaagagggcggcggtacacaggtgctggtgctgacaggcgttccttatgaagatttggatctgccgaagctggatgacctttcaaccggagcgcgctccgagcatgttcaacacacgctttataaaggcatgatactacccctggctgcgctggcgggcttaaccgtgctggttcgtcgtaatagcaaaaacgaccatcacgatggaggagacgatcatgagtcatga

SEQ ID NO: 67690 - protein, 328 aa, Salmonella enterica subsp. enterica serovar Paratyphi A str. ATCC
MNRRDFIKAASGGALLLGAAPSVSHAAAENRPPIPGSLGMLYDSTLCVGCQACVTKCQDINFPARNPEGEQTWSNNDKLSPYTNNIIQVWRSGTGVNKDQEENGYAYIKKQCMHCVDPNCVSVCPVSALKKDPKTGIVHYDKDVCTGCRYCMVACPYNVPKYDYNNPFGALHKCELCNQKGVERLDKGGLPGCVEVCPAGAVIFGTREELMAEAKKRLALKPGSEYHYPRQTLKTDDTYLHTVPKYYPHLYGEKEGGGTQVLVLTGVPYEDLDLPKLDDLSTGARSEHVQHTLYKGMILPLAALAGLTVLVRRNSKNDHHDGGDDHES

SEQ ID NO: 67691 - DNA, 903 bp, Salmonella enterica subsp. enterica serovar Paratyphi A str. ATCC
  CDS (1)..(903): transl_table=11
atggcttatcaatcgcaagacatcattcgtcgttccgccactaacggtttcacccccgcgccccaggcgcgggaccaccaggaagaggtggcgaaactcatcgacgtcaccacctgtatcggctgtaaagcgtgtcaggtggcgtgctccgagtggaacgacatccgtgatgaagtgggcaataacgtcggggtgtatgacaacccggcggacttaactgcgaaatcctggacggtgatgcgcttctcggaagtggaacagaacgacaaactggagtggctgatccgtaaggatggctgtatgcactgcgccgatcccggctgcctgaaggcctgtccggcggaaggggcgatcattcagtatgctaacggtattgtcgacttccagtccgagcagtgtatcggctgcggctactgtatcgctggctgcccgttcaacgtgccgcgctttaacccggaagacaaccgcgtctataaatgtacgctgtgcgtcgaccgagtgaccgtggggcaagaaccggcctgcgtgaagacctgtccaaccggcgccattcattttggctcgaaagaggatatgaaaacgctggcgggcgagcgggtggcggaactcaaaacccgtggttatgacaacgcgggactgtacgatccggccggcgtaggcggtacgcatgtcatgtacgtgctgcatcatgccgacaagccgaatctgtatcacggtctgccggagaacccggaaatcagcgaaaccgtcaagttctggaaaggcgtctggaaaccgctcgccgcgttcggttttgccgcgacctttgccgccagcgtcttccactatgtcggcgtcggcccgaaccgcgcggaagaggaagatgacaacctgcatgaagagaaagacgaggtgcgcaaatga

SEQ ID NO: 67692 - protein, 300 aa, Salmonella enterica subsp. enterica serovar Paratyphi A str. ATCC
MAYQSQDIIRRSATNGFTPAPQARDHQEEVAKLIDVTTCIGCKACQVACSEWNDIRDEVGNNVGVYDNPADLTAKSWTVMRFSEVEQNDKLEWLIRKDGCMHCADPGCLKACPAEGAIIQYANGIVDFQSEQCIGCGYCIAGCPFNVPRFNPEDNRVYKCTLCVDRVTVGQEPACVKTCPTGAIHFGSKEDMKTLAGERVAELKTRGYDNAGLYDPAGVGGTHVMYVLHHADKPNLYHGLPENPEISETVKFWKGVWKPLAAFGFAATFAASVFHYVGVGPNRAEEEDDNLHEEKDEVRK

SEQ ID NO: 67693 - DNA, 672 bp, Salmonella enterica subsp. enterica serovar Paratyphi A str. ATCC
  CDS (1)..(672): transl_table=11
atgagttgcacccgacgtcaatttattacccgcgtcggcgcgctggcggcggtcagtgggatggcaggacgcgttgtagcgaacacgttgaatattaacggcgtgcgttatggcatggtacacgatgagtcattatgcatcggctgcacggcctgcatggatgcctgtcgggaagtcaacaacgtgccggaaggcgtatcgcgcctgacgattattcgcagcgagccgcaggggacgtttcctgatgtgaaatatcgcttcttccgccactcgtgccagcattgcgaccatgccccctgcgttgacgtctgcccgaccggcgcatcattccgcgatgccgccagtggtattgtcgacgtgaacccggacctttgcgtcggctgtcagtactgcattgccgcgtgtccctaccgcgtgcgctttatccatccggtcagtaagacggcggataagtgcgatttctgccggaaaactaacctgaaagcgggcaaacagcccgcctgcgttgagtcatgtccaacgaaggcgctgacgtttggtaatctggacgatcccaacagcgatatctcccgtttgttgcggcagaaaaccacctatcgttacaagctggcgctgggcacaaaaccgaaggtctaccgcgttccctttaactatggggaggtgagccaatga

SEQ ID NO: 67694 - protein, 223 aa, Salmonella enterica subsp. enterica serovar Paratyphi A str. ATCC
MSCTRRQFITRVGALAAVSGMAGRVVANTLNINGVRYGMVHDESLCIGCTACMDACREVNNVPEGVSRLTIIRSEPQGTFPDVKYRFFRHSCQHCDHAPCVDVCPTGASFRDAASGIVDVNPDLCVGCQYCIAACPYRVRFIHPVSKTADKCDFCRKTNLKAGKQPACVESCPTKALTFGNLDDPNSDISRLLRQKTTYRYKLALGTKPKVYRVPFNYGEVSQ

SEQ ID NO: 67695 - DNA, 768 bp, Azoarcus sp. EbN1
  CDS (1)..(768): transl_table=11
atgagcgacgcacacgacgaccaacctaacggacgccgcaagttcgtcacggccctggccgcaggcgcgacagcgaccgcggtggctttgacggccagggccaagcccgaggaccggggcgcggccagcgaaggaaaggccatccagtacggcatgctgatcgatgtgcgtcgctgcatcggttgccattcctgcaccgtcgcctgcaagagcgagcacgacgtgccggccggggtgaaccgcagctgggtcgagtacgtggagaagggcgaatatccgaacgtcgcccgcagtttcctgccgcggctgtgcaaccactgctcggtcccgcagtgcgttagcgtgtgcccgacgggcgccacttacaagcgcccggaggatggcgtggtggtcgtcgactccggggtctgcatcggctgcaagtactgcatccaggcctgcccttacgacgcgcgctttctcaatcctcataccggctttgccgacaagtgcgatttctgtatcggccgcgtgaccaacgggctggtaccggcctgcgtcgagacctgcatcggcggcgcgcgcatcttcggcgaagtgagtgaccctgacagcacgatctcccggctgatcgcgaaaaatcccgtcaccgtgttgcggcgggagatgggaaccatgcccaacgtgtattacatcggcgcggaccactccgacgagagcgacgcccgtcgcccggaggtgcgctatgtccgcgtcacgacccaccgcccgcagctcaagaggagatga

SEQ ID NO: 67696 - protein, 255 aa, Azoarcus sp. EbN1
MSDAHDDQPNGRRKFVTALAAGATATAVALTARAKPEDRGAASEGKAIQYGMLIDVRRCIGCHSCTVACKSEHDVPAGVNRSWVEYVEKGEYPNVARSFLPRLCNHCSVPQCVSVCPTGATYKRPEDGVVVVDSGVCIGCKYCIQACPYDARFLNPHTGFADKCDFCIGRVTNGLVPACVETCIGGARIFGEVSDPDSTISRLIAKNPVTVLRREMGTMPNVYYIGADHSDESDARRPEVRYVRVTTHRPQLKRR

SEQ ID NO: 67697 - DNA, 606 bp, Azoarcus sp. EbN1
  CDS (1)..(606): transl_table=11
atggcacgcatgaaattcctgtgtgacgccgagcgctgcatcgaatgcaacggctgcgtcacggcctgcaagaacgagcacgaagtgccgtggggcatcaatcgccgacgcgtcgtcacgatcaacgacggggtgccgggcgagcgctcgatgtcggtggcgtgcatgcactgctcggacgcgccgtgcatcgcggtgtgtccgacgaacgtgatctatcacaccgaggaaggcgtcgtgctgcacgacaaggacggttgcatcggctgcggctactgcttctacgcctgtccgttcggcgcgccgcagttcccgaacggcccggcggcgttcggcgcgcgcggcaagatggacaaatgcacgttctgcgccggcggtccggaagaaaaccactccgacgccgagttcgagaagtacggccgcaaccggctcgccgccggcaagttgccgctgtgcgccgagatgtgctcgacgaaagcactgctcgccggcgacgcggccgagctttccgacatcttccgcgaacgcgcgctgcggcgcggcaaagggttcgaggcgtggggctggatgacggcgtatggcaaggacaaggaggaagcgaaatga

SEQ ID NO: 67698 - protein, 201 aa, Azoarcus sp. EbN1
MARMKFLCDAERCIECNGCVTACKNEHEVPWGINRRRVVTINDGVPGERSMSVACMHCSDAPCIAVCPTNVIYHTEEGVVLHDKDGCIGCGYCFYACPFGAPQFPNGPAAFGARGKMDKCTFCAGGPEENHSDAEFEKYGRNRLAAGKLPLCAEMCSTKALLAGDAAELSDIFRERALRRGKGFEAWGWMTAYGKDKEEAK

SEQ ID NO: 67699 - DNA, 603 bp, Azoarcus sp. EbN1
  CDS (1)..(603): transl_table=11
atgagatggggaatggtgatcgacctcaagcgctgcatcgcctgttacggctgccagctcgcgtgcaaggcggagaacggcacgccacccggggtgttcttcgcccggctgctcaagcatgaagaggggcagttcccgacggtgcgacaactgttcctgccggtgctgtgcaaccactgcgaggacccgccgtgcgtggaagtgtgcccgaccggcgcaagcttcaagtgcgacgacggcatcgtcgatattgatcccgacaagtgcgtcggctgtcgcacctgcatgatggcctgcccgtacggcaatcgctacttcaacgacaagccgcagcactacttcccgcaaggctcgacaccgttcgaggagaagcgcaccgcgcgccaccagaccgacgtggtgatgaagtgcaacttctgccgcgaccgcgtcaaggccggcaagcagccggcctgcgtcgcgaactgcccgaccgtggcgcgctacttcggcgacctcgacgacccgaacagcgaagtctcgcgcctcatcaaggaccgcggcggttttccgctgcacccggagttgggcaccggaccttccgtttattacctgccggcctga

SEQ ID NO: 67700 - protein, 200 aa, Azoarcus sp. EbN1
MRWGMVIDLKRCIACYGCQLACKAENGTPPGVFFARLLKHEEGQFPTVRQLFLPVLCNHCEDPPCVEVCPTGASFKCDDGIVDIDPDKCVGCRTCMMACPYGNRYFNDKPQHYFPQGSTPFEEKRTARHQTDVVMKCNFCRDRVKAGKQPACVANCPTVARYFGDLDDPNSEVSRLIKDRGGFPLHPELGTGPSVYYLPA

SEQ ID NO: 67701 - DNA, 711 bp, Azoarcus sp. EbN1
  CDS (1)..(711): transl_table=11
atgagtgaagaactcagggtctcgccgatcgagaccagggaggtgccgggcaagcgccggttcgcgatggtggtcgacacgcgtcgctgcatcggctgcatggcctgccaggtggcgtgcaaggctgagtacgacaccccgctcggggtcaatcgcacctgggtgccgtacaaggtggtcggcaagtaccccaacgtgaagaagcacttcctgccgcggctgtgcaaccactgcgacgatccgccctgcgtccgcagctgcccggtggaggccaccttcaaggtggacgacggcggcttcgtgctgcaacgctacgagcgctgcatcggctgccgtagctgcatggcggcctgcccctacaacgcgcgcttcatgctgccctcgcaccggacctacacgccgatcaccaaggtggtcgacaaatgcaccttctgcttccatcgcgtcacccagaacctggtgccggcctgcgtgcagacctgcatcgggcgctcgcgcatcttcggcgacctcaacgatcccaacagcgaggtttcgtatctggtggcgacccacgccacccaggtgctgcgccccgaggaaggaaccaagccgcacgtcttctacatcggcgccgatcgcaatgcgaccgagttcccgcgcgacgcctaccgccaacccgaggtgatggagcaggagcgcaccgcgttcaagcgccacttcgacatctga

SEQ ID NO: 67702 - protein, 236 aa, Azoarcus sp. EbN1
MSEELRVSPIETREVPGKRRFAMVVDTRRCIGCMACQVACKAEYDTPLGVNRTWVPYKVVGKYPNVKKHFLPRLCNHCDDPPCVRSCPVEATFKVDDGGFVLQRYERCIGCRSCMAACPYNARFMLPSHRTYTPITKVVDKCTFCFHRVTQNLVPACVQTCIGRSRIFGDLNDPNSEVSYLVATHATQVLRPEEGTKPHVFYIGADRNATEFPRDAYRQPEVMEQERTAFKRHFDI

SEQ ID NO: 67703 - DNA, 594 bp, Silicibacter pomeroyi DSS-3
  CDS (1)..(594): transl_table=11
atggcaagagcaaagtttctctgtgacgccgagcgctgcatcgagtgcaacgcctgcgtgaccgcctgcaagaacgagcacgaagtgccctggggcatcaaccgccgcagggtggttacgatcaatgacggcaaaccgggcgaacgctcgatctcggtggcctgcatgcattgctcggacgccccctgtatggcggtctgcccggtggactgcttctatcagaccgaagacggtgtggtgttgcattccaaggatctgtgcatcggctgtggctattgcttctacgcgtgcccgtttggcgcgccgcaatatccgcaggcgggcaacttcggatcgcgcggcaagatggacaagtgcaccttctgcgccggtggcccggaagagacccattcgacggccgaattcgccaaatacgggcgcaaccggatcgccgagggcaagctgcccatctgcgccgagatgtgttcgaccaaggcactgctggccggtgacggcgacgtggtctcggccatctaccgcgaacgcgtcgtggcgcgcggctttggtacaggcgcctggggctggggcaccgcctatgaccagaagggcggctga

SEQ ID NO: 67704 - protein, 197 aa, Silicibacter pomeroyi DSS-3
MARAKFLCDAERCIECNACVTACKNEHEVPWGINRRRVVTINDGKPGERSISVACMHCSDAPCMAVCPVDCFYQTEDGVVLHSKDLCIGCGYCFYACPFGAPQYPQAGNFGSRGKMDKCTFCAGGPEETHSTAEFAKYGRNRIAEGKLPICAEMCSTKALLAGDGDVVSAIYRERVVARGFGTGAWGWGTAYDQKGG

SEQ ID NO: 67705 - DNA, 807 bp, Silicibacter pomeroyi DSS-3
  CDS (1)..(807): transl_table=11
ttgccaagaaaattcgtcgaattttcttgcgtgtgcccgtggctgctggagcgtgacatgacggagctgccgcagaagaccgaccgtaagctggggctggtgatcgacctcgatacctgtgtcggctgccatgcctgcgtgatttcctgcaagggatggaacaccgagaattacggcgccccgctcagcgatcaggatccgtatggcgccgatccgtcgggcaccttcctgaaccgggtgcattcctatgaggtgcagccgcccgaggggcacgcccagctggtccatttcccgaaatcctgcctgcattgcgaggacgcgccctgtgtgaccgtctgcccgacgggcgccagctacaaacgctccgaggacgggatcgtgctggtcaacgagagcgattgcatcggctgtggcctctgcgcctgggcctgcccctatggcgcgcgtgagctggatctggccgaaggcgtgatgaagaaatgcaccctgtgtgtggatcgtatctataacgagaacctgcccgaggaggaccgcgtcccctcctgtgtgcgcacctgcccggcgggtgcgcggcatttcggcgatctgggtgatccggatagcgcggtgtcgcacctggtggccgagcgcggcggcatggatctgatgcccgaaatgggcaccaggcccgtgaacaagtatctgccgccccggcccaaggaccagatcgaagcgcagatcgacattctggcgcccctgctggcgccggtcgccgatgagcccaaggggttcatggcctggctcgacaaggcactggagaaactctga

SEQ ID NO: 67706 - protein, 268 aa, Silicibacter pomeroyi DSS-3
MPRKFVEFSCVCPWLLERDMTELPQKTDRKLGLVIDLDTCVGCHACVISCKGWNTENYGAPLSDQDPYGADPSGTFLNRVHSYEVQPPEGHAQLVHFPKSCLHCEDAPCVTVCPTGASYKRSEDGIVLVNESDCIGCGLCAWACPYGARELDLAEGVMKKCTLCVDRIYNENLPEEDRVPSCVRTCPAGARHFGDLGDPDSAVSHLVAERGGMDLMPEMGTRPVNKYLPPRPKDQIEAQIDILAPLLAPVADEPKGFMAWLDKALEKL

SEQ ID NO: 67707 - DNA, 939 bp, Dehalococcoides ethenogenes 195
  CDS (1)..(939): transl_table=11
atgacagataaacgtaaacagggaaattcccagtcaactccccctccaacccgcagggattttataaaaagctccggtggtgtgctgggtctggcagctataataaagctggacgaaggcactcagaatttcaaagcggctgttgcacccccctctgcggccagctttccgccggaagaaaccactttccttcccagccctgttaaggaagacccccttatccggatgcaggaagatttgcgccgggccatgcagaaaccagccgccgaacgccactgggctatggtaataaaccttaggaaatgtgtcggctgtcatgcctgcaccgaagcctgcatctcggaaaacaaactccctccgggggtgatataccgctttgttatggacgaagagatgggccagtaccctaatgtctcccggcgtttcactccccgcccctgcatgcactgtgacaatcccccctgcaccaaagtctgcccggtgggtgccacctttaaacagccggacgggatagtggtaattgactatcaccgctgcataggctgccgtttttgcatagtggcctgcccttatgttgcccggactatggactacggcgataactatctggaagacgaacctgaggactccggcctggtgctgggttatgagcaaggcggggtctggcaaagtgcccccagttttgaatacggctaccaacattcacgcacccccaaacgggactcacccatcggcaatgccagaaaatgccatttctgtctgcaccgcttggaaaagggcatgctgccggcctgtgtcaccacctgcatcggccgggtaaactacttcggtgatgccaatgaccctgacagcctggtttcggaactgatagccaacccgggcattatccagcttaaatcagagctgggcactgacccttcagtttattatttattttaa

SEQ ID NO: 67708 - protein, 312 aa, Dehalococcoides ethenogenes 195
MTDKRKQGNSQSTPPPTRRDFIKSSGGVLGLAAIIKLDEGTQNFKAAVAPPSAASFPPEETTFLPSPVKEDPLIRMQEDLRRAMQKPAAERHWAMVINLRKCVGCHACTEACISENKLPPGVIYRFVMDEEMGQYPNVSRRFTPRPCMHCDNPPCTKVCPVGATFKQPDGIVVIDYHRCIGCRFCIVACPYVARTMDYGDNYLEDEPEDSGLVLGYEQGGVWQSAPSFEYGYQHSRTPKRDSPIGNARKCHFCLHRLEKGMLPACVTTCIGRVNYFGDANDPDSLVSELIANPGIIQLKSELGTDPSVYYLF

SEQ ID NO: 67709 - DNA, 804 bp, Dehalococcoides ethenogenes 195
  CDS (1)..(804): transl_table=11
atgcctaatggaatgctgattgataccactagatgtactggttgtcgaggctgtcaggtagcctgtaaacagtggaacgaaaaccctgctgtcaagacaactttcagtcctgaagtgaccaatcccctggaacagaacgcattcaactacaacctgctggagtgcagggagattgaagaagacggaaaacttaactggattttcgctcacaagaggtgtttgcactgctatgaaccggcttgcgtttcggtatgtccggtcggtgccctccacaaacggcctaccggtgcagtagtctgggatcaggacaaatgcttcggctgccgttactgccagaacgcctgccccttccaaatccccaaatttgagtgggatgacaactgggctaaaatcaccaaatgcaccatgtgctggaacagagtggaaaacggtgtagaaccggcttgtgcagctacctgccccaccggtgctatcaaattcggcgaacgggctgacctgctggccgaagcctatgaaagacttgcaaatgaccctgacagatattacccctatgtttacggcgaaaaagaagccggcggtactcatgttttgtatttaagcagtgttgaacccgaaaaaatcggctttgacatgcatgagaatgagttcttccccagcttcaccagagaattcctgggcaacatacctttggaaatctctatagtagcttcgctgatggttggcatatggtatttccgcggccgcagaattcaggcgcaggcacacgatgccgagcatgctgaaaacaaggctggcaagcactag

SEQ ID NO: 67710 - protein, 267 aa, Dehalococcoides ethenogenes 195
MPNGMLIDTTRCTGCRGCQVACKQWNENPAVKTTFSPEVTNPLEQNAFNYNLLECREIEEDGKLNWIFAHKRCLHCYEPACVSVCPVGALHKRPTGAVVWDQDKCFGCRYCQNACPFQIPKFEWDDNWAKITKCTMCWNRVENGVEPACAATCPTGAIKFGERADLLAEAYERLANDPDRYYPYVYGEKEAGGTHVLYLSSVEPEKIGFDMHENEFFPSFTREFLGNIPLEISIVASLMVGIWYFRGRRIQAQAHDAEHAENKAGKH

SEQ ID NO: 67711 - DNA, 432 bp, Dehalococcoides ethenogenes 195
  CDS (1)..(432): transl_table=11
atgaaaagggtacagattaaagaagaactttgtatgggctgcggcctgtgccgtgtagcctgccagaccgaacactcggtctctcatgacgttatcaaggccgtcaaaaaggaaaatcagaagcccagaatacgggtggaacgcaagggtgagataagtttctctgtgccctgccgccactgtgatgagccatggtgtgcttattcctgtatcagcggtgctatgacccgtgaccccataaccggcattgtttccagtgaccctgaaagatgtatcggctgttggacatgcattgtggcctgcccgaatagcgctcttataaaagacaaggctaaccatgtaattctcaagtgtgatttgtgcgggggcaaagaaatacccgcttgcgtagccaactgccctaatgaagctctggggctggttgacggctaa

SEQ ID NO: 67712 - protein, 143 aa, Dehalococcoides ethenogenes 195
MKRVQIKEELCMGCGLCRVACQTEHSVSHDVIKAVKKENQKPRIRVERKGEISFSVPCRHCDEPWCAYSCISGAMTRDPITGIVSSDPERCIGCWTCIVACPNSALIKDKANHVILKCDLCGGKEIPACVANCPNEALGLVDG

SEQ ID NO: 67713 - DNA, 507 bp, Thermococcus kodakarensis KOD1
  CDS (1)..(507): transl_table=11
atgacgaggaggatactccacgttgattacagcctttgcattggttgtgagacgtgcgaaggagtctgcgactttattcacggcggcagacccaacataaaggtctattacaccattacagggatccccgttcccataaactgtcgtcactgtgagaaagccccatgtatggacgtctgtcctgcgggggcgatctaccgcgacagcgatggggccgttataataaaccccaataagtgcataggctgtctgatgtgcctcgccgcctgtcctttcggagttcccacttttgatgtcaagctcaaggcagttactaagtgcgacatgtgtgctgatagaagaaggcttggaacggccccagcgtgtgccgaaatgtgtccggcaggggccatattcttcggaaagcccgaggaagtcgaggaaaaagttaggagaagaaccgccgaaaagatagcacgggagcggctggcggcggttaacttggagggagtcggacggatgctctga

SEQ ID NO: 67714 - protein, 168 aa, Thermococcus kodakarensis KOD1
MTRRILHVDYSLCIGCETCEGVCDFIHGGRPNIKVYYTITGIPVPINCRHCEKAPCMDVCPAGAIYRDSDGAVIINPNKCIGCLMCLAACPFGVPTFDVKLKAVTKCDMCADRRRLGTAPACAEMCPAGAIFFGKPEEVEEKVRRRTAEKIARERLAAVNLEGVGRML

SEQ ID NO: 67715 - DNA, 501 bp, Thermococcus kodakarensis KOD1
  CDS (1)..(501): transl_table=11
atggccagaaagaccgtttttatagacttttcaaagtgcatcgagtgccgcgcctgtgaggtagcctgcgagcgcgaacacaacggaagatcattcataaacgtctttgaatggcaggaaatggccgcgatggccctcaactgccgccactgtgagaaggctccctgcctcgaggtctgcccgacaaacgcactctatcgcgatggggatggagcagttctgctcgccccccagaagtgcattggctgtctgatgtgtggaatcgtgtgcccctttggaataccagagcttgactcccttgacaagataatgatgaagtgcgacctctgcgcccacaggagagccgaaggaaagctcccggcgtgtgtggaaacctgcccgaccgatgcccttctcttcggcgacttcaacgacatccaaaggatgaggagacaaaagttcaccgaaaaggcgatagagatagccaagagcggcgagagaatacagttcaggggtgtgtag

SEQ ID NO: 67716 - protein, 166 aa, Thermococcus kodakarensis KOD1
MARKTVFIDFSKCIECRACEVACEREHNGRSFINVFEWQEMAAMALNCRHCEKAPCLEVCPTNALYRDGDGAVLLAPQKCIGCLMCGIVCPFGIPELDSLDKIMMKCDLCAHRRAEGKLPACVETCPTDALLFGDFNDIQRMRRQKFTEKAIEIAKSGERIQFRGV

SEQ ID NO: 67717 - DNA, 687 bp, Vibrio fischeri ES114
  CDS (1)..(687): transl_table=11
atgagttgttctagacgaaattttttagctggttcaggtgcggttattttcacaacaggtgttgcgacaacatcattaataaacagtaaaaaaaccttagcgtattccatggaagatggttcaaagcgttatggtatggttcatgatgaaaacgcgtgtatcggctgcacagcatgtacggaagcatgtagagaagtaaaccgtgttcctgaaggggtaacacgtttagaaatcatccgtagtgagcccaaaggtgagtttcctgatgttgaataccgttttactcgtaagtcatgtcaacattgtgaaaatgctccttgtgtaatggtgtgtcctaccggtgcggcatataaagatgaaacaacaggaattgttgatgttcataacgaaaaatgtgttggctgtggctattgtttggcagcttgtccgtatcaagttcgtttctttaatcctgtgactaaatcggcagataagtgtgatttttgccgtgaaacaaacttagcagaaggtaagcaaccggcttgtgttgaatcttgtccgacaaaagcactgacctttggtgatttaaacgataaagatagcgagattaatgcggtattgaatagtaacccagtataccgtgacaaagtggatctaggtaccaagcctaaattgtataagattccatatttaaaaggggagatttaa

SEQ ID NO: 67718 - protein, 228 aa, Vibrio fischeri ES114
MSCSRRNFLAGSGAVIFTTGVATTSLINSKKTLAYSMEDGSKRYGMVHDENACIGCTACTEACREVNRVPEGVTRLEIIRSEPKGEFPDVEYRFTRKSCQHCENAPCVMVCPTGAAYKDETTGIVDVHNEKCVGCGYCLAACPYQVRFFNPVTKSADKCDFCRETNLAEGKQPACVESCPTKALTFGDLNDKDSEINAVLNSNPVYRDKVDLGTKPKLYKIPYLKGEI

SEQ ID NO: 67719 - DNA, 618 bp, Salmonella enterica subsp. enterica serovar Choleraesuis str
  CDS (1)..(618): transl_table=11
atgacaacccagtatggattttttattgattccagccgttgcaccggttgcaaaacctgcgaactggcctgcaaggactacaaagatttgaccccggatgtcagcttccgtcgcatttatgagtatgcaggtggcgactggcaggaggataacggcgtctggcaccagaacgtctttgcctactatctctccatctcctgtaaccactgcgaagacccggcctgcaccaaagtctgcccgagcggcgcgatgcacaagcgcgatgacggttttgtggtggtgaacgaagaggtctgtatcggttgccgctactgccacatggcctgcccgtacggcgcgccgcagtacaacgcggccaaaggtcatatgaccaagtgcgatggctgttatgaccgggtggcggaaggtaagaaaccgatctgcgtcgaatcctgtccgctgcgggcgctggatttcggcccgatagacgaactgcgcaaaatacacggtgagctggctgccgtcgcgccgttgccgcgcgcgcatttcacgaagccgaatattgtgattaaacccaacgccaacagccgcccgaccggggacaccaccggttatctggccaatccgaaggaggtataa

SEQ ID NO: 67720 - protein, 205 aa, Salmonella enterica subsp. enterica serovar Choleraesuis str
MTTQYGFFIDSSRCTGCKTCELACKDYKDLTPDVSFRRIYEYAGGDWQEDNGVWHQNVFAYYLSISCNHCEDPACTKVCPSGAMHKRDDGFVVVNEEVCIGCRYCHMACPYGAPQYNAAKGHMTKCDGCYDRVAEGKKPICVESCPLRALDFGPIDELRKIHGELAAVAPLPRAHFTKPNIVIKPNANSRPTGDTTGYLANPKEV

SEQ ID NO: 67721 - DNA, 735 bp, Salmonella enterica subsp. enterica serovar Choleraesuis str
  CDS (1)..(735): transl_table=11
atggacagcagtaaacggcaatttctccagcagcttggcgtcctgaccgctggcgcctcgctggttccgctggctgaagcgaaatttcctttttcgccggagcggcatgaaggctctccccgacaccgttacgccatgcttatcgacctgcggcgttgtatcggctgtcagtcctgtaccgtaagttgcactattgaaaaccaaacgccgcaaggcgcgtttcgtacgacggtgaaccaataccaggtccagcgtgaaggtagtcaggaagtcacgaatgtgctgttgccgcgtctgtgcaaccattgcgataaccccccctgtgtgccggtctgcccggtacaagccacctttcagcgggaagatggcattgtggtggtggataacaaacgctgcgtcggctgcgcctattgtgtacaggcgtgtccttacgacgcccgatttatcaatcatgaaacgcaaactgccgataaatgcacgttttgcgtccatcgtctggaagccgggctgttacccgcttgcgtagagtcctgcgtcggcggcgcgcgtattattggcgatatcaaagatccccatagccgcatcgccaccatgcttcatcagcatcgcgacgctatcaaggtattaaagccggaaaacggcacgtcgccccatgttttctacctgggtctggacgacgcctttgtcaccccattaatgggccgtgcgcagcccgcgctttggcaggaggtctga

SEQ ID NO: 67722 - protein, 244 aa, Salmonella enterica subsp. enterica serovar Choleraesuis str
MDSSKRQFLQQLGVLTAGASLVPLAEAKFPFSPERHEGSPRHRYAMLIDLRRCIGCQSCTVSCTIENQTPQGAFRTTVNQYQVQREGSQEVTNVLLPRLCNHCDNPPCVPVCPVQATFQREDGIVVVDNKRCVGCAYCVQACPYDARFINHETQTADKCTFCVHRLEAGLLPACVESCVGGARIIGDIKDPHSRIATMLHQHRDAIKVLKPENGTSPHVFYLGLDDAFVTPLMGRAQPALWQEV

SEQ ID NO: 67723 - DNA, 579 bp, Salmonella enterica subsp. enterica serovar Choleraesuis str
  CDS (1)..(579): transl_table=11
atgaatcatttaacgaatcagtacgtcatgctgcatgatgaaaaacgttgtatcggctgccaggcgtgtaccgttgcctgcaaagtgcttaatgacgtaccggagggatttagccgcgtacaggtacaaattcgcgcccctgaacaggcatccaacgcactaacccattttcaatttgtccgcgtctcctgtcagcactgtgaaaatgcgccatgtgtcagcgtttgtcctaccggagcgtcatatcgtgatgaaaacgggatcgtgcaggtggataaatcgcgctgtattggctgcgattattgtgttgccgcgtgtcctttccatgtgcgctatttgaatccgcaaaccggcgtcgccgacaagtgtaacttctgtgccgacacgcggttggcggctggccagtctccggcgtgcgtatccgtttgcccaacggacgcgctgaaattcggcagactggatgagagcgagatccagcgctgggtcggtcagaaagaggtctatcgccagcaggaagcgcgtagcggcgcggtcagtctgtaccgtcgtaaagaaatccatcaggagggtaaagcatga

SEQ ID NO: 67724 - protein, 192 aa, Salmonella enterica subsp. enterica serovar Choleraesuis str
MNHLTNQYVMLHDEKRCIGCQACTVACKVLNDVPEGFSRVQVQIRAPEQASNALTHFQFVRVSCQHCENAPCVSVCPTGASYRDENGIVQVDKSRCIGCDYCVAACPFHVRYLNPQTGVADKCNFCADTRLAAGQSPACVSVCPTDALKFGRLDESEIQRWVGQKEVYRQQEARSGAVSLYRRKEIHQEGKA

SEQ ID NO: 67725 - DNA, 630 bp, Salmonella enterica subsp. enterica serovar Choleraesuis str
  CDS (1)..(630): transl_table=11
atgagtcagtttacacattacccgccggtgagcgataaacaactgggatttttcatcgactcctcacgctgctccggttgtaaagcctgccaggtggcctgcaaagacaaaaacaatctggaagtaggccgtcgtttcctccgcgtctatgaagtcaagggcggaagtttcatcccgaccgggcagggtggggtcagcaataacgtatttgcttatacgctttccatttcctgcaaccactgtgcggaccctgtctgcaccaaaaattgcccgactaccgctatgcataaacgcccgggtgacggcattgtgcgcgttgataccgacaaatgcgtcggctgtggctattgcgcctggtcctgcccttatggcgcgccgcagcttaacgagcagaccggccaaatgtctaagtgcgacatgtgcgttgatttactggcgaaaggtgaaccgcccgtctgtgttgcgacctgtccgctggaggccatcaagtttggtccgattgatgaactgcgcgcgaagtacggtagcgtatgcgacgttaacgggctgccagattcatccataaccaaacctaatctggttgttaaagcgcatcagggcgcagaaaaagagggtaaacgccatgcatga

SEQ ID NO: 67726 - protein, 209 aa, Salmonella enterica subsp. enterica serovar Choleraesuis str
MSQFTHYPPVSDKQLGFFIDSSRCSGCKACQVACKDKNNLEVGRRFLRVYEVKGGSFIPTGQGGVSNNVFAYTLSISCNHCADPVCTKNCPTTAMHKRPGDGIVRVDTDKCVGCGYCAWSCPYGAPQLNEQTGQMSKCDMCVDLLAKGEPPVCVATCPLEAIKFGPIDELRAKYGSVCDVNGLPDSSITKPNLVVKAHQGAEKEGKRHA

SEQ ID NO: 67727 - DNA, 903 bp, Salmonella enterica subsp. enterica serovar Choleraesuis str
  CDS (1)..(903): transl_table=11
atggcttatcaatcgcaagacatcattcgtcgttccgccactaacggtttcacccccgcgccccaggcgcgggaccaccaggaagaggtggcgaaactcatcgacgtcaccacctgtatcggctgtaaagcgtgtcaggtggcgtgctccgagtggaacgacatccgtgatgaagtgggcaataacgtcggggtgtatgacaacccggcggacttaaccgcgaaatcctggacggtgatgcgcttctcggaagtggaacagaacgacaaactggagtggctgatccgtaaggatggctgtatgcactgcgccgatccaggctgcctgaaggcctgtccggcggaaggggcgatcattcagtacgctaacggtattgtcgacttccagtccgagcagtgtatcggctgcggctactgtatcgctggctgcccgttcaacgtgccgcgcctcaacccggaagacaaccgcgtctataaatgtacgctgtgcgttgaccgtgtggtggtcggccaggaaccggcctgcgtgaagacctgtccaaccggcgccattcattttggctcgaaagaggatatgaaaacgctggcgggcgagcgggtggcggaactaaaaacccgtggttatgacaacgcgggtctgtacgatccggcgggcgtaggcggtacgcatgtcatgtacgtgctgcatcatgccgacaagccgaatctgtatcacggtctgccggagaacccggaaatcagcgaaaccgttaagttctggaaaggcgtctggaaaccgctcgccgcgttcggttttgccgcgacctttgccgccagcgtcttccactatgtcggcgtcggcccgagccgcgcggaagaggaagatgacaacctgcatgaagagaaagacgaggtgcgcaaatga

SEQ ID NO: 67728 - protein, 300 aa, Salmonella enterica subsp. enterica serovar Choleraesuis str
MAYQSQDIIRRSATNGFTPAPQARDHQEEVAKLIDVTTCIGCKACQVACSEWNDIRDEVGNNVGVYDNPADLTAKSWTVMRFSEVEQNDKLEWLIRKDGCMHCADPGCLKACPAEGAIIQYANGIVDFQSEQCIGCGYCIAGCPFNVPRLNPEDNRVYKCTLCVDRVVVGQEPACVKTCPTGAIHFGSKEDMKTLAGERVAELKTRGYDNAGLYDPAGVGGTHVMYVLHHADKPNLYHGLPENPEISETVKFWKGVWKPLAAFGFAATFAASVFHYVGVGPSRAEEEDDNLHEEKDEVRK

SEQ ID NO: 67729 - DNA, 672 bp, Salmonella enterica subsp. enterica serovar Choleraesuis str
  CDS (1)..(672): transl_table=11
atgagttgcacccgacgtcaatttattacccgcgtcggcgcgctggcggcggtcagtgggatggcaggacgcgttgtagcgaacacgttgaatattaacggcgtgcgttatggcatggtacacgatgagtcattatgcatcggctgcacggcctgcatggatgcctgtcgggaagtcaacaacgtgccggaaggcgtatcgcgcctgacgattattcgcagcgagccgcaggggacgtttcctgatgtgaaatatcgcttcttccgccactcgtgccagcattgcgaccatgccccctgcgttgacgtctgcccgacgggggcatcattccgcgatgccgccagtggtattgtcgacgtgaacccggacctttgcgtcggctgtcagtactgcattgccgcgtgtccctaccgcgtgcgctttatccatccggtcagtaagacggcggataagtgcgatttctgccggaaaatcaacctgaaagcgggcaaacagcccgcctgcgttgagtcatgtccaacgaaggcgctgacgtttggtaatctggacgatcccaacagcgatatctcccgtttgttgcggcaaaaaaccacctatcgttacaagctggcgctgggcacaaaaccgaaggtctaccgcgttccctttaactatggggaggtgagccaatga

SEQ ID NO: 67730 - protein, 223 aa, Salmonella enterica subsp. enterica serovar Choleraesuis str
MSCTRRQFITRVGALAAVSGMAGRVVANTLNINGVRYGMVHDESLCIGCTACMDACREVNNVPEGVSRLTIIRSEPQGTFPDVKYRFFRHSCQHCDHAPCVDVCPTGASFRDAASGIVDVNPDLCVGCQYCIAACPYRVRFIHPVSKTADKCDFCRKINLKAGKQPACVESCPTKALTFGNLDDPNSDISRLLRQKTTYRYKLALGTKPKVYRVPFNYGEVSQ

SEQ ID NO: 67731 - DNA, 939 bp, Haemophilus influenzae 86-028NP
  CDS (1)..(939): transl_table=11
atggctggaactgctcaaggcgttcaaacgcaagacgttattaaaatctccgcaacatctggtttaacaccagcaccacaagcgagagatcataaagttgaagtcgcaaaattaattgatgtttcaacttgtataggatgtaaagcctgtcaagtgggttgttcagagtggaatgatattcgctctgatatcaatgcacaatgtgttggggtttatgacaatccagttgatcttgatgcaaaagcatggacggtgatgcgttttaacgaagttgaagaaaacgatcgtttagaatggctgattcgtaaagatggctgtatgcactgcacagaacctggttgtttaaaggcttgtcctgcacccggtgcaatcattcaatatgctaacggtattgtagatttccaatccgataaatgtattggttgtggttattgtattgcaggctgtccattcaatattccacgaatgaatcctgaagacaatcgtgtatacaaatgtactctttgtgtggatcgtgtttctgtgggacaagagccagcttgcgtgaaaacctgtccaacaggtgctattcgtttcggctctaaagaagaaatgaaaatttacgcagaacaacgcgtggcagatttaaaatcccgtggttatgaaaacgcaggactttacgatcctccaggtgtaggcggtacacacgtaatgtatgtgttgcatcacgcagataaacctgagctttacaatggtcttccaaaagatcctcaaattgatttgagtgtgaccttatggaaagatgtattgaaaccagtcgctgcagttgcaatgggtggtctagctctagcagaagttgcgcactacttaaccgttggcccaaatgtagaagaagatgtggaagatcatcatcacgaatttgaagaaaataaaccatccaagggggaaaataatgagtaa

SEQ ID NO: 67732 - protein, 312 aa, Haemophilus influenzae 86-028NP
MAGTAQGVQTQDVIKISATSGLTPAPQARDHKVEVAKLIDVSTCIGCKACQVGCSEWNDIRSDINAQCVGVYDNPVDLDAKAWTVMRFNEVEENDRLEWLIRKDGCMHCTEPGCLKACPAPGAIIQYANGIVDFQSDKCIGCGYCIAGCPFNIPRMNPEDNRVYKCTLCVDRVSVGQEPACVKTCPTGAIRFGSKEEMKIYAEQRVADLKSRGYENAGLYDPPGVGGTHVMYVLHHADKPELYNGLPKDPQIDLSVTLWKDVLKPVAAVAMGGLALAEVAHYLTVGPNVEEDVEDHHHEFEENKPSKGENNE

SEQ ID NO: 67733 - DNA, 618 bp, Haemophilus influenzae 86-028NP
  CDS (1)..(618): transl_table=11
atggaacaatatggtttttattttgattctgaacgctgcacaggctgtaaaacttgtgaattagcctgtaaggattacaaagatcttggcacagaagtcaattttcgtcgtatttatgaatatacaggtggtcagtggaatcaacaagcagatggatgctggcatcaaaatatatttgcttattatatgtctatttcttgtaatcattgtgcagatcctgcttgtacaaaagtttgcccaactggtgcaatgcacaaaaatgcagatggtttcgtgatcgtcaatgaagaaatttgtatcggttgtcgttattgccatatggcatgtccttatgatgcaccgcaatatgatgcacaaaaaggtcatatgacaaaatgtgatggatgttattctcgcgtaaaatcaggtcaaaaaccgatttgtgctgatgcctgcccactacgagcattggatttcgctcctattgatgaacttcgagcaaaatacggcactcaagcctccatcgcaccactaccaccggctgatatcactcaaccaaatttagttgtaaaacccaataaacacgctcgtttaagtggcgatacaagtgggttcttaggaaacccaagagaggtgtaa

SEQ ID NO: 67734 - protein, 205 aa, Haemophilus influenzae 86-028NP
MEQYGFYFDSERCTGCKTCELACKDYKDLGTEVNFRRIYEYTGGQWNQQADGCWHQNIFAYYMSISCNHCADPACTKVCPTGAMHKNADGFVIVNEEICIGCRYCHMACPYDAPQYDAQKGHMTKCDGCYSRVKSGQKPICADACPLRALDFAPIDELRAKYGTQASIAPLPPADITQPNLVVKPNKHARLSGDTSGFLGNPREV

SEQ ID NO: 67735 - DNA, 678 bp, Haemophilus influenzae 86-028NP
  CDS (1)..(678): transl_table=11
atgacagtctgctcacgccgaaactttgtttctggcatgggggcagtgatccttatgacgggaacatctttaccttcttttgcaaaagaagacaaggcggataaacctaaacgttacgcaatgatacatgatgaaaatgcgtgtatcggttgtacagcctgtatggactcatgtcgtgatgtaaaccaagtgccagaaggcgtttctcgcttagagattctacgtagtgaaccttatggggaatttccaaatcaagaatacgagttctttcgtcaatcttgccaacattgtacaaatgcaccttgtgtagcagtttgtccaactggtgcatcttttattgataaagagactggcattgtagatgtacataaagatttatgcgtaggctgccaatactgtatagcagtttgcccatatcgtgtacgttttattcatccagtacatcgtaccgcagataaatgtaacttctgccgcgatacaaatttagccaatggtaaacaacctgcttgcgtagaggcttgcccaaccaaagcattaacctttggggatatgaatgatccaacaagtgcagtttcacgtaaagtgaaagaaaaaccggtttatcgcactaaagtggaattaggtacacaaccaaacttatatcacattccattccaacatggggagcctagaagatga

SEQ ID NO: 67736 - protein, 225 aa, Haemophilus influenzae 86-028NP
MTVCSRRNFVSGMGAVILMTGTSLPSFAKEDKADKPKRYAMIHDENACIGCTACMDSCRDVNQVPEGVSRLEILRSEPYGEFPNQEYEFFRQSCQHCTNAPCVAVCPTGASFIDKETGIVDVHKDLCVGCQYCIAVCPYRVRFIHPVHRTADKCNFCRDTNLANGKQPACVEACPTKALTFGDMNDPTSAVSRKVKEKPVYRTKVELGTQPNLYHIPFQHGEPRR

SEQ ID NO: 67737 - DNA, 834 bp, Sulfolobus acidocaldarius DSM 639
  CDS (1)..(834): transl_table=11
atgtcctccacaaatagtactcaaccccaacaaataaccctagacatgtatcaaaacggagttgaatataggttaccgtttaaaccatctaagaactttgcaataataacggatttaaataagtgctttggctgtgcaggttgccagatgtcatgtaaagagtggaacacatcaggtatgttcggaccattacctgaccttaacccttacggagacctagacgtaatgttctggctgagagtgctaaacgttgaagtggggaattggccccaaactaaggtttataatataccaataaactgcttccactgtatgaatgccccttgtgtaccagtatgtccagtgggggcaactttcaagagagttgaagacggtatagtccttgtcgactataacaaatgcataggttgtaaatactgcatttatggctgcccctatggtaacaggttctttgatccagttcaaggagttgtgaaaaagtgtacccattgttttgatagactatacgatacaaccataccaccagaggagagaattccagcatgtattcacggatgcatggttcaggctagaatctgggcaaatatattggatcctacagatccaggaactatactgtttgtggataaaggtggatttgtgatgggacctgagactggagcaaatcctgccagcggttacttaccatggagaagtgattatgcagggaatgaggatgtagagttactatcccaagaagagtacttcaacgtctggactgcaacaggtgtggttcaattagggtcacagggaaccaacagtacaacaactcaaagcaataactccagtagttaa

SEQ ID NO: 67738 - protein, 277 aa, Sulfolobus acidocaldarius DSM 639
MSSTNSTQPQQITLDMYQNGVEYRLPFKPSKNFAIITDLNKCFGCAGCQMSCKEWNTSGMFGPLPDLNPYGDLDVMFWLRVLNVEVGNWPQTKVYNIPINCFHCMNAPCVPVCPVGATFKRVEDGIVLVDYNKCIGCKYCIYGCPYGNRFFDPVQGVVKKCTHCFDRLYDTTIPPEERIPACIHGCMVQARIWANILDPTDPGTILFVDKGGFVMGPETGANPASGYLPWRSDYAGNEDVELLSQEEYFNVWTATGVVQLGSQGTNSTTTQSNNSSS

SEQ ID NO: 67739 - DNA, 696 bp, Dechloromonas aromatica RCB
  CDS (1)..(696): transl_table=11
atgagtgaaggatcaaaagtttcaacaggtgggggcaagaagcgctatgcgatggtggtcgatacccgccgctgcatcggttgcatggcttgtcaggtcgcctgcaaggcggagtacgacaccccgctgggtgtcaatcggacctgggtgccgtacaaggtggtcggcaagtaccccaacgtcaaaaagcagttcctgccccgtttgtgcaaccactgcgaggatcctccgtgcgtgcgcaattgcccggtcgaggccacctttgtggttgaggatggcggctttgttcttcagcgctacgagcgttgcatagggtgccgtagctgcatggcagcctgcccgtacaacgcccgtttcatgctgccgtcacatcggacctacacgccgatcaccaacgtcgtcgacaagtgcaccttctgtttccaccgcgtcacccagaatctggtgcccgcctgcgtccagacctgcatcggccgctcccgcgtcttcggcgatctcaacgatccgaacagcgaggtttcctacctggtggcaaagaacgcgacccaggtactgcgcccggaagaaggcaccaagccgcacgtgttctacatcggggcagaccgcaacgccaccgagttcggtcgcgacgcctaccaaaagcgcgaagtgatggagccggaacgctccgccttcaagaaccacttcaagatctaa

SEQ ID NO: 67740 - protein, 231 aa, Dechloromonas aromatica RCB
MSEGSKVSTGGGKKRYAMVVDTRRCIGCMACQVACKAEYDTPLGVNRTWVPYKVVGKYPNVKKQFLPRLCNHCEDPPCVRNCPVEATFVVEDGGFVLQRYERCIGCRSCMAACPYNARFMLPSHRTYTPITNVVDKCTFCFHRVTQNLVPACVQTCIGRSRVFGDLNDPNSEVSYLVAKNATQVLRPEEGTKPHVFYIGADRNATEFGRDAYQKREVMEPERSAFKNHFKI

SEQ ID NO: 67741 - DNA, 1056 bp, Dechloromonas aromatica RCB
  CDS (1)..(1056): transl_table=11
atgaccacaagacgtgattttttgcgtggttgcctggccagcggcgcagcggcggcttcggccgttctgcccgagacagcctgcgcccgcgataccctgaaacgcccgccggaaggccttggtctgctctacgacgcgaccctgtgcgtcggctgccaggcctgcgtggctgcctgcaagcaggtcaatgaaaacccggccgaattcacggccatggacaagttgtgggatacgccgctcgatacgaccggccacaccttcaacctgatcaagatgtaccgcaacggtacgatggaaaccaaggacagcgagctgaacggcttctccttcatgaagacctcgtgcatgcattgcgccgacccgtcctgcgtctcggcctgcccggtgtcggcgatgaccaagaatcttgaaaccggcatcgtcggctacgacccggacgcctgtatcggctgccgttactgcgtcgccgcctgcccgttcggtattccgaaataccagtacgactcgccgaccggcaagatcggcaagtgcgagctgtgccggcatcgccacaaggacggccattactcggcctgcgccgaggtttgtccgaccggcgcgaccttgtttggtcggaccgaggacctgctggccgaagccaagcgtcgtctggccctgaagccgggtgaatggacgacgattccgcgcggccgcctgcgccccgcccaggagaaggtgctggctggcggcgaggatggcaagggccagaagcatcgtcatggctggcgcgacgaaccggaccagagctatcaggcccaagtcggtaactacctgcagcacgtctatggcgagaccgaatacggcggcacgcaggtactcaagctgtcggccgtcaatttccagaaagtcggcctgcccgacctgccgccgaaatcctcggccgccacctcggaaaccatccagcacacgctgtacggcggactgatcatgccgattgccgtacttgccggcctgacctgggttgccaagcgcaatgtcgtgccggaagacgatgaccagaagggaggcaagtcatga

SEQ ID NO: 67742 - protein, 351 aa, Dechloromonas aromatica RCB
MTTRRDFLRGCLASGAAAASAVLPETACARDTLKRPPEGLGLLYDATLCVGCQACVAACKQVNENPAEFTAMDKLWDTPLDTTGHTFNLIKMYRNGTMETKDSELNGFSFMKTSCMHCADPSCVSACPVSAMTKNLETGIVGYDPDACIGCRYCVAACPFGIPKYQYDSPTGKIGKCELCRHRHKDGHYSACAEVCPTGATLFGRTEDLLAEAKRRLALKPGEWTTIPRGRLRPAQEKVLAGGEDGKGQKHRHGWRDEPDQSYQAQVGNYLQHVYGETEYGGTQVLKLSAVNFQKVGLPDLPPKSSAATSETIQHTLYGGLIMPIAVLAGLTWVAKRNVVPEDDDQKGGKS

SEQ ID NO: 67743 - DNA, 714 bp, Ralstonia eutropha JMP134
  CDS (1)..(714): transl_table=11
atggcccgcatgaaatttatctgtgacgccgagcgctgcatcgaatgcaacagctgcgtcaccgcctgcaagaacgagcatgaggtgccatggggcgtgaaccggcgccgcgtggtcactgtcaacgacggcgtggtcggcgccgagaaatcgatctcggtcgcctgcatgcactgttcggacgcgccgtgcatggcggtctgcccggtcgactgcttctaccgcaccgaagacggcgtggtgctgcacgacaaggatgtgtgcatcggctgcggctactgctcgtacgcatgcccgttcggtgcgccgcagttcccgtccacgggcaccttcggcgtgcgcggcaagatggataaatgcacattctgcgcgggtgggcccgagaagaacggctcggaggccgagttcgagaagtacggccgcaaccgcctggccgaaggcaagctgccgctgtgcgcggaaatgtgctcgaccaaggcgctgctcggcggcgatggcgacgtgattgccgacatcctgcgcaatcgagtgatcaagcgcggcaaagggggcgatgtgttcggctggggtaccgcatacggcacgaagggcggtgcgcaacaggcgccggccgcgcccgctgcacctgccgctcccgcaccgggtaatgcgagcggaagcgcgaacgggagcgcaaccgggagcgcaaccgcgaatggggggcaaccatcatga

SEQ ID NO: 67744 - protein, 237 aa, Ralstonia eutropha JMP134
MARMKFICDAERCIECNSCVTACKNEHEVPWGVNRRRVVTVNDGVVGAEKSISVACMHCSDAPCMAVCPVDCFYRTEDGVVLHDKDVCIGCGYCSYACPFGAPQFPSTGTFGVRGKMDKCTFCAGGPEKNGSEAEFEKYGRNRLAEGKLPLCAEMCSTKALLGGDGDVIADILRNRVIKRGKGGDVFGWGTAYGTKGGAQQAPAAPAAPAAPAPGNASGSANGSATGSATANGGQPS

SEQ ID NO: 67745 - DNA, 804 bp, Dehalococcoides sp. CBDB1
  CDS (1)..(804): transl_table=11
atgcctaatggaatgctgattgataccactagatgtactggttgtcgaggctgccaggtggcctgtaagcagtggaatgaaaatcctgctgtcaagacaactttcagtcctgaagtgaccaatcccttggaacaaaacgcattcaactacaacctgctggagtgcagggaaattgaagaagatggaaaacttcaatggatcttcgctcataagagatgtttgcactgctatgaaccggcctgtgtttcggtatgtccggtcggtgccctccacaaacggcctaacggcgcagtagtctgggatcaggataaatgcttcggctgccgttattgtcagaacgcctgcccctttgaaatccccaagtttgagtgggatgacaactgggctaaaatcaccaaatgcaccatgtgctggaacagggtagacgaaggtatggaaccggcttgtgccgctacctgccccaccggcgctatcaaatttggcgaacgggctgacctgctggcagaggcctatgaaagactttcaaacaaccctgacaaatactacccctatgtttacggtgaaaaagaagctggcggtactcatgttttgtacctaagcagcgttcaccctgaaaagcttggctttgacatgcacgagcatgagttcttccccagctttaccagagaattccttggcaatatacccttggaaatctctatagtagcttcgctgatggttggtgtatggtacttccgcggccgcagaattcaggcacaggcacacgatgctgagcatgctgaaaacaaggctggcaagcactag

SEQ ID NO: 67746 - protein, 267 aa, Dehalococcoides sp. CBDB1
MPNGMLIDTTRCTGCRGCQVACKQWNENPAVKTTFSPEVTNPLEQNAFNYNLLECREIEEDGKLQWIFAHKRCLHCYEPACVSVCPVGALHKRPNGAVVWDQDKCFGCRYCQNACPFEIPKFEWDDNWAKITKCTMCWNRVDEGMEPACAATCPTGAIKFGERADLLAEAYERLSNNPDKYYPYVYGEKEAGGTHVLYLSSVHPEKLGFDMHEHEFFPSFTREFLGNIPLEISIVASLMVGVWYFRGRRIQAQAHDAEHAENKAGKH

SEQ ID NO: 67747 - DNA, 432 bp, Dehalococcoides sp. CBDB1
  CDS (1)..(432): transl_table=11
atgaaaagggtacagattaaagaagaactgtgtatgggctgcggcctgtgtcgcgtagcctgccagaccgaacactcggtctctcatgacgttattaaggccgtcaaaaaggaaaatcagaagcccagaatacgggtggaacgcaagggagagataagtttctctgtaccctgccgccactgtgacgaaccatggtgcgcttattcctgtatcagcggtgctatgacccgtgaccccataactggaattgtttccagtgatcctgaaagatgtatcggctgttggacatgcattgtggcctgcccgaacagcgcccttataaaagacaaggcaaaccatgtgattctcaagtgcgatctgtgcggcggtaaagaaatacctgcctgcgtggctaactgcccgaatgaagccttggaactgattgacggctaa

SEQ ID NO: 67748 - protein, 143 aa, Dehalococcoides sp. CBDB1
MKRVQIKEELCMGCGLCRVACQTEHSVSHDVIKAVKKENQKPRIRVERKGEISFSVPCRHCDEPWCAYSCISGAMTRDPITGIVSSDPERCIGCWTCIVACPNSALIKDKANHVILKCDLCGGKEIPACVANCPNEALELIDG

SEQ ID NO: 67749 - DNA, 618 bp, Shigella sonnei Ss046
  CDS (1)..(618): transl_table=11
atgacaacccagtatggattttttattgattccagccgttgcaccggttgcaaaacctgcgagctggcttgtaaagactacaaagatttgacgccagaagtcagcttccgccgcatttatgaatatgctggcggcgactggcaggaagataacggtgtctggcaccagaacgtgtttgcctactatctgtcgatttcgtgcaaccactgcgaagatccggcttgtactaaagtctgcccgagcggtgcgatgcataaacgtgaagatggttttgttgtggtcgatgaagatgtgtgcattggctgccgctactgccatatggcttgcccgtatggcgcaccgcaatataacgaaacgaaaggccatatgaccaaatgcgatggttgttatgaccgtgttgcggagggtaaaaagccgatctgtgttgaatcttgtccgctgcgggcgctggatttcggccctatcgacgagctgcgtaaaaaacatggcgatctggcggccgttgcgccgttgccgcgagctcactttaccaaaccgaatattgtgatcaaacccaatgccaatagccgcccgaccggggataccactggctatctggcaaacccgaaggaggtgtga

SEQ ID NO: 67750 - protein, 205 aa, Shigella sonnei Ss046
MTTQYGFFIDSSRCTGCKTCELACKDYKDLTPEVSFRRIYEYAGGDWQEDNGVWHQNVFAYYLSISCNHCEDPACTKVCPSGAMHKREDGFVVVDEDVCIGCRYCHMACPYGAPQYNETKGHMTKCDGCYDRVAEGKKPICVESCPLRALDFGPIDELRKKHGDLAAVAPLPRAHFTKPNIVIKPNANSRPTGDTTGYLANPKEV

SEQ ID NO: 67751 - DNA, 720 bp, Shigella sonnei Ss046
  CDS (1)..(720): transl_table=11
atgtcatggatagggtggacagttgcagccactgcattaggggataatcagatgtccttcactcgacgcaaatttgttctggggatgggaacagtaatcttttttactggttctgcgtcttctctgttagcgaacacgaggcaagaaaaggaagttcggtatgccatgattcatgacgagtcacggtgcaatggctgtaatatttgcgcccgcgcatgccgtaaaactaaccacgtccccgctcagggaagccgtttatcgatagcacacattccagtcaccgataacgacaacgaaacgcagtatcacttttttcgccagtcatgtcagcactgcgaagatgctccgtgcatcgacgtatgcccgacaggggcgtcgtggcgtgatgagcaggggatcgtgcgggtagaaaaatcgcagtgcatcggctgcagttattgcattggcgcttgtccgtaccaggttcgctaccttaaccctgtcactaaagtggcagataaatgtgatttctgcgctgagtcccgactggcaaaaggctttccgcccatttgcgtcagcgcctgtccggaacacgcattgatctttggtcgcgaagatagcccagaaattcaggcgtggttgcaggaaaataaatactatcaatatcagctacttggtgccgggaaaccgcatctgtatcgccggttcggtcaacatttgattaaaaaggaaaatgtatga

SEQ ID NO: 67752 - protein, 239 aa, Shigella sonnei Ss046
MSWIGWTVAATALGDNQMSFTRRKFVLGMGTVIFFTGSASSLLANTRQEKEVRYAMIHDESRCNGCNICARACRKTNHVPAQGSRLSIAHIPVTDNDNETQYHFFRQSCQHCEDAPCIDVCPTGASWRDEQGIVRVEKSQCIGCSYCIGACPYQVRYLNPVTKVADKCDFCAESRLAKGFPPICVSACPEHALIFGREDSPEIQAWLQENKYYQYQLLGAGKPHLYRRFGQHLIKKENV

SEQ ID NO: 67753 - DNA, 618 bp, Shigella sonnei Ss046
  CDS (1)..(618): transl_table=11
gtgaccacacaatatggattttttatcgattccagccgctgtactggctgtaaaacctgcgaactggcgtgcaaagattttaaagatcttggcccggaagtcagtttccgccgtatttatgaatatgctggcggcgactggcaggaagataatggcgtctggcaccagaacgtgttcgcttattatctctccatctcctgtaaccattgcgatgaccccgcatgtacaaaagtctgccccagcggcgcaatgcataagcgtgaagatggctttgtggtggttgatgaagatgtttgtatcggctgccgctactgccacatggcttgtccgtacggcgcgccacagtacaatgctgaaaaagggcacatgacgaagtgcgatggttgttattcgcgcgtcgccgaggggaaacaacccatatgtgtcgaatcctgcccgctgcgtgcacttgagttcggtccaattgaagagctgcgccagaagcacggcactctggctgccgtcgcgccactgccgcgcgcgcatttcacaaaacccaatatcgttatcaaacctaacgccaacagccgcccgaccagcgataccactggttatctggctaatccggaggaagtgtaa

SEQ ID NO: 67754 - protein, 205 aa, Shigella sonnei Ss046
MTTQYGFFIDSSRCTGCKTCELACKDFKDLGPEVSFRRIYEYAGGDWQEDNGVWHQNVFAYYLSISCNHCDDPACTKVCPSGAMHKREDGFVVVDEDVCIGCRYCHMACPYGAPQYNAEKGHMTKCDGCYSRVAEGKQPICVESCPLRALEFGPIEELRQKHGTLAAVAPLPRAHFTKPNIVIKPNANSRPTSDTTGYLANPEEV

SEQ ID NO: 67755 - DNA, 696 bp, Thiobacillus denitrificans ATCC 25259
  CDS (1)..(696): transl_table=11
atgagacttggattggtcatcgaccttgacgtgtgcgtgggctgtcatgcctgcgccatcgcctgcaaggagtggaacgcctccggcaccatcggcccgttgtcggattaccagccctacggcgccgagccgtcgggcgtctggttcaaccggatccgccattacgagatggacgagtatccgaacaacaagaccgtcaacttcccgatgtcgtgcatgcactgcgaggacgccgactgcgtcacggtgtgcccgaccggcgcgtcgtacaagcgtgccgaggacggcatcgtgctgatcgaccaggataagtgcatgggctgcaactactgctcctgggcctgcccctacggcgcgcgcgaactcgaccgatcgagcggcacgatgaagaaatgcacgctgtgcgtcgaccgtatctacgacgagaacctgccggtcgaggagcgccaaccctcgtgcgtgctgacctgcccggcgcacgcgcgcatgttcggcgacttcgacgatcccgattcggcggtgtcgcgcgtggtgcgcgagcgcggcgggtatccgctgatgcccgagctcaactacaacccgacgaacacctatctgccgatccgtcgcaagccggtgatcggggtggaaaccaaaccgaagggcggcttgaaggaaagcatcaagcagttcgccaacaggctggtgcgccgttga

SEQ ID NO: 67756 - protein, 231 aa, Thiobacillus denitrificans ATCC 25259
MRLGLVIDLDVCVGCHACAIACKEWNASGTIGPLSDYQPYGAEPSGVWFNRIRHYEMDEYPNNKTVNFPMSCMHCEDADCVTVCPTGASYKRAEDGIVLIDQDKCMGCNYCSWACPYGARELDRSSGTMKKCTLCVDRIYDENLPVEERQPSCVLTCPAHARMFGDFDDPDSAVSRVVRERGGYPLMPELNYNPTNTYLPIRRKPVIGVETKPKGGLKESIKQFANRLVRR

SEQ ID NO: 67757 - DNA, 738 bp, Thiobacillus denitrificans ATCC 25259
  CDS (1)..(738): transl_table=11
atgtccgacaacccttccccctcccgccgcgccttcctgcaggcgatcccggcgatcaccgcgggtctcgcgctgccggcgaccgcacgcgcggcgccccacaaacaccactgggcgatgctggtcgacgtccgcaagtgtatcggctgtcaggcctgcaccgtcgcgtgcatcatggaaaacgcgctaccggaaaacagtttccgcacgctcgcctccacctacgtcgtgcagcaggagaccgagggccggaccacggccggcacctacatgctgccgcgcctgtgcaaccactgcgagaatccgccctgcgtgccggtctgcccggtcggcgcgacgttcaagcgtgacgacggcatcgtcgtcgtcgacggcgaccgctgcgtcggctgcgcctactgcgtccaggcctgcccctacgacgcgcgcttcatcaaccacgaaacgaacaaggccgacaagtgcaccttctgtgcgcaccgggtcgacgcgggcctgctgccggcctgcgtcgaaacctgcgtcggcggcgcccgcgtcttcggcgatctgaacgacgccaagggcgaattgcggcgcagcctcaacgcggcgaagaagaacggcgacgccatcaaggtgctcaagcccgaagccggcacccgccccaatgttttctacgtcggtctcgacgaccggttccagggacgcgtcgagggcgaggcagccctctggcaacccactgcccacggagtctga

SEQ ID NO: 67758 - protein, 245 aa, Thiobacillus denitrificans ATCC 25259
MSDNPSPSRRAFLQAIPAITAGLALPATARAAPHKHHWAMLVDVRKCIGCQACTVACIMENALPENSFRTLASTYVVQQETEGRTTAGTYMLPRLCNHCENPPCVPVCPVGATFKRDDGIVVVDGDRCVGCAYCVQACPYDARFINHETNKADKCTFCAHRVDAGLLPACVETCVGGARVFGDLNDAKGELRRSLNAAKKNGDAIKVLKPEAGTRPNVFYVGLDDRFQGRVEGEAALWQPTAHGV

SEQ ID NO: 67759 - DNA, 780 bp, Thiobacillus denitrificans ATCC 25259
  CDS (1)..(780): transl_table=11
atgagcgaattgaaaccgatgtctgacaacacgcccgagtcggcggagcgccgccgggtgatcggcgggctcgccgccgccgcggccggtcttgccatcgcgccggggatcaagctgatcgaggtcgcacaggcacgtccggaggagcagggcgcgagcagcgccgtgcgctggggcatgctggtcgacgcgaccaagtgtgcgaccggctgtgatgactgcgtgtccgcgtgcagcaccgaaaacggctggacgccggtcgccgagagcgccaagccgcggcaggcgcctcagtggatacgcaagctcgagctgcaggatccgctgacgcagatggaaaccaatctgccgatgatgtgccagcattgcgccgagccgccgtgcgtcgacgtctgcccgaccggcgcgtcgttcaagcgtgccgacggcatcgtgctcgtcaaccgccacacctgtatcggctgccgctactgcatgatggcgtgtccttacaaggcacgctccctcgtgcacgagcccctcaacgacacgcagaaggccgacgtaccgcgcggcgtcggttgcgtcgagtcctgctcactgtgcgtgcagaaggtcgatcgcggcgacggcaccacggcgtgcgccgaagcctgctccgcggccggtcataacgcgatcgtcttcggcgacctgaacgaccccgatagcgagatctcgaagcgtttgcgcgaactgcccaccaagcaggtgcgtgccgacctcaagctcaataccggcgttcgctatcacggaatctaa

SEQ ID NO: 67760 - protein, 259 aa, Thiobacillus denitrificans ATCC 25259
MSELKPMSDNTPESAERRRVIGGLAAAAAGLAIAPGIKLIEVAQARPEEQGASSAVRWGMLVDATKCATGCDDCVSACSTENGWTPVAESAKPRQAPQWIRKLELQDPLTQMETNLPMMCQHCAEPPCVDVCPTGASFKRADGIVLVNRHTCIGCRYCMMACPYKARSLVHEPLNDTQKADVPRGVGCVESCSLCVQKVDRGDGTTACAEACSAAGHNAIVFGDLNDPDSEISKRLRELPTKQVRADLKLNTGVRYHGI

SEQ ID NO: 67761 - DNA, 1446 bp, Natronomonas pharaonis DSM 2160
  CDS (1)..(1446): transl_table=11
atgaacagtgacgactcatcctgcgaccgcgacagttgcggttgcgggagcaacgacgaaccaacggacgaatcgttccatcccatgggtgaagaatgggaagaggagatgcgagagaagctcgaggagaccgaatacgatgcggacctcggcatggagatggcggaagacgccatgcggctcattcagggcgaactctctgaagccgagttccacgaccgatacaacgacgcggtcgtcgaggagttcgatgtcgacgaccgcccgactgccgaggcctacgaggaagagatggagtccgacgacggaggtctcttccagcggctcactggcgaggacggtactgtcgggaagctgtccgacttcgaccccgacactgaccagacccgtcgagacacgatgaagaagatgggtgccggtgctgcggcgctcggcttcagcggtgtcgcgagcgccgccagcccgaccgacgacgagtacggtgacaaccccgtatcggacacgggcgacgacgacgatgtccagatggggatggtcattgacctcgaacgctgtgacggctgtctggagtgtgtcacgggttgtatcgaggagaaccagacctcggagggtgcaaactggatgtacgtcctcacctacgaggacgagcagacagaacaggagaacttcctcgttcggccctgccagcactgttcgaacgcgccgtgtgagaaggtctgtccggttcgggcccgacacacccgcgacaaggacggtctcgtgttgacgaactacgaggtctgtatcggctgccgatactgtcaggtcgcctgtccgtacggtgtcaactacttccagtggggcgaacccgacgttccatacgaggacctccccggctccgaaaacgactacgacgagctcaaggagatgccgtatgaggaacgacaggaacacctcaaagagactgacgaccacctccacgacgagcgcggccagtggaacgacatgcggccagcgcagggtaccatgggcaagtgtaccttctgtccgtcccggcaggatggtcaccaaggcgaagagaaggtcggtaccgtcgcctgtatggaggcctgcgacacggccggcatgagcgccattcacttcggcgacgtcaacgaccccgacagccggcccaaccagttcctcgagcagcgcgccgaggaagccctcgaaaacgaagacggcgagaccaacaacgtcgacatcgacgaagactggggcgaatccaacacgccgtggggcggcaagctctcggcgttcaagctgctcgatgacctcggcacccagccgaacgtcacgtacctcggcaacgagcccggccccgaagccgagcaggttgagggcccggtcacctacgagcagatcggcgttcaggacgaccgcaaagagcacctcgaccagctgaccttcgggacgggtgatgactga

SEQ ID NO: 67762 - protein, 481 aa, Natronomonas pharaonis DSM 2160
MNSDDSSCDRDSCGCGSNDEPTDESFHPMGEEWEEEMREKLEETEYDADLGMEMAEDAMRLIQGELSEAEFHDRYNDAVVEEFDVDDRPTAEAYEEEMESDDGGLFQRLTGEDGTVGKLSDFDPDTDQTRRDTMKKMGAGAAALGFSGVASAASPTDDEYGDNPVSDTGDDDDVQMGMVIDLERCDGCLECVTGCIEENQTSEGANWMYVLTYEDEQTEQENFLVRPCQHCSNAPCEKVCPVRARHTRDKDGLVLTNYEVCIGCRYCQVACPYGVNYFQWGEPDVPYEDLPGSENDYDELKEMPYEERQEHLKETDDHLHDERGQWNDMRPAQGTMGKCTFCPSRQDGHQGEEKVGTVACMEACDTAGMSAIHFGDVNDPDSRPNQFLEQRAEEALENEDGETNNVDIDEDWGESNTPWGGKLSAFKLLDDLGTQPNVTYLGNEPGPEAEQVEGPVTYEQIGVQDDRKEHLDQLTFGTGDD

SEQ ID NO: 67763 - DNA, 600 bp, Natronomonas pharaonis DSM 2160
  CDS (1)..(600): transl_table=11
atgagcaccaaccaatccaacgacacggcccgagtcatccccaactgggagtcctgtatcgactgcggcgcctgcgaggtcgcctgccagcgaacgtgggacctcccgccggagacgaaccgcatcgaggtcgtcgccctcgaacatggcaccgaagacgaggcccaaaagccgatgcagtgttacaactgcgccgaggccccttgtgtcgatgtctgtccgaccgacgccctcctgttccgcgacgacggcaccgtgcgggtatcgggcgacctctgtatcggctgccactactgcggcgtcggctgtccgttcggcgcgccgcagtaccccgacgccgaggtcccggaagccgacgagatgaaccccctcggcgcacggggcaacgggctgatggacaagtgtactacctgcgagccccgacaggaagaagacctcgaaccggcctgctcctcggagtgtccgaccgacgcgctgcttttcggcacgccggatgaactctccgagaagctcgacgaagagggcacctcgacgccgttcgaaccggaggccgcccgcatcgtcttcggggacgacgccgacagcgtgatatcggagtga

SEQ ID NO: 67764 - protein, 199 aa, Natronomonas pharaonis DSM 2160
MSTNQSNDTARVIPNWESCIDCGACEVACQRTWDLPPETNRIEVVALEHGTEDEAQKPMQCYNCAEAPCVDVCPTDALLFRDDGTVRVSGDLCIGCHYCGVGCPFGAPQYPDAEVPEADEMNPLGARGNGLMDKCTTCEPRQEEDLEPACSSECPTDALLFGTPDELSEKLDEEGTSTPFEPEAARIVFGDDADSVISE

SEQ ID NO: 67765 - DNA, 798 bp, Burkholderia pseudomallei 1710b
  CDS (1)..(798): transl_table=11
atgacgcaaatggcgctcgtgatcgatctgaacgtgtgcgtggggtgccacgcgtgcgtgacgagctgcaaggaatggaacacgtcgggcgacgcgggcgcgctgtctgacttgcgcccatatgacgccgatccgtccggcaccttcttcaaccgcgtgcagacgttcgaggcgggcgaatttccgctcgccgacacgatccacttcccgaagtcgtgcctgcattgcgaagacccgccgtgcgtgccggtctgcccgacgggcgcgagctacaagcgcgaggaagacgggctcgtgctcgtcgattacgacaagtgcatcggctgcaagtactgcacgtgggcgtgcccatatggcgcgcgcgagctcgacgaagtgcgcaaggagatgacgaagtgcacgctttgcgcggaccgcattcacgacgagacgctgcccgagcgcgatcgcaagcccgcgtgcgtgctcgcgtgcccgacgtcggcgcgcctgttcggcgacatccacgatccgaattcgaccgtgtcgcaggcaatccgcgagcgcggcggctatcagttgatgccggaatggggaacgcggcccgcgaatcattacctgccgcgccgcacgacgaccgcgtgcgggagcgggggcggcggtggtaacgacgggagcggaggcggcggttgcggtagcggcgccgcgtgcgcgtgccggccggcggacgcgaagcccgcgcccgtctcggccggcgacgcgctcgcgcacgggcagccgaatctcgccgcgctcgcgaagcgcatccgatctgaatga

SEQ ID NO: 67766 - protein, 265 aa, Burkholderia pseudomallei 1710b
MTQMALVIDLNVCVGCHACVTSCKEWNTSGDAGALSDLRPYDADPSGTFFNRVQTFEAGEFPLADTIHFPKSCLHCEDPPCVPVCPTGASYKREEDGLVLVDYDKCIGCKYCTWACPYGARELDEVRKEMTKCTLCADRIHDETLPERDRKPACVLACPTSARLFGDIHDPNSTVSQAIRERGGYQLMPEWGTRPANHYLPRRTTTACGSGGGGGNDGSGGGGCGSGAACACRPADAKPAPVSAGDALAHGQPNLAALAKRIRSE

SEQ ID NO: 67767 - DNA, 936 bp, Pseudomonas fluorescens PfO-1
  CDS (1)..(936): transl_table=11
atggccagccaagacatcattgcccgctcggccaccaccacgccggcgccttcgatacgcggccaggaacaggtggccaagctgatcgacaccaccaaatgcatcggctgcaaggcctgccaggtcgcgtgctcggaatggaacgagctgcgcgacgaggtcggccacaaccacggcacctacgacaacccgcaggatttgagcgccgattcatggacgctgatgcgcttcaccgagcatgaaaccgacgccggtaacctcgagtggctgatccgcaaggacggctgcatgcactgcgccgaacccggttgcctggcagcgtgccccagccccggcgcgatcatcaagcacgccaacggcatcgtcgatttcgatcaggatcactgcatcggctgcggttattgcatcaccggttgcccgttcaacatcccgcgcatttcgcagaaggatcacaaggcctacaaatgcacgctgtgttcggaccgtgtggcggtggggctggagccggcctgcgtgaaaacctgcccgaccggggccatcgtgtttggcaccaaggacgacatgaagacccacgccgccgaacgcatcgtcgacctgaaaagccgtggcttcgacaacgccggcctgtatgacccgcaaggcgtcggcggcacccacgtcatgtacgtgctgcaccacgccgacaccccgaaaatctacgccggcctgccggacaaccccgagatcagtccgctggtgggtttgtggaaaggcatcagcaagccgttgggtctgctggccatgggcgcggcggtgctggccgggttcttccattacgtgcggatcggcccgaaccgggtcgaggaagatgaacatcccgatccgcccgacacctcggtgcacgtcgtcgatccggcagtgcacaccttcgacccacgcggggagggccggccatga

SEQ ID NO: 67768 - protein, 311 aa, Pseudomonas fluorescens PfO-1
MASQDIIARSATTTPAPSIRGQEQVAKLIDTTKCIGCKACQVACSEWNELRDEVGHNHGTYDNPQDLSADSWTLMRFTEHETDAGNLEWLIRKDGCMHCAEPGCLAACPSPGAIIKHANGIVDFDQDHCIGCGYCITGCPFNIPRISQKDHKAYKCTLCSDRVAVGLEPACVKTCPTGAIVFGTKDDMKTHAAERIVDLKSRGFDNAGLYDPQGVGGTHVMYVLHHADTPKIYAGLPDNPEISPLVGLWKGISKPLGLLAMGAAVLAGFFHYVRIGPNRVEEDEHPDPPDTSVHVVDPAVHTFDPRGEGRP

SEQ ID NO: 67769 - DNA, 597 bp, Pelobacter carbinolicus DSM 2380
  CDS (1)..(597): transl_table=11
atgaaaaagatctttgtcgattaccgcaaatgcgtagcctgcaaggcgtgcgaaacggcctgtgcggtggctcatcatcccagcggcagccttttcggattggtgggcgatgctcgcacccaggtgaatatacgcgtgctgggagtggagcatgaggcgtttccggtttcctgccgtcattgcgatccggccgcctgcttgagtgcctgtccggcgggagccatcacccgcgatccggagaccgacgcggtggtacagaacccggaaaaatgccaggcttgtgccatgtgcgccatggtctgccccttcgacgccatttccttcaagcatacccatcgtgctttgccgggccgtgaggtggcctacaaatgcgatctgtgtcacgagcgactggcgcaaggcgaagagccggcctgcgtgcaggcatgccattccggtgcgctggtgttccaggacagtgagccgcagcgccaaagccgggccgtcgccagcctcaaggtgtacctgcttggggaaggcgaggagccgcccctgttttcgatgtaccgggagttgcgccgtaaaacatttgcccggcgcaggatggaaaaatcatga

SEQ ID NO: 67770 - protein, 198 aa, Pelobacter carbinolicus DSM 2380
MKKIFVDYRKCVACKACETACAVAHHPSGSLFGLVGDARTQVNIRVLGVEHEAFPVSCRHCDPAACLSACPAGAITRDPETDAVVQNPEKCQACAMCAMVCPFDAISFKHTHRALPGREVAYKCDLCHERLAQGEEPACVQACHSGALVFQDSEPQRQSRAVASLKVYLLGEGEEPPLFSMYRELRRKTFARRRMEKS

SEQ ID NO: 67771 - DNA, 2763 bp, Pelobacter carbinolicus DSM 2380
  CDS (1)..(2763): transl_table=11
atggatcgaaggaaattcctacagatcatgggcctggtatcaggcgccaccctgctgtcatcctgcggctcggaccgcaaccagaaagagttgatttcctatctggtgccgcccgaagatggcgtgcgccccggaacctccgcctggcgcgtctccacctgcagcgaatgtccggcccattgcggcatcatgatacgcctgcgggaaaaacgtgccgtcaaactcgagggtctccccgatcatcccatcaaccgcggcgcactgtgcatgcggggacaggcagccttatggcggctgtatcatcccgagcgcctgcgcacgccgctgctacgcaaaggaaacgattatcaggccgttagctgggaggtcgccctggagcacatagtccaggccatgtcggaccggcagcggagccatatgctgctgagcggtgcgacgaccggtagcctggccgccttgcaggaacagtttgtcgccgcctgtaaggtcacgcgcctgccggaattcgaactcttcagtcacgccgccctgcgccaggcctatcaactattgtatgggcgttccaccctgccgtattttcgcatcgaggatgcggacctgctgctcagcgtcggcgcggacctgctggaaaccttcagcagcccggcgggttatgcgcaaaagttatccgaagcgcgacgcgaccatgacctgcactggtgccacatcgaacctcatctgtccctcacaggggccaacgccgatcaacgcctgagcatcaaacccgccggcgaaccggccctgttgctgtggttgctgcagaccctggtcgacaaccggcatatgcctgcggcaatccgcgcggccctgccaaaaatatccctgagccaagcgggccacgccacaggcctgccgccctccaggctgacccggcttgccgaatcgctgaaaaaagcccgcaggcccctgcttattgtcggcggcatcgccaccggccaccaggctggtcagcagacggccctgttcggttgcctgctgcaacggttgctggctgaaccctggcggggcatcgacttcgcgcgagcggataaaccagaccgaaccggcgatctgcgcgacctgcagaccttgaaccaggccctgcaacgggacgaagtcggcatgctgttaatcagccgggccgatcccctgcgccatgcgccacccgattggcaactggccgacaacctgcgtcgtgcaagattgagcgtggcgatggccgatatgcacgatgccaccacccgcgccgtcgatctgatcctgccgttgacccacagttttgaacgctgggatgatgccgagccgcgcaacggcgtgtacagcctcatccaaccgggcatgacgcccctctacgatacgcgcaccgaaggcgatatcctgttgcaattgcagcgccgcctgaccggtcaaagcgccaccgacagctacgagtcttttttgcagcaacgctggcgcgagcagttctcaaccgccgaactgcgcagttttttgcgacagggcttcgtaaccacagacacctcacgtacctccacccctttgcgcatcgagcgcaccgtcgccgctctgcgaaacagcaccttgcccgagacgctgccgactccggcgctcgtcatcacgggctccatccgcagcttcgacggccgcagcgccgcgttgtccctgcttaacgaaatacccgatcctctcaccaccgtcacccacggcacatgggtcgccctgtcgccccgctgtgcacaaaagtacggcgttgccgatggcgaccagctgcgcctgacacacggcgattttcacctgacgcttccggcccgactgcagcagggattgccggacgacgtgttcagcctgcccgtcgattgcctgccggccggtttaccggattttgatccggccaccggcgaggccctgcggaccatcggcccggtaaaggctcggcgggtcggcaaaaaaatccccctgccgattctaagcggatctccttcccagcaagggcgcggcatcatccccaggccgatccatcacgacaaaggtcatcacgccgaacaccgttccctctacccggaaccggcctaccgcgaataccgctgggcgatggccatcgatctgcgacaatgcatcggatgcggagcctgtgtcgcctcctgctatgtggaaaacagcgtaccggtggtcggccgcaaggatcatctcaaagggcgggagatgtcatggttgcgcgtcgagccattttacagcgaccagggacagatctcctttatccccatgctctgccagcactgcgactatgcgccctgcgagcccgtatgtccggtatatgcgtcctatcacaaccccgaaggactcaacgtgcaggtttacaatcgctgcgtcggcacccgctactgcagcaacaactgcccctacaaggtgcgacgcttcaactggtgggagcatatatgggctccgcccctggaaaaaatgcacaaccccgatctggcgccacgcaccaggggcatgatggaaaaatgcactttttgcatccagcgcatccgagccgcccacgaaattgccggcaaggaaaaccgccgcatccgcgacggcgaggtgaccccggcctgcgcccagagctgcccgaccgccgccatcaccttcggcaaccgcctcgaccccggatccgccgtggcccgcatgatcgaaagcccccgcgcctatcaggtattcgaggggctcggcaccaagcccgcggtctattatttgcgtcccgattaa

SEQ ID NO: 67772 - protein, 920 aa, Pelobacter carbinolicus DSM 2380
MDRRKFLQIMGLVSGATLLSSCGSDRNQKELISYLVPPEDGVRPGTSAWRVSTCSECPAHCGIMIRLREKRAVKLEGLPDHPINRGALCMRGQAALWRLYHPERLRTPLLRKGNDYQAVSWEVALEHIVQAMSDRQRSHMLLSGATTGSLAALQEQFVAACKVTRLPEFELFSHAALRQAYQLLYGRSTLPYFRIEDADLLLSVGADLLETFSSPAGYAQKLSEARRDHDLHWCHIEPHLSLTGANADQRLSIKPAGEPALLLWLLQTLVDNRHMPAAIRAALPKISLSQAGHATGLPPSRLTRLAESLKKARRPLLIVGGIATGHQAGQQTALFGCLLQRLLAEPWRGIDFARADKPDRTGDLRDLQTLNQALQRDEVGMLLISRADPLRHAPPDWQLADNLRRARLSVAMADMHDATTRAVDLILPLTHSFERWDDAEPRNGVYSLIQPGMTPLYDTRTEGDILLQLQRRLTGQSATDSYESFLQQRWREQFSTAELRSFLRQGFVTTDTSRTSTPLRIERTVAALRNSTLPETLPTPALVITGSIRSFDGRSAALSLLNEIPDPLTTVTHGTWVALSPRCAQKYGVADGDQLRLTHGDFHLTLPARLQQGLPDDVFSLPVDCLPAGLPDFDPATGEALRTIGPVKARRVGKKIPLPILSGSPSQQGRGIIPRPIHHDKGHHAEHRSLYPEPAYREYRWAMAIDLRQCIGCGACVASCYVENSVPVVGRKDHLKGREMSWLRVEPFYSDQGQISFIPMLCQHCDYAPCEPVCPVYASYHNPEGLNVQVYNRCVGTRYCSNNCPYKVRRFNWWEHIWAPPLEKMHNPDLAPRTRGMMEKCTFCIQRIRAAHEIAGKENRRIRDGEVTPACAQSCPTAAITFGNRLDPGSAVARMIESPRAYQVFEGLGTKPAVYYLRPD

SEQ ID NO: 67773 - DNA, 597 bp, Carboxydothermus hydrogenoformans Z-2901
  CDS (1)..(597): transl_table=11
atggcacgctacggaatggtaattgaccttcgaacctgcgtcggctgtcaggcctgcagtgctgcctgtgccaccgaaaatcagacgccatactggtccgataagtggcgcacccgggtgctggatatcgaaaaaggtgaatatcccaataccggccggcattttgtaccaacaatttgtatgcactgcgaagaaccggcttgtttaaccatctgtccatctcaggcaactttccgggatgaaaacggcagcattctggtaaattatgatacctgtcttggttgtaaagcctgcatggcggcctgcccctatggggccaggtatgtttacgataagaacgatgttgccaaaaaccgggaaattcacggggaactttcacaacataaagtggtgcatattgacaagtgtactttttgctttgaccgggtagaaagaggcctggaaccggcttgcgtgtcaacctgtccggctcatgctaggattttcggggacttagatgacccgcatagtgaagttgccagactggtggcatcaggaattgccaagcctttaagaccggatttaaataccaaacccaaggtcttttacatttactaa

SEQ ID NO: 67774 - protein, 198 aa, Carboxydothermus hydrogenoformans Z-2901
MARYGMVIDLRTCVGCQACSAACATENQTPYWSDKWRTRVLDIEKGEYPNTGRHFVPTICMHCEEPACLTICPSQATFRDENGSILVNYDTCLGCKACMAACPYGARYVYDKNDVAKNREIHGELSQHKVVHIDKCTFCFDRVERGLEPACVSTCPAHARIFGDLDDPHSEVARLVASGIAKPLRPDLNTKPKVFYIY

SEQ ID NO: 67775 - DNA, 612 bp, Carboxydothermus hydrogenoformans Z-2901
  CDS (1)..(612): transl_table=11
atggcacgttacggaatggttattgacctgcgtaaatgccgggggtgccgcggttgtaccgcggtttgtgccgtggaaaataatgttccggtagatagaaccggtgaagaggccggtgagcagttagcccggtgggcagccggggagcttgattattacaacatgcgggtattaaccgcaacggtatatggtcaaattcgctccatacccatgccgtgcatgcactgcgacaacgcaccctgtatcgccgtttgtcctgtaaaagcaagttacaaaagaaaagacgggatagtagtcatcgataaatataaatgtatcggctgccgtctttgcttaaaggcctgtccctatcaggcccggtatatacgcaaagtgccggtaaagggtgaacccaagggagtagctggaaaatgcgagttttgcgcccatttggtagataaaggggaaaaaaccatgtgcagtagaagttgtcactccggggcgataaaatttggcgacttagatgatcccaatagtgaagtaagccagcttttaaagcaaaacgctaaaaaggtaaagaggcttaaaccagaatataaaacgtcacccagagtttattacattaccttttag

SEQ ID NO: 67776 - protein, 203 aa, Carboxydothermus hydrogenoformans Z-2901
MARYGMVIDLRKCRGCRGCTAVCAVENNVPVDRTGEEAGEQLARWAAGELDYYNMRVLTATVYGQIRSIPMPCMHCDNAPCIAVCPVKASYKRKDGIVVIDKYKCIGCRLCLKACPYQARYIRKVPVKGEPKGVAGKCEFCAHLVDKGEKTMCSRSCHSGAIKFGDLDDPNSEVSQLLKQNAKKVKRLKPEYKTSPRVYYITF

SEQ ID NO: 67777 - DNA, 783 bp, Carboxydothermus hydrogenoformans Z-2901
  CDS (1)..(783): transl_table=11
atgaacggcatgtttattgatacatccctttgtgttggctgccggggctgcatgactgcctgcaaaagctggaacgaattacccggagaaaaaacgacttttaccggaagtttacagagtatgcccgatactacccctaaaacttatacattgattaaattttatgaacgtgaagaaaacgggcggattcgttttgacttttttaaacagcagtgttttcactgcggtgatgcggcttgtgaaaaagcttgtccggaagatgcaatctatcataccaaagaaggggcggtagtgcgggattacgaccggtgtataggctgtgattactgccagagggcgtgcccctttaatatcccgcggattgacactcaaaacaagaaaatgcataaatgcaccttgtgttttgaccggttagaaaacggagaaattccggcttgtgccctgacttgttctccgggagctattaaatacggcaaccgggatgagctgtgggaggcagcccaaaagcggctggcggaggttaaaaaagagtatcccaaggctaatctttatccttccgataaaaatgctttgggaggaaccggggtattttatcttttaattaacgagccggagttctacggtcttccggccgaggcaaaattaaaaactaccttttccctctggcatgacgtggtgagacctttagggaaaattgtgccagggatagcgcttggggctactgttatagcggcggtagctaattcggtaaaaaaacaacgggaggagggacacggtgagtaa

SEQ ID NO: 67778 - protein, 260 aa, Carboxydothermus hydrogenoformans Z-2901
MNGMFIDTSLCVGCRGCMTACKSWNELPGEKTTFTGSLQSMPDTTPKTYTLIKFYEREENGRIRFDFFKQQCFHCGDAACEKACPEDAIYHTKEGAVVRDYDRCIGCDYCQRACPFNIPRIDTQNKKMHKCTLCFDRLENGEIPACALTCSPGAIKYGNRDELWEAAQKRLAEVKKEYPKANLYPSDKNALGGTGVFYLLINEPEFYGLPAEAKLKTTFSLWHDVVRPLGKIVPGIALGATVIAAVANSVKKQREEGHGE

SEQ ID NO: 67779 - DNA, 687 bp, Carboxydothermus hydrogenoformans Z-2901
  CDS (1)..(687): transl_table=11
atgcgttacggtatggtcatagaccttgataaatgcattggctgccggacctgtgcggtgatttgtaaagaacataattcccagcctccggggacctggtggaaccgggtttttaccccggggagcgaagaacaccaaacggcggtggaaaaagacgggcatttgcagatgtattttttgccggtagcctgccagatgtgtgaaaatgctccctgtgtcaaagtttgtcctgtaggggccacttataccgacgataaggggcgggtactggtagattatgagcgttgcataggctgtcgctactgtatgactgcttgtccctatggtgttcgccagtttaactgggaagacccgaaaaaagctaaagaccgggttggatacatgaaggggtacagctacggttatccctttgaccaccgggacaaggatgaccgactggtttatacccaaaaccgtccaaaaggcgtagtagagaaatgcactttttgcgtccagtataccgataaaggagaacttccggcttgtgttcaggcttgcccggcccatgccagaatatttggtgaccttgacgacaaagattccgaaattagtaaattagtccatgaaagacaggtcgttcaattaaaagaacatttaggaactaaacccaaagtctattatctggcgccaactaagggaagacggtaa

SEQ ID NO: 67780 - protein, 228 aa, Carboxydothermus hydrogenoformans Z-2901
MRYGMVIDLDKCIGCRTCAVICKEHNSQPPGTWWNRVFTPGSEEHQTAVEKDGHLQMYFLPVACQMCENAPCVKVCPVGATYTDDKGRVLVDYERCIGCRYCMTACPYGVRQFNWEDPKKAKDRVGYMKGYSYGYPFDHRDKDDRLVYTQNRPKGVVEKCTFCVQYTDKGELPACVQACPAHARIFGDLDDKDSEISKLVHERQVVQLKEHLGTKPKVYYLAPTKGRR

SEQ ID NO: 67781 - DNA, 540 bp, Carboxydothermus hydrogenoformans Z-2901
  CDS (1)..(540): transl_table=11
atgcctaagtatgctatggtaattgacatgaccaaatgcgctgcctgtcaggcgtgcaccgttgcctgtgaagcggaatgggggctaccccccggggaaaaatttacccggctggaagaacgggaaacgggcagttttcccaatgttcggcgggagtttttattaattcaatgccagcattgcgacaatgccccctgtattgaagtttgccctaccggagcgacatataaaagggaggacggcatagtgctggtagatgataagcgctgtgccggctgcaaatactgcatggtggcctgtccttaccaggcccgggtcataaatcacgaaaaaggtgtgccggaaaagtgccggttttgctatcaccgggtagagcaggggaaaaagccggcctgcgtctctacctgtattggcgaagcccggtattttggggacttagatgatcccaacgacgaaattcaccggattattcagcaaaaacaggcaaaacccttgcggggggatttgggcaccaaaccctccatctactacgtacgctaa

SEQ ID NO: 67782 - protein, 179 aa, Carboxydothermus hydrogenoformans Z-2901
MPKYAMVIDMTKCAACQACTVACEAEWGLPPGEKFTRLEERETGSFPNVRREFLLIQCQHCDNAPCIEVCPTGATYKREDGIVLVDDKRCAGCKYCMVACPYQARVINHEKGVPEKCRFCYHRVEQGKKPACVSTCIGEARYFGDLDDPNDEIHRIIQQKQAKPLRGDLGTKPSIYYVR

SEQ ID NO: 67783 - DNA, 747 bp, Burkholderia sp. 383
  CDS (1)..(747): transl_table=11
atgacccagatggccctcgtcatcgacctgaacgtgtgcgtcggctgccatgcctgcgtgacgagctgcaaggaatggaacacgtcgggcgaagccggcagtctcgcggacatgcgcccgtacgacgacgacccgtccggcacgttcttcaaccgtgtgcagacctacgaagcgggcgtgttcccgatgaccgacacgatccacttcccgaagtcgtgcctgcactgcgaggatccgccgtgcgtgcccgtctgtccgaccggcgcgagctacaagcgcaagtcggacgggatcgtgctggtcgactacgacaagtgcatcggctgcaagtactgcgcgtgggcgtgcccgtacggcgctcgcgagctcgacgaaggccgcaaggagatgacgaagtgcacgctgtgcgcggaccgcatcgacaaccaggcgttgcccgaacgcgaccggaagccggcttgcgtgctcgcgtgcccgacgtcggcgcggctgttcggcgacgtgcacgatccggagtcggaggtgtcgcgcgcgatccgcgaacgcggcggctatcagctgatgccggaatgggacacgcggccgtcgaaccattacctgccgcgcgtgaagaccgaatcgtcgtgcgggtgcgggagtagcggcgggtgcggcagcgggtcgaacggccgcgacgaggacgcgtcgttcgaggcccgcgcggcgcgcggcgacatcgatctcgtgtcgctcgcgacgcagcgctga

SEQ ID NO: 67784 - protein, 248 aa, Burkholderia sp. 383
MTQMALVIDLNVCVGCHACVTSCKEWNTSGEAGSLADMRPYDDDPSGTFFNRVQTYEAGVFPMTDTIHFPKSCLHCEDPPCVPVCPTGASYKRKSDGIVLVDYDKCIGCKYCAWACPYGARELDEGRKEMTKCTLCADRIDNQALPERDRKPACVLACPTSARLFGDVHDPESEVSRAIRERGGYQLMPEWDTRPSNHYLPRVKTESSCGCGSSGGCGSGSNGRDEDASFEARAARGDIDLVSLATQR

SEQ ID NO: 67785 - DNA, 915 bp, Burkholderia sp. 383
  CDS (1)..(915): transl_table=11
atggcattgcaatcgctggatatcaagcgcgtctcggccaccacgacgccaccgcccacggtgcgcgaaccggtgaccgggagtgtcgcgaagctgatcgacgtatcgaagtgcatcggctgcaaggcatgccagacggcgtgcatggagtggaacgacctgcgcgacgaagtcggtaccaacgtcggcgtgtacgacaacccggccgacctgaccgagcattcgtggacggtcatgcggttctccgaatacgagaacccggcgggcgacctcgagtggctgatccgcaaggacggctgcatgcactgcgaggatccgggctgcctgaaggcgtgtccgtcgccgggcgcgatcgtgcagtacaacaacgggatcgtcgatttccacgaggagaactgcatcggttgcggctattgcgtgaccggttgcccgttcaacgttccgcggatctcgaagaaggatcatcgcgcgtacaagtgcacgctctgttccgaccgcgtcgcggtcggccaggaaccggcctgcgtgaagacctgcccgacgggcgcgatcgtgttcggcaccaaggaggacatgaagcagcacgcggccgagcggatcgaggacctgaaggagcgcggcttcgagcatgcggggttgtacgacccgcaaggcgtcggcggcacgcacgtgatgtacgtgctgcaccacgccgataagccgtcgctgtaccacgggctgcccgacaatccgtcgatcagcccgatggtgaagctgtggaagggcatcgcgaaaccgctcgcggtggccggcatcgcgctgaccgcgcttgccgggttcttccactatgtgcgggtcggtccgaacgaggtgagcgacgaagaggaacaagccgcgcgcgacgaggcgcgacgcatcaaggaggacgcgaaatga

SEQ ID NO: 67786 - protein, 304 aa, Burkholderia sp. 383
MALQSLDIKRVSATTTPPPTVREPVTGSVAKLIDVSKCIGCKACQTACMEWNDLRDEVGTNVGVYDNPADLTEHSWTVMRFSEYENPAGDLEWLIRKDGCMHCEDPGCLKACPSPGAIVQYNNGIVDFHEENCIGCGYCVTGCPFNVPRISKKDHRAYKCTLCSDRVAVGQEPACVKTCPTGAIVFGTKEDMKQHAAERIEDLKERGFEHAGLYDPQGVGGTHVMYVLHHADKPSLYHGLPDNPSISPMVKLWKGIAKPLAVAGIALTALAGFFHYVRVGPNEVSDEEEQAARDEARRIKEDAK

SEQ ID NO: 67787 - DNA, 1572 bp, Pelodictyon luteolum DSM 273
  CDS (1)..(1572): transl_table=11
atgaattacggttttgtcattgacgcccgcaagtgcatcggatgccatgcatgctccgttgcctgcaaatcagaaaaccaggttccgctaggcgtgaacaggacctgggtgaagtatgtggagaaggggaccttccctgatacccgccgctactttaccgtgctgcgctgcaaccactgcgaggaacccccctgcgtggatatctgccctgtcgaagcactgcataagcggcctgacgggattgtggatttcgactcccgccgctgcatcggctgcaaggcctgtgctcaggcatgcccctacaactccgtgtacatcgatcccgagactcagaccacggccaagtgcagctactgctcgcacagggtcgagattggcctgaagcccgcctgtactgtgatctgccctcagcaggcgatcatttcgggagatcttgatgaccctcagagtgaaatctccaaactggtggcaaacgagcgcactgttgtccgcaagccggaaaaagggacaggcccgaatgtcttctacatcaacggcgacggcgcttcgcttgatccgttccaggcacccgaagaggacgcctatatgtggagcgcccagtcgcgcggcgtcggccacttcgccaagcatgcggtgcacggtgaaggccacggtgttcccgatcggtctgcagtcggttcgcacggcgcgaaaccgaaagccggagctccccgcagggtatacgatgctccctcaaagggctccgtctggggctgggaggttcctgcatatgtatggtcgaaggccgtgtctgcaggtgcattccttcttctttttgccttcgctctcatgccggacgctgcgctttctcccgccatgcagtgggggctctgggcgatctcgctagtgttcctcgccctgaccggcgccttcctcgtgaaggatctcgaccgtcctgaccgctttacctcggtcatgctccgccctcagttcggttcgtggctcgtccggggcggcctcaccatcaccggctacggagcattcctcgccctctggggagccggcacctggcttgcgcttccgatgcttgcttctgctggtctctggggcggtgccgccatggcgctgctgactgcggtatatactgcattcctctttggatctgccaagggccgcgacttctggcagagcccgatgctgtcgttgcacatgctcctgaactcggtgattgccggaggcgcagccatggcgcttctctctctcttcaccgggatcgatgagggtgctgccgggcagctcagaatggtgctcaccggcgccttcgttcttcatctcctcgttatggcaacggagctttacggccgccacccgtccgtcggtgccgaacgtgccgccgaggcgatcaggagcggaagcctgaagaacgatttctggttcggaagtgtcctgttgggcaacctgctgcctcttctcgcagtccttgtgccgaccggctcactgaccctcgccgtggcttccatcttcgccctcgccggcgttttctacaccgaaaaagtatgggtcaaggccccgcagacaatctcattaagttaa

SEQ ID NO: 67788 - protein, 523 aa, Pelodictyon luteolum DSM 273
MNYGFVIDARKCIGCHACSVACKSENQVPLGVNRTWVKYVEKGTFPDTRRYFTVLRCNHCEEPPCVDICPVEALHKRPDGIVDFDSRRCIGCKACAQACPYNSVYIDPETQTTAKCSYCSHRVEIGLKPACTVICPQQAIISGDLDDPQSEISKLVANERTVVRKPEKGTGPNVFYINGDGASLDPFQAPEEDAYMWSAQSRGVGHFAKHAVHGEGHGVPDRSAVGSHGAKPKAGAPRRVYDAPSKGSVWGWEVPAYVWSKAVSAGAFLLLFAFALMPDAALSPAMQWGLWAISLVFLALTGAFLVKDLDRPDRFTSVMLRPQFGSWLVRGGLTITGYGAFLALWGAGTWLALPMLASAGLWGGAAMALLTAVYTAFLFGSAKGRDFWQSPMLSLHMLLNSVIAGGAAMALLSLFTGIDEGAAGQLRMVLTGAFVLHLLVMATELYGRHPSVGAERAAEAIRSGSLKNDFWFGSVLLGNLLPLLAVLVPTGSLTLAVASIFALAGVFYTEKVWVKAPQTISLS

SEQ ID NO: 67789 - DNA, 732 bp, Pelodictyon luteolum DSM 273
  CDS (1)..(732): transl_table=11
atgaggaaagcgggcctcggcctcatcgccgggctgggagccgcttcgggtatcatcggcaacccgctctttgagcgcgtatcggcttccgcgtgggcttcctcccccaaacagccgggccggcgctggggcatgctgatcgacacgcgcctttgccctgcaggctgcactgcctgcgtcgacgcatgccgtctcacccacaacgtccccacattcagcgacccccgccggagggtggagtggatccataaggaagaggggcgcgcgctcctcggtaccgcatgcgccacgaagcagacgatgccggctctctgcaaccactgtgccgagccgagttgcgtgcgtgcatgccctacggactccattttccggagaaaggacggcatcgttgccatcgactaccaccgctgcatcggttgccgttcatgcatgcttgcctgcccgtacggggaggtcagcttcaactggagcgatccccgtccggccatcaaggaaccgacccctgactacccgacgaggcagcagggtgtcgtcgagaagtgcaacttctgctccgaccgcctgaaaaaaggacttgagccgtcatgctccagccggtgtccggaaggggcgatgacatttggtgacctcaacgacccgaaatccgccatacgccggctgcttcaggcaaacgagaccatgcggcgcaaggcagagctcggcaccgaaccgtcggtattctacatcatttaa

SEQ ID NO: 67790 - protein, 243 aa, Pelodictyon luteolum DSM 273
MRKAGLGLIAGLGAASGIIGNPLFERVSASAWASSPKQPGRRWGMLIDTRLCPAGCTACVDACRLTHNVPTFSDPRRRVEWIHKEEGRALLGTACATKQTMPALCNHCAEPSCVRACPTDSIFRRKDGIVAIDYHRCIGCRSCMLACPYGEVSFNWSDPRPAIKEPTPDYPTRQQGVVEKCNFCSDRLKKGLEPSCSSRCPEGAMTFGDLNDPKSAIRRLLQANETMRRKAELGTEPSVFYII

SEQ ID NO: 67791 - DNA, 600 bp, Pelodictyon luteolum DSM 273
  CDS (1)..(600): transl_table=11
atggcgcgatatggaatggtaatggacatgcggacctgcgtcggatgccaggcctgcatggctgcatgcacggcggagaaccagacgccgttctggaacgggaagttccggacgcatgtcgaagacaaagcacagggcacatttcccgatgtacggcgggtgctgcttccgaggctctgcatgcactgcgaaaacaccccctgcctgtcagcatgcccgacaggggcaacattcatgacggaggacggcatcgtcaaggtcaactacgaccgctgcatcggctgctacgcatgctgcatcgcatgcccgtacgatgcccgctacgcttacgaccgcgaggatgtcaataaggaggaggagctctacggaaagttcacgagccacaagcagccgcatgtcgacaaatgcacattctgcgaccaccgggtttcggaagggcgtgagccggcctgcgtcagcacctgccctaccaatacaaggatcttcggagatctcgacgaccccaacagcgaggtgcacaagctggcaacaagcggaaaagcccaggcgctgaaccagtcgctcggcacgtccccgaaagtatattacatcccatcatag

SEQ ID NO: 67792 - protein, 199 aa, Pelodictyon luteolum DSM 273
MARYGMVMDMRTCVGCQACMAACTAENQTPFWNGKFRTHVEDKAQGTFPDVRRVLLPRLCMHCENTPCLSACPTGATFMTEDGIVKVNYDRCIGCYACCIACPYDARYAYDREDVNKEEELYGKFTSHKQPHVDKCTFCDHRVSEGREPACVSTCPTNTRIFGDLDDPNSEVHKLATSGKAQALNQSLGTSPKVYYIPS

SEQ ID NO: 67793 - DNA, 543 bp, Chlorobium chlorochromatii CaD3
  CDS (1)..(543): transl_table=11
atgattattgatacccgcgtttgcgttggctgttcagcctgtgtttacgcttgtaaatcggaaaacgaagtgcccgttggctactgccgcgattgggttgtgcaagaaaccaacggcaacttccccaaactcagcatggaaaaccgctcagaacgctgccaacattgtgataacgccccatgcgttacctactgcccaacaggcgcttcgcattacgacgagtttggcacggtgcaaattaaccgttcgcgctgcacgggatgtaaagcctgcatggcagcctgcccttatgatgcacgctacgttcaccctgatggttttgttgacaaatgtaccctttgccaccaccgccttgagaagggaatgaaaaccgcatgtgtttccatttgcccaacaggtagcttgcatttggtcaattttgcaaaccttaccgctgacgacaaagctatgatggcaggtaaagaggtttatcgccaaaaagcacatgctggcacagagccacgactttactggatttccgcaagtaataaacccggagcgtaa

SEQ ID NO: 67794 - protein, 180 aa, Chlorobium chlorochromatii CaD3
MIIDTRVCVGCSACVYACKSENEVPVGYCRDWVVQETNGNFPKLSMENRSERCQHCDNAPCVTYCPTGASHYDEFGTVQINRSRCTGCKACMAACPYDARYVHPDGFVDKCTLCHHRLEKGMKTACVSICPTGSLHLVNFANLTADDKAMMAGKEVYRQKAHAGTEPRLYWISASNKPGA

SEQ ID NO: 67795 - DNA, 762 bp, Chlorobium chlorochromatii CaD3
  CDS (1)..(762): transl_table=11
atgaacgaacaacgcagagaatttatccgattggctggcatgggatttcttgccagtgttggtgccacttgtgggcttatgtcgagcgctccattagaagccaccgatctaacagtgtttgctgatagcggcaatggcgctgttcgctggggtatgcttgtagatacgcgcaaatgccgcgaagggtgcaacaagtgtattgaaagctgccatacggtgcataatgtgcctgattttgcttcagcaaaagagcgtgtgcagtggattgaaaagcgtccagttgcttcacttttttcagagagaaaagcacttccagctcaaagtgcaaccttacctgcattgtgtaaccattgtgcgaaagcgccgtgtgttacagcctgccccacctctgcaatattccgccgatatgacggtattgttgggcttgattttcaccgttgcattggttgccgtgcttgcatgacggcttgcccttatagcgctattagttttaattggaaagcaccacgtccagctattaagtcgttaagtgatggttatcccacacgcgagcaaggtatggtggaaaaatgcaatttctgctcggagcgccttgctaaaggcttaatgcctgcatgtgcggaaagttgccctgaacatgcgcttgtatttggtaatcttaatgatcctgcttctgaaattcgcacgttgcttgcctcaagccgcacgttacagcgtaaagcggagcaaggcacaaaaccttcagttttctatataatttaa

SEQ ID NO: 67796 - protein, 253 aa, Chlorobium chlorochromatii CaD3
MNEQRREFIRLAGMGFLASVGATCGLMSSAPLEATDLTVFADSGNGAVRWGMLVDTRKCREGCNKCIESCHTVHNVPDFASAKERVQWIEKRPVASLFSERKALPAQSATLPALCNHCAKAPCVTACPTSAIFRRYDGIVGLDFHRCIGCRACMTACPYSAISFNWKAPRPAIKSLSDGYPTREQGMVEKCNFCSERLAKGLMPACAESCPEHALVFGNLNDPASEIRTLLASSRTLQRKAEQGTKPSVFYII

SEQ ID NO: 67797 - DNA, 783 bp, Geobacter metallireducens GS-15
  CDS (1)..(783): transl_table=11
atgaacaggcgagactttctcaagaatagcatcacggtcatcgcggggctggcggtgcccctctcggccctggaactcatcagcccgaggaagctcctggctcaaaagggagacgaatcgccggtccggtgggcctttctggtggacacccaggcctgcgtcgggtgcggcttctgcgtcaaggcgtgcaagacggagaacgagatcccccacgagaccaacatcacccgcacctgggtggaacggtacgtggtgacccggaaggggaagacctacgtggattctccccggggagcccgggacggcttcaccacggaccggatcgatcagggcgaggaagggtatcgcgaggtcaaggcgaaggatgtcgagaaggcgttcttcgtccccaagctctgcaaccagtgcgataaccccgcctgcgtccaggtctgccccgtgggagccacctaccagacccccgacggcgtggtgctggtggaccggaagcactgcatcggctgcgcctactgcatcatggcgtgcccctacggggtccgctccttcaatccggcctacaagacggcggagaagtgcaccttctgctatcaccggatcagtaaggggatgaagacggcctgcgtggacgcctgccccttcggtgcccggaagatcggcaacctgcgggatcccgacgatcccgtgacgaagaccatcatgtcgggacgggtcggcgtcctgaaggagcagtacggcaccaagccgcaggtctactatctcgctctttcccgggaggtgaaatag

SEQ ID NO: 67798 - protein, 260 aa, Geobacter metallireducens GS-15
MNRRDFLKNSITVIAGLAVPLSALELISPRKLLAQKGDESPVRWAFLVDTQACVGCGFCVKACKTENEIPHETNITRTWVERYVVTRKGKTYVDSPRGARDGFTTDRIDQGEEGYREVKAKDVEKAFFVPKLCNQCDNPACVQVCPVGATYQTPDGVVLVDRKHCIGCAYCIMACPYGVRSFNPAYKTAEKCTFCYHRISKGMKTACVDACPFGARKIGNLRDPDDPVTKTIMSGRVGVLKEQYGTKPQVYYLALSREVK

SEQ ID NO: 67799 - DNA, 834 bp, Geobacter metallireducens GS-15
  CDS (1)..(834): transl_table=11
atgagctcctcgaccatcgactacggcaagaccaagacgttcctcatcgacaccaccaagtgcaccggctgccgcggctgccaggttgcctgcaagcagtggaaccagctgaagggtgagaagaccacgttcttcaccggcgaagggtaccagaacccgccccagatgtccgaattcaccttcacccgggtgaagttcaaggactacgagaagcacgggcagaacgagttcgccttctacaaggagatgtgcatgcactgcaacgaccccgcatgcgcctccgtctgtcccgtcggcgccttccacaaaacgccggaagggcctgtcatctacaacgccaagaagtgcatcggctgccgcttttgcatggtggcctgccccttcggcgttcccaagtacgagtggagcaaggcgtttcccttggtgaagaagtgcaccggctgctacagccgggttaagaacggccttcaccccgcctgcgccaccgcctgccccaccgccatcacctacggcagccgggacgagatgctgaaagaggcggagaagcggatggccgccaagcccgaccgctacttcaaggtggtctacggcaaggaggaggccggcggcaccagcgtcctctatctgacccagcagcccctggacgaactgggcttccggccggtcaccaagcggccgctcccttcctacacctggcaggccctgcggttcgtgccggggatcttcctcaccgttggcggcaccctgtcgctggtcacctggttccagcaccgcaaggaccgggtgaggcgcgaggaagaggaacggaacagccggaaggaggggaaccaatga

SEQ ID NO: 67800 - protein, 277 aa, Geobacter metallireducens GS-15
MSSSTIDYGKTKTFLIDTTKCTGCRGCQVACKQWNQLKGEKTTFFTGEGYQNPPQMSEFTFTRVKFKDYEKHGQNEFAFYKEMCMHCNDPACASVCPVGAFHKTPEGPVIYNAKKCIGCRFCMVACPFGVPKYEWSKAFPLVKKCTGCYSRVKNGLHPACATACPTAITYGSRDEMLKEAEKRMAAKPDRYFKVVYGKEEAGGTSVLYLTQQPLDELGFRPVTKRPLPSYTWQALRFVPGIFLTVGGTLSLVTWFQHRKDRVRREEEERNSRKEGNQ

SEQ ID NO: 67801 - DNA, 714 bp, Geobacter metallireducens GS-15
  CDS (1)..(714): transl_table=11
atggaaacaatgacgagtcagtacagatgggggatggttgtcgaccttgatcggtgcaccggctgcggcgcttgcgttgttgcctgtcaggcggagaacaacgtggccatctgcggcaagaaggagatatccgaaggacgcaacatgcactggttacgcatcgagcggttctgggtgggacagtatccggacgtgcgggcgcgctttctcccggtactctgtcagcactgtcatgacgccccctgtgagccggtctgcccggtttatgccagctaccacaaccccgacggtcttaatgggcaggtgtacaaccgctgcgtcggcaccaggtactgcggtaataactgcccctatgccgtaagagtcttcaacttctacaaccacgaatggcccaaccccctcgataatcaactttctccggacatgaccgtgcgtacccggggagtgatggaaaaatgcactttctgcatccagcgcatccgaagggccaaggaagatgccaagtccgaaaatcgcaccattcgtgacggagagatacaaccggcctgcgcccagacctgtccaaccgacgctctggtgttcgggaacatggccgaccctcggagccgggtcgccatcctttcccgcagccccaggcgcttccggctgctggagcatctgggcacccacccctcgatttgctatctcaagggaggaggacgcgagcatgtctga

SEQ ID NO: 67802 - protein, 237 aa, Geobacter metallireducens GS-15
METMTSQYRWGMVVDLDRCTGCGACVVACQAENNVAICGKKEISEGRNMHWLRIERFWVGQYPDVRARFLPVLCQHCHDAPCEPVCPVYASYHNPDGLNGQVYNRCVGTRYCGNNCPYAVRVFNFYNHEWPNPLDNQLSPDMTVRTRGVMEKCTFCIQRIRRAKEDAKSENRTIRDGEIQPACAQTCPTDALVFGNMADPRSRVAILSRSPRRFRLLEHLGTHPSICYLKGGGREHV

SEQ ID NO: 67803 - DNA, 774 bp, Geobacter metallireducens GS-15
  CDS (1)..(774): transl_table=11
atgaatagacgcgagtttctcaagcggagcatggttgtcgtggccggcatggcggtgccggcggcggccctacacctcatcgacccgaaacagcttctggcagcaaagccggaactccgctgggccttcctggtggatgcctacaagtgcgtcggctgcggattctgcgtcaaggcgtgcaaactggagaacgaggtaccctatgaggccaatgtttcccgcacctgggtggagcgctatgtggtgaagaaggacggtgaagtcctgatagactcccccaaggcggcccgggatgggttcaccacgaagaaaatcgaggtgggagaagggaagttccgggaggtgaaggacgaggagatcgagaaggccttctttgtgccgaaactctgcaaccagtgcgagaatcccccctgcgttcaggtctgtcccgtgggggccacctacgccacggcggacggggtggtgctcgtggaccggaagtggtgcatcggctgcggttactgcatcatggggtgcccctacggggtccgcttcttccacccggtccacaagacggcggagaaatgcaacttctgctaccaccggatcaccaaggggatgaagtcggcctgcgtcgacgcctgccccttcggggcccggcagatcggcaacctccgggaccccgacgacccggtcaccaaggtgatcatgaccgagcgggtcggcatcctcaaggaggagtacggaaccaagccccaggtctactacatcggcctgtccaaggaggtacgctag

SEQ ID NO: 67804 - protein, 257 aa, Geobacter metallireducens GS-15
MNRREFLKRSMVVVAGMAVPAAALHLIDPKQLLAAKPELRWAFLVDAYKCVGCGFCVKACKLENEVPYEANVSRTWVERYVVKKDGEVLIDSPKAARDGFTTKKIEVGEGKFREVKDEEIEKAFFVPKLCNQCENPPCVQVCPVGATYATADGVVLVDRKWCIGCGYCIMGCPYGVRFFHPVHKTAEKCNFCYHRITKGMKSACVDACPFGARQIGNLRDPDDPVTKVIMTERVGILKEEYGTKPQVYYIGLSKEVR

SEQ ID NO: 67805 - DNA, 1104 bp, Desulfovibrio desulfuricans G20
  CDS (1)..(1104): transl_table=11
atgcgtcgaagaacctttctgagcctgctcggtgctgccggactttcggtggcagcgggcaagcccgccgccgcggggggcaatcacagcttttccggctaccccgacagctacggcgttctgcatgattccacccgctgcatcggctgccgcaaatgcgaggaagcgtgccagcaggtgaacaatctgcccatgcccgaaaagccgtttgacgacctttcggtgcttgaaaccaagcgcagaacagatgacgccacctatacagtggtcaacaaatacaacgtggccggccttgaacaccctgtgttccgcaaacagcagtgcaaccactgtctggaacccgcctgcgcctcggcctgctttgtaaaggcgtttaccaaaaaccccgacggctcggttacatacaaccccaagctgtgcgtgggctgccggtactgcatgatcgcctgcccgttcaacgtgcccgcgtttgaatacggtgaagcatatgatccgctgattaccaagtgcaccatgtgtcacccccgcctgcaggaaggcaagctgccgggatgcgttgaaaaatgccccaaggaagctctgactttcggcaagcgcgaagacctgctgcgcatcgcgcgcgacagaatccgcaaaaaccctgaacgctatcaggaccacatctacggcgaacacgaaatgggcggcaccaactggctgtaccttgccggtgtacccttcggcgaactgggtcaggatgaacatctgggcaccaagcccgcgcaggaacataccgccggcgcactgggttccgtgcccatggttgtaggcatctggcccgtgctgcttacgggtgcgtacgccatttccaaacgcaaagataaaatagcgcaggaagaacaggccgccgccgtacgccatgccgtgggcgaaacgcaggccgaagcggacgccaagctgcaggccgccatggaaaaggccgccaaggaaaaagaagccgccattgcccgcgaagtgaaaaaggcaaaggaagaggctgaaaaagagttcgaagcgcgccttgccgctcaaaacgaacccgaatccgccgaatccgggacggaaaagcccgaggaggacgcataa

SEQ ID NO: 67806 - protein, 367 aa, Desulfovibrio desulfuricans G20
MRRRTFLSLLGAAGLSVAAGKPAAAGGNHSFSGYPDSYGVLHDSTRCIGCRKCEEACQQVNNLPMPEKPFDDLSVLETKRRTDDATYTVVNKYNVAGLEHPVFRKQQCNHCLEPACASACFVKAFTKNPDGSVTYNPKLCVGCRYCMIACPFNVPAFEYGEAYDPLITKCTMCHPRLQEGKLPGCVEKCPKEALTFGKREDLLRIARDRIRKNPERYQDHIYGEHEMGGTNWLYLAGVPFGELGQDEHLGTKPAQEHTAGALGSVPMVVGIWPVLLTGAYAISKRKDKIAQEEQAAAVRHAVGETQAEADAKLQAAMEKAAKEKEAAIAREVKKAKEEAEKEFEARLAAQNEPESAESGTEKPEEDA

SEQ ID NO: 67807 - DNA, 858 bp, Desulfovibrio desulfuricans G20
  CDS (1)..(858): transl_table=11
atgacccagcagttcgccatggttatcgattccgccagatgcatcgactgcaaagcgtgcgtggtttcctgcaaagtggcaaacaatgttccggcaggattctcacgcaactggatcaaagcagacggaccggtggtcaaggcgggaaaagggcctttcgggcatttccagccgggcgcgtgcatgcactgcgaatctcccacctgcgtggaagcctgccccacaggcgccacatggaaagacagggagaccggcatagtggaaatagaccccgcactgtgcatcggctgcggcaactgcattcctgcatgcccgtacggggcgcgcttccgtaatccgcaaaggcgcattgccgacaagtgcaactactgccccgaacgccgtgccgccggactgccccccgcatgtgtggacacatgccccaccaaggcgcgggtgttcggcgatattctgaaccccgaaacagaagccgcacggctgcttacccgcaacagcggccatgtgacgcagctgatacacgaaaaaagcaacacggcaccgcacatgtactatgtcggcggcaccgcacccgcaggctggatgcatgaagcaaaggctccggcatccatgcgcgcgcttaccggtgttgtggcaccgggagtcaagggactggtggcgctttcgggcctgggcgtactggttatgctgggcaggcagctgctggacagcagaaaatcaggcgacggaggccacgaccggccacacgcgtccggcagtaatgcgtccggcagcagtgcttccggcagcaatgcttccggcagcaatacatccggcacacaacactctgcgccggcagacaccgaagacagcagggagtag

SEQ ID NO: 67808 - protein, 285 aa, Desulfovibrio desulfuricans G20
MTQQFAMVIDSARCIDCKACVVSCKVANNVPAGFSRNWIKADGPVVKAGKGPFGHFQPGACMHCESPTCVEACPTGATWKDRETGIVEIDPALCIGCGNCIPACPYGARFRNPQRRIADKCNYCPERRAAGLPPACVDTCPTKARVFGDILNPETEAARLLTRNSGHVTQLIHEKSNTAPHMYYVGGTAPAGWMHEAKAPASMRALTGVVAPGVKGLVALSGLGVLVMLGRQLLDSRKSGDGGHDRPHASGSNASGSSASGSNASGSNTSGTQHSAPADTEDSRE

SEQ ID NO: 67809 - DNA, 447 bp, Desulfovibrio desulfuricans G20
  CDS (1)..(447): transl_table=11
atgagcagatacagactgaaactgaacaaaaaacgttgcatccactgcaaggcatgtgaagtgcattgcaaagcgaaaaacaacactccggcaggcatcaagctgggcgtgcacacatcttccgaaccggtgatggtggacggcgtaccccgcatgaaagctgcctatcagtgctgctaccactgcgaaacgcccgaatgcgtggacgtatgccccaccggcgccatgatacggcgcgaatctgacggtatagtatatgttgatcaggaaacttgcatcggatgcgaagcctgcatcgatgcctgcccatggcatattcccgtcttcaacgccgccacagccactgtactcaaatgcgacttctgcatggaccgcgttgacgagggcaagctgcccgcctgtgtcaccgcctgcaccacgcacgcactgagcttcacccgcaaatag

SEQ ID NO: 67810 - protein, 148 aa, Desulfovibrio desulfuricans G20
MSRYRLKLNKKRCIHCKACEVHCKAKNNTPAGIKLGVHTSSEPVMVDGVPRMKAAYQCCYHCETPECVDVCPTGAMIRRESDGIVYVDQETCIGCEACIDACPWHIPVFNAATATVLKCDFCMDRVDEGKLPACVTACTTHALSFTRK

SEQ ID NO: 67811 - DNA, 777 bp, Desulfovibrio desulfuricans G20
  CDS (1)..(777): transl_table=11
atgttcgacagaagaagattcctcaagattgctggtctgtcggccctcggtcttggcgctggttccgcgattggagtggcagaagcgctggctgcgcctaaaaaggatccttacagcgccaatgcccatgcgctgcatgccggtcgctgggccatggttatcgatacccgcaagttcgagactcccgaagacttccagaagctcatcacggcctgccacaagcagcacaatgtgcccgacattcccaatgatcagcacattatgtggctgtggacggacaagtacgagcacaccttccccgaacaggctaacaaccatctgtccgatgaagtgaaggagcgggactttctgctgctgtgcaaccactgcgaaaacccgccgtgcgtccgtgtgtgccccacaaaggccacttacaaacgccccgacggcattgttgccatggactaccaccgctgcatcggctgccggttctgcatggcaggctgcccctacggcgcgcgtagcttcaactacggcaaccccagagaatacctgaaggatatcaccaaccccgctttccccacacgtatgcgcggcgttgttgaaaaatgcaacttctgcgtcgaacgtctggctcaggggctgatgccctcctgcgttgaagcgtctgaaggtgccattgtctttggcgatctgaacgatccggattccgaagtgcgtcaggttctggccgaaaacttcaccatccgccgtaaaccatctctgggcacgcagcccggtgtatactacatcatctaa

SEQ ID NO: 67812 - protein, 258 aa, Desulfovibrio desulfuricans G20
MFDRRRFLKIAGLSALGLGAGSAIGVAEALAAPKKDPYSANAHALHAGRWAMVIDTRKFETPEDFQKLITACHKQHNVPDIPNDQHIMWLWTDKYEHTFPEQANNHLSDEVKERDFLLLCNHCENPPCVRVCPTKATYKRPDGIVAMDYHRCIGCRFCMAGCPYGARSFNYGNPREYLKDITNPAFPTRMRGVVEKCNFCVERLAQGLMPSCVEASEGAIVFGDLNDPDSEVRQVLAENFTIRRKPSLGTQPGVYYII

SEQ ID NO: 67813 - DNA, 768 bp, Desulfovibrio desulfuricans G20
  CDS (1)..(768): transl_table=11
atgtcctctaaaaaggaattcaaaatcaaatggggtatggcaatagacctcgataaatgcacgggctgcggcgcgtgcatggtcgcctgccaggcagaaaacaacattgcccctgctccggacgcaaccaacaagctgaaaacgctcaactggcttgtggtgtacgagctgtccaacaagaaaccgtttcccgaccacgatgtggcatacctgccgcggccctgccagcagtgcggcaacccgccctgcgtttcggtatgtcctgttatcgccaccgacaaaaacgaagaaggcggcatagtcagtcaggtaaccccccgctgtatcggctgccggtactgcatggccgcctgcccctaccatgcccgctacttcaactggtacgatcccatctggccggaaggcatggaaaaaacactgacgcccgatgtgtctgtaagaccccgcggcgtagtggaaaaatgcaccttctgccatcatcgcatgatggctgccagagacaaggcaagagtggaagggcgtgatcccgatgcactggaagatggcgaatacatcacctcgtgcaccgaggcatgccccaacggtgccatagtgttcggcgatctgctgaaccctgaccacaaggtgtatgaactgtcgcgcagcaagtacgccttccggctgcttgaacgtctgggtgccgacacgcaggtgtactacctcagccgtcgcgaatgggtccgccgtcttggcgacaactatcttgaacacgaaaaggtcaaggggtag

SEQ ID NO: 67814 - protein, 255 aa, Desulfovibrio desulfuricans G20
MSSKKEFKIKWGMAIDLDKCTGCGACMVACQAENNIAPAPDATNKLKTLNWLVVYELSNKKPFPDHDVAYLPRPCQQCGNPPCVSVCPVIATDKNEEGGIVSQVTPRCIGCRYCMAACPYHARYFNWYDPIWPEGMEKTLTPDVSVRPRGVVEKCTFCHHRMMAARDKARVEGRDPDALEDGEYITSCTEACPNGAIVFGDLLNPDHKVYELSRSKYAFRLLERLGADTQVYYLSRREWVRRLGDNYLEHEKVKG

SEQ ID NO: 67815 - DNA, 591 bp, Thiomicrospira denitrificans ATCC 33889
  CDS (1)..(591): transl_table=11
atgagcaagccagaatatgcaagaatgaaattttattgtgatgaggatctttgtatcgactgcaatggttgtgttgtagcttgtaaagaagcacacgaagttcctgttggaataaatagaagaaaagttgtaactatcaatgagggtattgtaggtaaagagatgtctatgtctatggcgtgtatgcattgtactgatgcaccatgccaacaagtctgcccagttgactgtttttatataagagccgatggtatagttcttcatgacaaagataagtgtatcggttgtggatactgtctatttgcttgtccttttggagcgccacagttccctcaagatggagcatttggtacaaaaggaaaaatggataagtgtactatgtgtgctggtggtccagaagagactaactcacatgaagagtttgaaaaatatggacaaaatagaatctcagagggcaaagttccaatgtgtgcttctatgtgttcaacaaaggctctcttagtaggtgatgcaaacgaagtagcagctattaaaacacatagagcagtagctcatggaaaaggcatatcaactcagtcttatggttggtag

SEQ ID NO: 67816 - protein, 196 aa, Thiomicrospira denitrificans ATCC 33889
MSKPEYARMKFYCDEDLCIDCNGCVVACKEAHEVPVGINRRKVVTINEGIVGKEMSMSMACMHCTDAPCQQVCPVDCFYIRADGIVLHDKDKCIGCGYCLFACPFGAPQFPQDGAFGTKGKMDKCTMCAGGPEETNSHEEFEKYGQNRISEGKVPMCASMCSTKALLVGDANEVAAIKTHRAVAHGKGISTQSYGW

SEQ ID NO: 67817 - DNA, 654 bp, Magnetospirillum magnetotacticum MS-1
  CDS (1)..(654)
atgaccaaatgggccatcgtcgccgatctgggccgctgcgtcggctgccagacctgcaccacggcgtgccgtcacgccaatgccacgccgcccggcgtgcagtaccgcaaggtgctggacatggaggtgggcaccttccccgatgtgcgccgcgtcttcgttcccgtcggctgcatgcattgcgacgagccgccgtgccgcgacgtctgtcccaccacggcgaccaccaagcgcgccgatggcatggtgatgatcgactacgatatctgcatcggctgcggctattgcatcgtcgcctgcccctatcaggcccgctacaaggtttccaagcccaccttcgccttcaaggatcaagagacgcaaaatgagcgggcgcgcttcgacgaacgcttgcttggcgtcgcgcagaagtgcaccttctgcgtcgaccgggtcgattacgggctggccaacgggttgacccccggcgtggcaccggaagcgactcccgcctgcgtcaattcctgtctgtccaaggcgttgacgttcggcgacaccgataatcctgacagcaacgtcagcaagctgctgaagcggtacaaatcgttccgcatgcacgaggaactcgggaccggtcccaacattcactatttgtgggagaccgaggacgaatga

SEQ ID NO: 67818 - protein, 217 aa, Magnetospirillum magnetotacticum MS-1
MTKWAIVADLGRCVGCQTCTTACRHANATPPGVQYRKVLDMEVGTFPDVRRVFVPVGCMHCDEPPCRDVCPTTATTKRADGMVMIDYDICIGCGYCIVACPYQARYKVSKPTFAFKDQETQNERARFDERLLGVAQKCTFCVDRVDYGLANGLTPGVAPEATPACVNSCLSKALTFGDTDNPDSNVSKLLKRYKSFRMHEELGTGPNIHYLWETEDE

SEQ ID NO: 67819 - DNA, 744 bp, Magnetospirillum magnetotacticum MS-1
  CDS (1)..(744)
atggtcatcgacctggaaaagtgcaccggctgccaagcctgcaccaccgcctgtcaggtggaaaataaccggctgcccggtgagaactggcaggacgtcctgttctacgccgagggtgaatatccctcgggcaagttcagctggctgccgcgtccctgcatgcactgcgagaacccgtcctgccgcgaggtctgcccgaccggggcgaccttcaaggacaaggacggctttgtcctggtggattgggagaaatgcatcggctgcaaatactgcatggtcgcctgcccctacggcgtgcgcttctatgccgaggaaaagcagccggttcagcccgacatccgttcggtgttcccaggcgacggcgacaagatgtggaacccgccgtggcagatgcccgaggcgcggcgcgatcccaagcacggcgtcggcatccagcccaccaacgtggtctccaaatgcaccttctgctatcaccgggtttccaaggctccggcgggaaccgtggatctcgatcccagcaatccggctttgcgcgatttcgtcccggcctgcgtcgtcacctgcgcgccctcggcccgctatttcggcgacctcgacacgcccaccagcgaggttcgccgtctcatcgccgagaagcggggtacccgcctgaaggaggaaaccggcaaccggccccaggtctactacctggccggtgagcaatcctccatccctgaaacccgctccacgcgcatcaaatcgtaa

SEQ ID NO: 67820 - protein, 247 aa, Magnetospirillum magnetotacticum MS-1
MVIDLEKCTGCQACTTACQVENNRLPGENWQDVLFYAEGEYPSGKFSWLPRPCMHCENPSCREVCPTGATFKDKDGFVLVDWEKCIGCKYCMVACPYGVRFYAEEKQPVQPDIRSVFPGDGDKMWNPPWQMPEARRDPKHGVGIQPTNVVSKCTFCYHRVSKAPAGTVDLDPSNPALRDFVPACVVTCAPSARYFGDLDTPTSEVRRLIAEKRGTRLKEETGNRPQVYYLAGEQSSIPETRSTRIKS

SEQ ID NO: 67821 - DNA, 1020 bp, Magnetospirillum magnetotacticum MS-1
  CDS (1)..(1020)
atgaccatcaccagacgcaattttctggcgacggcggcggcgggtggaacagcggcagccgccgcctgcgccaccctcgccccctccggcgcccaggcgcgggaaagccatcaggttcccgagaacgccgtcggcctgctttacgacgccaccttgtgcatcggctgcaaggcctgcatgtcggcgtgcaaggaggccaacagcctgccgctggaagacaatatcggcgagaagctgtgggacacgccgctggagctttccggcaagacctacaacgtcatcaagatctatcagtccggcaccatggaaaataaggacaaggccgagaacggctttgcccatatcaagcgctcctgcctgcactgcgccgatccgtcctgcgtgtcggcctgccccgtctcggccatgcagaagcggcctaccgacggtgtcgtgacctataacaaggacgcctgcatcggctgccgctactgcgtcgccgcctgccccttcggcgttccccagttccagtacgacacacccacgccgcagatcgccaagtgccagctgtgcaagcacaggatggaacagggcaagtatgccgcctgcgcggaaagctgccccaccggcgccaccattttcggctcctacaaggcgctttcggaagagatcgagcggcgccgggccatgaagccgggcgagcccaatctgttcccccgccgcacccccgattcgggcgacacgcacgaaaaggccgcgccggaatatgtggactatgtctacggccagaaggacgcggggggcacccaggtgcgctacctgtccggggtcgccttcgacaagctggccctgcccatgggcctgcccgaacggtcctacgccgcagattccgagacccttcagcacaccctctatggcgggatgatcctgccggtggtggcgctggccggtctggtcaccgctgcctggaagggctcgaaggaccaccacgacgacgatgatttcgacatgttcgatcatccggaaggggggcacaagtaa

SEQ ID NO: 67822 - protein, 339 aa, Magnetospirillum magnetotacticum MS-1
MTITRRNFLATAAAGGTAAAAACATLAPSGAQARESHQVPENAVGLLYDATLCIGCKACMSACKEANSLPLEDNIGEKLWDTPLELSGKTYNVIKIYQSGTMENKDKAENGFAHIKRSCLHCADPSCVSACPVSAMQKRPTDGVVTYNKDACIGCRYCVAACPFGVPQFQYDTPTPQIAKCQLCKHRMEQGKYAACAESCPTGATIFGSYKALSEEIERRRAMKPGEPNLFPRRTPDSGDTHEKAAPEYVDYVYGQKDAGGTQVRYLSGVAFDKLALPMGLPERSYAADSETLQHTLYGGMILPVVALAGLVTAAWKGSKDHHDDDDFDMFDHPEGGHK

SEQ ID NO: 67823 - DNA, 678 bp, Actinobacillus pleuropneumoniae serovar 1 str. 4074
  CDS (1)..(678)
atgacttgcacccgtagagacttcgtctcaggggcaggtgctatcgctgtcgtagcaagcactgggcttgctacctcagtaactcttgctactgagaaagaagagaaaaaaattcgctatgcgatggtgcacgatgaaacctcttgtatcggttgtaccgcttgtatggacgcatgtcgtacgacaaacaaagtaccggaaggcgtttcacgtttagaaattatccgtagcgagccttatggcgaattccctaatgtcgagtatgaatttttccgtcaatcttgccaacactgtacgaatgctccgtgcgtagcggtatgtccgactggcgcttcattcgtagatccggaaaccggcattgttgatgtacattcagacttatgtgtcggttgccaatactgtatcgcagtttgcccgtaccgtgtacgttttatccatccggagaaaaaatccgcagacaaatgtaacttctgtcgtgatactaaccttgcggaaggtaaacaaccggcttgtgtagaagcatgcccgactaaagcattaacctttggcgatatgaacgatcacaatagcgaagtgtacaaaaaagtgcgtgaaaatcctgtgtatcgtactaaagttgcgttaggtaccgagcctaacttataccacattccatttggcaagggggagcatagataa

SEQ ID NO: 67824 - protein, 225 aa, Actinobacillus pleuropneumoniae serovar 1 str. 4074
MTCTRRDFVSGAGAIAVVASTGLATSVTLATEKEEKKIRYAMVHDETSCIGCTACMDACRTTNKVPEGVSRLEIIRSEPYGEFPNVEYEFFRQSCQHCTNAPCVAVCPTGASFVDPETGIVDVHSDLCVGCQYCIAVCPYRVRFIHPEKKSADKCNFCRDTNLAEGKQPACVEACPTKALTFGDMNDHNSEVYKKVRENPVYRTKVALGTEPNLYHIPFGKGEHR

SEQ ID NO: 67825 - DNA, 678 bp, Haemophilus influenzae R2846
  CDS (1)..(678)
atgacagtctgctcacgccgaaactttgtttctggcatgggggcagtgatccttatgacgggaacatctttaccttcttttgcaaaagaagacaaggcggataaacctaaacgttacgcaatgatacatgatgaaaatgcgtgtatcggttgtacagcctgtatggacgcatgtcgtgatgtaaaccaagtgccagaaggcgtttctcgcttagagattctacgtagtgaaccttatggggaatttccaaatcaagaatacgagttctttcgtcaatcttgccaacattgtacaaatgcaccttgtgtagcagtttgtccaactggtgcatcttttattgataaagagactggcattgtagatgtacataaagatttatgcataggctgccaatactgtatagcagtttgcccatatcgtgtacgttttattcatccaatacatcgtaccgcagataaatgtaacttctgccgcgatacaaatttagccaatggtaaacaacctgcttgtgtagaggcttgcccaaccaaagcattaacctttggggatatgaatgatccaacaagtgcagtttcacgtaaagtgaaagaaaaaccggtttatcgcactaaagtggaattaggtacacaaccaaacttatatcacattccattccaacatggggagcctagaagatga

SEQ ID NO: 67826 - protein, 225 aa, Haemophilus influenzae R2846
MTVCSRRNFVSGMGAVILMTGTSLPSFAKEDKADKPKRYAMIHDENACIGCTACMDACRDVNQVPEGVSRLEILRSEPYGEFPNQEYEFFRQSCQHCTNAPCVAVCPTGASFIDKETGIVDVHKDLCIGCQYCIAVCPYRVRFIHPIHRTADKCNFCRDTNLANGKQPACVEACPTKALTFGDMNDPTSAVSRKVKEKPVYRTKVELGTQPNLYHIPFQHGEPRR

SEQ ID NO: 67827 - DNA, 684 bp, Thiobacillus denitrificans ATCC 25259
  CDS (1)..(684)
ttggtcatcgaccttgacgtgtgcgtgggctgtcatgcctgcgccatcgcctgcaaggagtggaacgcctccggcaccatcggcccgttgtcggattaccagccctacggcgccgagccgtcgggcgtctggttcaaccggatccgccattacgagatggacgagtatccgaacaacaagaccgtcaacttcccgatgtcgtgcatgcactgcgaggacgccgactgcgtcacggtgtgcccgaccggcgcgtcgtacaagcgtgccgaggacggcatcgtgctgatcgaccaggataagtgcatgggctgcaactactgctcctgggcctgcccctacggcgcgcgcgaactcgaccgatcgagcggcacgatgaagaaatgcacgctgtgcgtcgaccgtatctacgacgagaacctgccggtcgaggagcgccaaccctcgtgcgtgctgacctgcccggcgcacgcgcgcatgttcggcgacttcgacgatcccgattcggcggtgtcgcgcgtggtgcgcgagcgcggcgggtatccgctgatgcccgagctcaactacaacccgacgaacacctatctgccgatccgtcgcaagccggtgatcggggtggaaaccaaaccgaagggcggcttgaaggaaagcatcaagcagttcgccaacaggctggtgcgccgttga

SEQ ID NO: 67828 - protein, 227 aa, Thiobacillus denitrificans ATCC 25259
MVIDLDVCVGCHACAIACKEWNASGTIGPLSDYQPYGAEPSGVWFNRIRHYEMDEYPNNKTVNFPMSCMHCEDADCVTVCPTGASYKRAEDGIVLIDQDKCMGCNYCSWACPYGARELDRSSGTMKKCTLCVDRIYDENLPVEERQPSCVLTCPAHARMFGDFDDPDSAVSRVVRERGGYPLMPELNYNPTNTYLPIRRKPVIGVETKPKGGLKESIKQFANRLVRR

SEQ ID NO: 67829 - DNA, 831 bp, Burkholderia mallei 10229
  CDS (1)..(831)
atgcggcgaaacgccgttgacgaggaggatgcgatgacgcaaatggcgctcgtgatcgatctgaacgtgtgcgtggggtgccacgcgtgcgtaacgagttgcaaggaatggaacacgtcgggcgacgcgggcgcgctgtctgacttgcgcccatatgacgccgatccgtccggcaccttcttcaaccgcgtgcagacgttcgaggcgggcgaatttccgctcgccgacacgatccacttcccgaagtcgtgcctgcattgcgaagacccgccgtgcgtgccggtctgcccgacgggcgcgagctacaagcgcgaggaaaacgggctcgtgctcgtcgattacgacaagtgcatcggctgcaagtactgcacgtgggcgtgcccgtatggcgcgcgcgagctcgacgaagtgcgcaaggagatgacgaagtgcacgctttgcgcggaccgcattcacgacgagacgctgcccgagcgcgatcgcaagcccgcgtgcgtgctcgcgtgcccgacgtcggcgcgcctgttcggcgacatccacgatccgaattcgaccgtgtcgcaggcaatccgcgagcgcggcggctatcagttgatgccggaatggggaacgcggcccgcgaatcattacctgccgcgccgcacgacgaccgcgtgcgggagcgggggcggcggtggtaacgacgggagcggaggcggcggttgcggtagcggcgccgcgtgcgcgtgccggccggcggacgcgaagcccgcgcccgtctcggccggcgacgcgctcgcgcacgggcagccgaatctcgccgcgctcgcgaagcgcatccgatctgaatga

SEQ ID NO: 67830 - protein, 276 aa, Burkholderia mallei 10229
MRRNAVDEEDAMTQMALVIDLNVCVGCHACVTSCKEWNTSGDAGALSDLRPYDADPSGTFFNRVQTFEAGEFPLADTIHFPKSCLHCEDPPCVPVCPTGASYKREENGLVLVDYDKCIGCKYCTWACPYGARELDEVRKEMTKCTLCADRIHDETLPERDRKPACVLACPTSARLFGDIHDPNSTVSQAIRERGGYQLMPEWGTRPANHYLPRRTTTACGSGGGGGNDGSGGGGCGSGAACACRPADAKPAPVSAGDALAHGQPNLAALAKRIRSE

SEQ ID NO: 67831 - DNA, 831 bp, Burkholderia mallei 10399
  CDS (1)..(831)
atgcggcgaaacgccgttgacgaggaggatgcgatgacgcaaatggcgctcgtgatcgatctgaacgtgtgcgtggggtgccacgcgtgcgtaacgagttgcaaggaatggaacacgtcgggcgacgcgggcgcgctgtctgacttgcgcccatatgacgccgatccgtccggcaccttcttcaaccgcgtgcagacgttcgaggcgggcgaatttccgctcgccgacacgatccacttcccgaagtcgtgcctgcattgcgaagacccgccgtgcgtgccggtctgcccgacgggcgcgagctacaagcgcgaggaagacgggctcgtgctcgtcgattacgacaagtgcatcggctgcaagtactgcacgtgggcgtgcccgtatggcgcgcgcgagctcgacgaagtgcgcaaggagatgacgaagtgcacgctttgcgcggaccgcattcacgacgagacgctgcccgagcgcgatcgcaagcccgcgtgcgtgctcgcgtgcccgacgtcggcgcgcctgttcggcgacatccacgatccgaattcgaccgtgtcgcaggcaatccgcgagcgcggcggctatcagttgatgccggaatggggaacgcggcccgcgaatcattacctgccgcgccgcacgacgaccgcgtgcgggagcgggggcggcggtggtaacgacgggagcggaggcggcggttgcggtagcggcgccgcgtgcgcgtgccggccggcggacgcgaagcccgcgcccgtctcggccggcgacgcgctcgcgcacgggcagccgaatctcgccgcgctcgcgaagcgcatccgatctgaatga

SEQ ID NO: 67832 - protein, 276 aa, Burkholderia mallei 10399
MRRNAVDEEDAMTQMALVIDLNVCVGCHACVTSCKEWNTSGDAGALSDLRPYDADPSGTFFNRVQTFEAGEFPLADTIHFPKSCLHCEDPPCVPVCPTGASYKREEDGLVLVDYDKCIGCKYCTWACPYGARELDEVRKEMTKCTLCADRIHDETLPERDRKPACVLACPTSARLFGDIHDPNSTVSQAIRERGGYQLMPEWGTRPANHYLPRRTTTACGSGGGGGNDGSGGGGCGSGAACACRPADAKPAPVSAGDALAHGQPNLAALAKRIRSE

SEQ ID NO: 67833 - DNA, 831 bp, Burkholderia pseudomallei Pasteur
  CDS (1)..(831)
atgcggcgaaacgccgttgacgaggaggatgcgatgacgcaaatggcgctcgtgatcgatctgaacgtgtgcgtggggtgccacgcgtgcgtgacgagctgcaaggaatggaacacgtcgggcgacgcgggcgcgctgtctgacttgcgcccatatgacgccgatccgtccggcaccttcttcaaccgcgtgcagacgttcgaggcgggcgaatttccgctcgccgacacgatccacttcccgaagtcgtgcctgcattgcgaagacccgccgtgcgtgccggtctgcccgacgggcgcgagctacaagcgcgaggaagacgggctcgtgctcgtcgattacgacaagtgcatcggctgcaagtactgcacgtgggcgtgcccatatggcgcgcgcgagctcgacgaagtgcgcaaggagatgacgaagtgcacgctttgcgcggaccgcattcacgacgagacgctgcccgagcgcgatcgcaagcccgcgtgcgtgctcgcgtgcccgacgtcggcgcgcctgttcggcgacatccacgatccgaattcgaccgtgtcacaggcaatccgcgagcgcggcggctatcagttgatgccggaatggggaacgcggcccgcgaatcattacctgccgcgccgcacgacgaccgcgtgcgggagcgggggcggcggtggtaacgacgggagcggaggcggcggttgcggtagcggcgccgcgtgcgcgtgccggccggcggacgcgaagcccgcgcccgtctcggccggcgacacgctcgcgcacgggcagccgaatctcgccgcgctcgcgaagcgcatccgatctgaatga

SEQ ID NO: 67834 - protein, 276 aa, Burkholderia pseudomallei Pasteur
MRRNAVDEEDAMTQMALVIDLNVCVGCHACVTSCKEWNTSGDAGALSDLRPYDADPSGTFFNRVQTFEAGEFPLADTIHFPKSCLHCEDPPCVPVCPTGASYKREEDGLVLVDYDKCIGCKYCTWACPYGARELDEVRKEMTKCTLCADRIHDETLPERDRKPACVLACPTSARLFGDIHDPNSTVSQAIRERGGYQLMPEWGTRPANHYLPRRTTTACGSGGGGGNDGSGGGGCGSGAACACRPADAKPAPVSAGDTLAHGQPNLAALAKRIRSE

SEQ ID NO: 67835 - DNA, 567 bp, Chlorobium limicola DSM 245
  CDS (1)..(567): transl_table=11
gtgagcaacaagaaaaattatggaatggttatcgacaccagggtctgtgtcggctgttcggcctgtgtctatacctgcaagcaggaaaacaatgtccctgaagggtactgccgcgactgggttgtgcaggagtcgggaggagagtatccgaaactgaccatggagaaccgatcggagcgctgccagcactgcgaaaacgcgccctgcgtcacctactgcccgacaagggcctcgcactacgccgaagacggcaccgtgcagatcaaccgttcgctctgcaccggctgcaaggcctgcatggccgcctgcccctatgatgcccggtacgtgcatcccgaagggtatgttgataaatgctcgctctgcaagcaccggatcgaacagggccttgaaaccgcctgtgtttcgatctgccctaccggcagcctgaaccttgtcgatttcaacaacatggatgagaagacaaaagagctgttgaaaggtaaaatcgtttaccgccagaaagaacatgcaggaacggagccgagcctgcagtggatttccgcaagcaataaacccggagcgtaa

SEQ ID NO: 67836 - protein, 188 aa, Chlorobium limicola DSM 245
MSNKKNYGMVIDTRVCVGCSACVYTCKQENNVPEGYCRDWVVQESGGEYPKLTMENRSERCQHCENAPCVTYCPTRASHYAEDGTVQINRSLCTGCKACMAACPYDARYVHPEGYVDKCSLCKHRIEQGLETACVSICPTGSLNLVDFNNMDEKTKELLKGKIVYRQKEHAGTEPSLQWISASNKPGA

SEQ ID NO: 67837 - DNA, 1554 bp, Chlorobium limicola DSM 245
  CDS (1)..(1554): transl_table=11
atgaactacggttttgttatcgatgcccggaagtgtatcggatgccatgcatgcacggttgcctgcaagtccgaaaaccaggttcctctcggagtgaaccgtacctgggtgaaatatgtcgaaaaaggcacttttcccgatacacggcgctactttaccgttctgcgctgcaaccactgcgccgaacctccctgcgtcgatatctgcccggtagaggcgctgcagaagcgtccggacggcattgtggatttcgacagccgccgctgcatcggctgtaaggcctgtgcccaggcatgcccttacaatgcgctttacattgaccccgatacgcatacgtcggcgaagtgcaactattgcgcgcatcgcaaggaggtcggtctccagccggcatgcgtggccatttgtccgcagcaggcaatcgtttcgggcgatctcgacgatccgggcagcaaaatcgccgctctggttgccggagagcggaccgtcgtgcgcaagcccgaaaaaggcactctgccgaaactgttctatatcaacggagacggcccgtcgctcgatcctatggcggcaccgctgctggaggagtatcactggagcgctcagtcaagaggtgtcgggcattttgccgaaaaaggaaaaggcgcaccgggaatcgaaaagcgcacccatgcggcgccttcgaccggtccgaaaacccgacgggtctacgacattccgtcgaaaggcgccgtctggggatgggaggtgccggcctatgtgacggccaaggcagtctcgtccggagtctttcttgtattttttgcgctgcttgtggtttttcagctgcaactttccgattcgcttcagtgggctgcgtgggcggtttcgtttatatttctcgctcttacgggcggatttcttatcaaggatctcgatcgtcccgatcgtttttcatcggtcatgctgcgtccgcaattcggctcatggcttgtccgcggcggtcttaccataaccggctacggagcctttctcgccttgtggggcggggccaggcttctgcggattcccgtgcttgaaaccgccgcgctctggggcggcgccctgtttgcgatcgtgacggcaatttacaccgcgtttcttttcggcgccgcgaaagggcgcgacttctggcagagtccgatgctgcttctgcatatgtttctgaactccctgctcgccggcggctcggccatgctgctgctcgggcttggcaccggaagctcgtcggaacttctcgggctgctccgtcagcttctgacggcaggtttcgggctgcatatggcaatcatgctgatcgagctctatggaaagcatccctctgtaggggctgaacgtgcggctgaaattatccgtgagggcagcctgaaaaaccagttctggagcggaagttttctcggaggaaacctgctgcctcttctcgttacgctgttttctccggatccgctgatgcttgccgctgcgtcccttctcggactgtgcggcgtgttcttcacagaaaaagtctgggttcaggccccgcagagaatacctttaagttaa

SEQ ID NO: 67838 - protein, 517 aa, Chlorobium limicola DSM 245
MNYGFVIDARKCIGCHACTVACKSENQVPLGVNRTWVKYVEKGTFPDTRRYFTVLRCNHCAEPPCVDICPVEALQKRPDGIVDFDSRRCIGCKACAQACPYNALYIDPDTHTSAKCNYCAHRKEVGLQPACVAICPQQAIVSGDLDDPGSKIAALVAGERTVVRKPEKGTLPKLFYINGDGPSLDPMAAPLLEEYHWSAQSRGVGHFAEKGKGAPGIEKRTHAAPSTGPKTRRVYDIPSKGAVWGWEVPAYVTAKAVSSGVFLVFFALLVVFQLQLSDSLQWAAWAVSFIFLALTGGFLIKDLDRPDRFSSVMLRPQFGSWLVRGGLTITGYGAFLALWGGARLLRIPVLETAALWGGALFAIVTAIYTAFLFGAAKGRDFWQSPMLLLHMFLNSLLAGGSAMLLLGLGTGSSSELLGLLRQLLTAGFGLHMAIMLIELYGKHPSVGAERAAEIIREGSLKNQFWSGSFLGGNLLPLLVTLFSPDPLMLAAASLLGLCGVFFTEKVWVQAPQRIPLS

SEQ ID NO: 67839 - DNA, 777 bp, Chlorobium limicola DSM 245
  CDS (1)..(777): transl_table=11
atgaacgaagatcgcagatcatttatcaagaaagccggtatcggcattcttgccggcataggatcggcagccggcctgtttccggcgctttcgctcgaaaaaaccgtgcttccggcatgggacgagaagcccgagcccggcaaacatcgctggggcatgcttatcgatacccgcaagtgctccggcaactgcagtgagtgcgttgccgcctgccacttcacgcacaacgtgcctgatttcggcaatcgcaaggacgaggtgaagtggatatggaaaagctcctatgaaaacgtgtttcctacggcgagccagcagtttcagagtcccggggtgaccgaaaggccctaccttgccctctgcaaccactgcgccgagcctccctgcacaaaagcttgtccgaccgaagccaccttcaggcggtgggacggcatcgtctccatggactaccaccgctgcatcggctgtcgcttctgcatggctgcctgtccctacggttcacgcagcttcaactggcgcgatccgagagagggtatcaagcttgcgagtaccgggtatccgacccgcatgcagggtgtggtggagaaatgcaacttctgttccgaacggctggtgaaaggactcgatccggcctgcgtagaagcatgtccggagcaggcgctggtgttcggcgacctgaacgatcccggttcggagatccgcaagctgcttgaatccaccgaaaccatgcagcgcaaacccgaactcggcacgaaaccttcggtcttttatatcatttaa

SEQ ID NO: 67840 - protein, 258 aa, Chlorobium limicola DSM 245
MNEDRRSFIKKAGIGILAGIGSAAGLFPALSLEKTVLPAWDEKPEPGKHRWGMLIDTRKCSGNCSECVAACHFTHNVPDFGNRKDEVKWIWKSSYENVFPTASQQFQSPGVTERPYLALCNHCAEPPCTKACPTEATFRRWDGIVSMDYHRCIGCRFCMAACPYGSRSFNWRDPREGIKLASTGYPTRMQGVVEKCNFCSERLVKGLDPACVEACPEQALVFGDLNDPGSEIRKLLESTETMQRKPELGTKPSVFYII

SEQ ID NO: 67841 - DNA, 792 bp, Solibacter usitatus Ellin6076
  CDS (1)..(792): transl_table=11
gtgcggccccgccgcgcgcgcaaaggtggtgagcgcatgagtaccgaaacccgcaagaaggccgccggccgctacggcatgacgatcgatatcgaccgctgcaatggatgcggttcctgcatggttgcctgcgcggtggaaaataacgttgcccccgccgaaagcggcgctaccgatcgcaccggcatcacctggattcgcgtttttcagatcgataacggcggtgagggcgcggacaagcgctccgcttttatccccatgctgtgccagcactgcggcgatgctccgtgcgtcagcgtctgcccgcagcaggcgatcgacgtcaaccccgtcaccgggatcgtcgaacagatgccggagcgctgcctcggctgccgctactgcatggtcgcctgcccctatcatgcgcgctatttcaactggtgggatccggcgtggccccccggcatggagaagacgttgaatcccgacgtcgcgccgcgtatgcgcggagtggtcgagaagtgcaacttctgccacggccgctggcacgccgccaaacaagcagcgaccggcgatggccttcccgggtacacaccggcctgcgcggaggcctgccccacgcaagccatccgtttcggcaacctcgacgagcccgctgccgaagttgcgcgcggatcgcaggatcccaacagcttccgtctgctggaatccatcgacaccgatcccaagatctactaccgctctaagaagaagtgggtccgcgaagccgccaaggcgcctcgccccggaaaggagaatctccgtggttaa

SEQ ID NO: 67842 - protein, 263 aa, Solibacter usitatus Ellin6076
MRPRRARKGGERMSTETRKKAAGRYGMTIDIDRCNGCGSCMVACAVENNVAPAESGATDRTGITWIRVFQIDNGGEGADKRSAFIPMLCQHCGDAPCVSVCPQQAIDVNPVTGIVEQMPERCLGCRYCMVACPYHARYFNWWDPAWPPGMEKTLNPDVAPRMRGVVEKCNFCHGRWHAAKQAATGDGLPGYTPACAEACPTQAIRFGNLDEPAAEVARGSQDPNSFRLLESIDTDPKIYYRSKKKWVREAAKAPRPGKENLRG

SEQ ID NO: 67843 - DNA, 567 bp, Chlorobium phaeobacteroides DSM 266
  CDS (1)..(567): transl_table=11
gtgagcaacaaaaaaagctatggaatggtcatcgacaccagggtctgcgtcgcctgctcagcctgtgtctatgcatgtaaatcagaaaacggcatacccgaagggtactgccgcgactgggtagtccaggaaaccgaagggacgctgcccaaactcaccatggaaaaccgctcggagcgctgccagcactgcgacaacgccccctgcgtcacctactgtccaaccagagcgtcgcactatgccgaagacgggacggtgcagatcaaccggtcgcgctgcacaggatgcaaagcctgccttgccgcatgcccctacgatgcacgatacgtccatcccgaaggctttgtcgacaaatgctcgctctgtcagcaccgacttgaaaaagggctcaaaaccgcatgtgtctcgatctgtcccacaggcagtctgaatctggtcgatttcaacgatcccgaacaggaagcccaacaactcatgaacggcaaactcgtctaccggcaaaaagagcacgccggcacggaaccaagcctctactggatttctgcaagcaataaacccggagcgtaa

SEQ ID NO: 67844 - protein, 188 aa, Chlorobium phaeobacteroides DSM 266
MSNKKSYGMVIDTRVCVACSACVYACKSENGIPEGYCRDWVVQETEGTLPKLTMENRSERCQHCDNAPCVTYCPTRASHYAEDGTVQINRSRCTGCKACLAACPYDARYVHPEGFVDKCSLCQHRLEKGLKTACVSICPTGSLNLVDFNDPEQEAQQLMNGKLVYRQKEHAGTEPSLYWISASNKPGA

SEQ ID NO: 67845 - DNA, 600 bp, Chlorobium phaeobacteroides BS1
  CDS (1)..(600): transl_table=11
atggcacgttatggaatggtaatggacatgcgactttgcgtcggttgtcaggcatgcatggcagcatgttcaatggaaaatcagaccccctactggaacggcaaattccgcacccacgtagaagatattgagcacgggagctatcctgacgtacgcagggagtttctgccaagactctgcatgcattgtgaaaataccccgtgtctttcagcctgcccttcaggcgccacgtacaagaccgaagacggcattatacggataaactatgaccgttgcatgggatgttacgcctgttcgatcgcgtgcccatacgacgcccgatatccttatgaccggaacgatgtctcaactgctgaaacactctatggggacgatctctcgcaccgtgcgccacatgtcgacaagtgcagtttttgcgaacacagggttcaggaaggactgaaacccggatgcgccggcacctgcccgaccaatgcacgaatattcggcgatcttgatgatccgcaaagcgaggttcataaactgtcaaaaaccggaaaggccaaaccgctccggcctgaactcggaaccgcacccaaagttttttacataccgtcctga

SEQ ID NO: 67846 - protein, 199 aa, Chlorobium phaeobacteroides BS1
MARYGMVMDMRLCVGCQACMAACSMENQTPYWNGKFRTHVEDIEHGSYPDVRREFLPRLCMHCENTPCLSACPSGATYKTEDGIIRINYDRCMGCYACSIACPYDARYPYDRNDVSTAETLYGDDLSHRAPHVDKCSFCEHRVQEGLKPGCAGTCPTNARIFGDLDDPQSEVHKLSKTGKAKPLRPELGTAPKVFYIPS

SEQ ID NO: 67847 - DNA, 816 bp, Geobacter metallireducens GS-15
  CDS (1)..(816): transl_table=11
atggggaactggttacggcaggacatccccagggaagcctccggagcgagttggtcgagatatagggaagccgcgcaagcggtcatcgggattgagtcgattatggaaacaatgacgagtcagtacagatgggggatggttgtcgaccttgatcggtgcaccggctgcggcgcttgcgttgttgcctgtcaggcggagaacaacgtggccatctgcggcaagaaggagatatccgaaggacgcaacatgcactggttacgcatcgagcggttctgggtgggacagtatccggacgtgcgggcgcgctttctcccggtactctgtcagcactgtcatgacgccccctgtgagccggtctgcccggtttatgccagctaccacaaccccgacggtcttaatgggcaggtgtacaaccgctgcgtcggcaccaggtactgcggtaataactgcccctatgccgtaagagtcttcaacttctacaaccacgaatggcccaaccccctcgataatcaactttctccggacatgaccgtgcgtacccggggagtgatggaaaaatgcactttctgcatccagcgcatccgaagggccaaggaagatgccaagtccgaaaatcgcaccattcgtgacggagagatacaaccggcctgcgcccagacctgtccaaccgacgctctggtgttcgggaacatggccgaccctcggagccgggtcgccatcctttcccgcagccccaggcgcttccggctgctggagcatctgggcacccacccctcgatttgctatctcaagggaggaggacgcgagcatgtctga

SEQ ID NO: 67848 - protein, 271 aa, Geobacter metallireducens GS-15
MGNWLRQDIPREASGASWSRYREAAQAVIGIESIMETMTSQYRWGMVVDLDRCTGCGACVVACQAENNVAICGKKEISEGRNMHWLRIERFWVGQYPDVRARFLPVLCQHCHDAPCEPVCPVYASYHNPDGLNGQVYNRCVGTRYCGNNCPYAVRVFNFYNHEWPNPLDNQLSPDMTVRTRGVMEKCTFCIQRIRRAKEDAKSENRTIRDGEIQPACAQTCPTDALVFGNMADPRSRVAILSRSPRRFRLLEHLGTHPSICYLKGGGREHV

SEQ ID NO: 67849 - DNA, 543 bp, Desulfuromonas acetoxidans DSM 684
  CDS (1)..(543): transl_table=11
atggctcgctatgcaatggtgatggacaccaggaaatgcatcggctgtcattcctgtacagtcgcttgcaaagttcgtaatgaactcccgacagatatgatctacaacccggtgaccacagatggtccacacggcaaatttcccaacctgagcatgcgctttttgcctttgctctgcatgcactgcgacaattctccctgtgttgatgcctgcccgaccggcgcttcaattcaggccgaaaacggcattgtccacgttgaggataagaaatgtgtcggctgcctgtcctgtatcatggcctgcccttatggcgcacgctaccacaatcatgagaccggggccgtcaacaagtgtaatttctgccttgatcgggttgaagaaggtctattcccacactgcgtcgaaacatgtcaccaaaatgcccgtattttcggcgacttggatgacgagaacagtgaggtcagcaagctgatcaacgagaatccttcggttcagttgctgcccgaactgaacaccgacccctgtgtcttttacatctactga

SEQ ID NO: 67850 - protein, 180 aa, Desulfuromonas acetoxidans DSM 684
MARYAMVMDTRKCIGCHSCTVACKVRNELPTDMIYNPVTTDGPHGKFPNLSMRFLPLLCMHCDNSPCVDACPTGASIQAENGIVHVEDKKCVGCLSCIMACPYGARYHNHETGAVNKCNFCLDRVEEGLFPHCVETCHQNARIFGDLDDENSEVSKLINENPSVQLLPELNTDPCVFYIY

SEQ ID NO: 67851 - DNA, 621 bp, Desulfitobacterium hafniense DCB-2
  CDS (1)..(621): transl_table=11
atgtccaagaaattaggaatggtgattgatttaaagcgttgtacaggatgcaccacgtgcgccaatgcgtgcaagatgcagaataatgtccccatgggcatgttatggaaccgtgtgctcacggaaggcggggaagagtatgatacggccgcaggggtctacccccatgtgcaaaggcgtttcctgccggttgcctgccagcattgcgaaaatgccgcctgtgttaaggtctgcccggtaggtgctacctataaagatgagtcgggcagggtagtgattaattacgacagatgcattggctgccgcttctgcatggccgcctgcccctataatgcccgggtatttaactgggaggaaccggtgcgtgatcctggctttaactatggggataaagatgtgccccttcgcaaagtgggtgtcgtggaaaaatgctcaatgtgcaaggagcgcaccgacactgacttagaaccgatgtgtgtaaagtgttgcccggccaaagcccggaaattcggtgatttgaatgatccggatagtgaagtttcccgcttgattcgggagaggcatggcgagcagcttttagcggaaaaagggacgaagccgcaagtatattatttggattag

SEQ ID NO: 67852 - protein, 206 aa, Desulfitobacterium hafniense DCB-2
MSKKLGMVIDLKRCTGCTTCANACKMQNNVPMGMLWNRVLTEGGEEYDTAAGVYPHVQRRFLPVACQHCENAACVKVCPVGATYKDESGRVVINYDRCIGCRFCMAACPYNARVFNWEEPVRDPGFNYGDKDVPLRKVGVVEKCSMCKERTDTDLEPMCVKCCPAKARKFGDLNDPDSEVSRLIRERHGEQLLAEKGTKPQVYYLD

SEQ ID NO: 67853 - DNA, 606 bp, Desulfitobacterium hafniense DCB-2
  CDS (1)..(606): transl_table=11
gtgactgaacaatcgattcgttacggcatggtcatcgacttgcgaaaatgtgtgggctgcaacgcctgcactgtttcctgcaaaatcgagaacaatgtgccggatggaaaataccgtacttgggtcaaggaaatggaaaagggaacctatccgcaagtgtcccgtcatcgcttgccccgcttatgcaaccattgtgataatgccccctgtgagtcggcctgccctgtccgggccacttaccggacggaagacggcactattctgatcgattatgaccgctgtattggctgtaaatactgtatggcggcctgtccttatgatgcccgctttgttaacccggtgcgcagaacggcggagaaatgcaccttctgctatcacagagtacaaatgggactgctgccggcctgtgttaccacctgtgtaggaggagcccgaatttttggggatctgcatgatcccaacagtctcgtttcccgactgatagccaacaaccctgtgcagattctcaagccggagatgaatacccaaccgatgatctactacattggtgccgaccaggctgtgctgggagcggactatacagatttagagaagggggggaaataa

SEQ ID NO: 67854 - protein, 201 aa, Desulfitobacterium hafniense DCB-2
MTEQSIRYGMVIDLRKCVGCNACTVSCKIENNVPDGKYRTWVKEMEKGTYPQVSRHRLPRLCNHCDNAPCESACPVRATYRTEDGTILIDYDRCIGCKYCMAACPYDARFVNPVRRTAEKCTFCYHRVQMGLLPACVTTCVGGARIFGDLHDPNSLVSRLIANNPVQILKPEMNTQPMIYYIGADQAVLGADYTDLEKGGK

SEQ ID NO: 67855 - DNA, 594 bp, Desulfitobacterium hafniense DCB-2
  CDS (1)..(594): transl_table=11
atgggaaaacggtatgccatggtgattgacctgcgcaaatgtgtaggctgtcacgcttgccaagtggcttgtaaaagtgaaaacaatgtgcctcttggtgttttccgcaactgggttgatgagcttgagaccggaaagttccccaatgtttcccgccagcggttgccgcgtctttgcaaccactgtgagaatccatcatgtgtcaaagtatgtccggttaaagccacaactcaaaaagaagacggtacggtggtcattgactatgatctctgtatagggtgcaaatactgtattgccgcctgtccttacgatgctcggtttattaaccccgaaagaagaactgcggaaaagtgtgactactgttatgccagggtcgaagcgggattacaaccagcctgtgtgaatacttgtatcggtggggctcgcatcttcggagatttaaatgatcccacaagcgaagttgctaaatttgtggcaaccaatccagtcaaagtatctaagccggaaacgaacaacggaccgcagacctactacattggcgcagatgaaaaaacccttcgccctaattttgaaatagtgggggggaataaataa

SEQ ID NO: 67856 - protein, 197 aa, Desulfitobacterium hafniense DCB-2
MGKRYAMVIDLRKCVGCHACQVACKSENNVPLGVFRNWVDELETGKFPNVSRQRLPRLCNHCENPSCVKVCPVKATTQKEDGTVVIDYDLCIGCKYCIAACPYDARFINPERRTAEKCDYCYARVEAGLQPACVNTCIGGARIFGDLNDPTSEVAKFVATNPVKVSKPETNNGPQTYYIGADEKTLRPNFEIVGGNK

SEQ ID NO: 67857 - DNA, 582 bp, Desulfitobacterium hafniense DCB-2
  CDS (1)..(582): transl_table=11
atgccccaagataacaaacaaaaaaaatatggcatggtgattgatctaaggaaatgcgtaggatgcatgtcatgctcagtatcctgcaaaatggaaaatggagttgcctttggtgttttcagatcatgggtgaacatgactgaaaaaggtgatttcccaacggtcaagagatattatcaaccaagactttgcaatcattgcgagaatgctccctgtgtagaggtctgtcccgttaaagcttcttataagcgtgaagatggtatggtattgcttgataagaagaagtgtattggctgtggctactgtgtagcttcatgcccttataatgctcgttatatgagcaaaacccaaaaagttgcagataaatgtaccttctgtgatcatcgtgtagataacggcggtgaaccagcctgtgtaaaaaactgtatgggcaaagctcggatttttggagatctaaatgatcccagcagcgaagtctctcagcttatttctcgaaatgctgttcaagtgattaagccggaaaaaggaacaaaacctcaagtattctatatatcggctgactttaatcaacagcccaagtaa

SEQ ID NO: 67858 - protein, 193 aa, Desulfitobacterium hafniense DCB-2
MPQDNKQKKYGMVIDLRKCVGCMSCSVSCKMENGVAFGVFRSWVNMTEKGDFPTVKRYYQPRLCNHCENAPCVEVCPVKASYKREDGMVLLDKKKCIGCGYCVASCPYNARYMSKTQKVADKCTFCDHRVDNGGEPACVKNCMGKARIFGDLNDPSSEVSQLISRNAVQVIKPEKGTKPQVFYISADFNQQPK

SEQ ID NO: 67859 - DNA, 795 bp, Desulfitobacterium hafniense DCB-2
  CDS (1)..(795): transl_table=11
atgagcatcaatcgaagagagtttttgaaaaaagctggagtcattgctgccttagggctggggggagcagttaccctcgatgcctttgaacttttggaaccccttaaagcagcggactttaccagcgaaaacaaattagcagctcagcgctgggccatggtcatcgatatgagcaagctcagccaggcggatatcgatgaaattattaaaggctgtcacgagcttcataacgtccctgatatggggaatgaaaaagatgaaatcaagtggatctggacagatacctatgaacatgttttccctggggatgaaaaccattacctggatgagaaaaccaagaccatgcctttcctgaccctatgcaatcactgtgaccatccgccttgtgtccgggtctgtcctacccaggctaccttcagaagagaagatggggttgtaggaatggatatgcaccgctgtatcggctgccggttctgcatggccgcctgtccctatggagcacgcagtttcaactactgggatcccaaacctcatcttgccaagatcaatccggaatatcctcaccgctccaaaggggtcgtagaaaaatgtaccttctgtatggatcgtctggatcaagggctggcgcctgtctgtgtggagaagtccaaaggagcgattgtctatggcgacctggaggatcccaattccgcagtgagaaaagtattaagcacccattactccattcggcgtaagcctgaattgggctcacagcccagtgtctattatctgatcgggggtgaggagcgtgcttga

SEQ ID NO: 67860 - protein, 264 aa, Desulfitobacterium hafniense DCB-2
MSINRREFLKKAGVIAALGLGGAVTLDAFELLEPLKAADFTSENKLAAQRWAMVIDMSKLSQADIDEIIKGCHELHNVPDMGNEKDEIKWIWTDTYEHVFPGDENHYLDEKTKTMPFLTLCNHCDHPPCVRVCPTQATFRREDGVVGMDMHRCIGCRFCMAACPYGARSFNYWDPKPHLAKINPEYPHRSKGVVEKCTFCMDRLDQGLAPVCVEKSKGAIVYGDLEDPNSAVRKVLSTHYSIRRKPELGSQPSVYYLIGGEERA

SEQ ID NO: 67861 - DNA, 687 bp, Shewanella baltica OS155
  CDS (1)..(687): transl_table=11
atggaaaattcaaaaagaagatttctaaaaggcacatgtgccttatttgctggcgctacgggcgcatcactgctcgccacagtgaatgccgctgaaggtgctaaagcagagtcagatattaaatatgcgatgattcatgatgaaactaagtgtattggttgccgcgcatgtgaagtggcatgtcgtgaaaccaatcaagtgccagaaggggtttctcgggtcaggattgaacaaactggaccgttcggtgagtatccgaatgagtattatcacttcagccgtatctcttgtcagcattgtgaagacgcaccttgtgtcaacgtctgcccaacgggcgcagcctttattgataaagaaaccggcatagtgtcagtcaatgcgtggaaatgtgtcggctgccaatattgtattgcggcttgcccttataaaattcgctttattaacccagtcacccacgcggcggataagtgtgatttctgccgtgagacgaatctcgctcaaggaaaacagcctgcctgcgttgaggcttgtccaactaaggcgttagtgttcggtaatttaaaagatccgacgtctgagttagtacaagtgctgcgcgctaatccaactcaacgcgcgaaagtcgccctcggaacgcgacctaagttgttccgtatcctggcgaaatctggggaggtgatactatga

SEQ ID NO: 67862 - protein, 228 aa, Shewanella baltica OS155
MENSKRRFLKGTCALFAGATGASLLATVNAAEGAKAESDIKYAMIHDETKCIGCRACEVACRETNQVPEGVSRVRIEQTGPFGEYPNEYYHFSRISCQHCEDAPCVNVCPTGAAFIDKETGIVSVNAWKCVGCQYCIAACPYKIRFINPVTHAADKCDFCRETNLAQGKQPACVEACPTKALVFGNLKDPTSELVQVLRANPTQRAKVALGTRPKLFRILAKSGEVIL

SEQ ID NO: 67863 - DNA, 693 bp, Shewanella amazonensis SB2B
  CDS (1)..(693): transl_table=11
atgctagtttccaaacgccagtttctcaagggggttggggcgctgctgaccggtgtctctgtgtatggagccacccgcacgctccaggccgattccctgctgcaacccgaggcggaaagcgaaaccaaatatgccatggtgcacgatgaaaatgcctgcatcggctgtaatgcctgtgtccaggcgtgccgtgagaccaatcagatccccgagggtgtcacccgggtgaagatagagcgcaggggcccctttggtgagtatcctaaccagagctaccgcttcagccgtgtctcctgtcagcattgcgaagccgcgccctgtgtgcgggtctgccccacaggcgctgcctatatcgacaaagagaccggcattgtggcggtcaacagcgaccgctgcgtgggttgccagtattgcattgccgcctgcccctatcaggtcaggtatatccaccccgagacccgcaccgccgacaaatgcgatttctgtcagaagagtcgcctggctcaggggctgcaacctgcctgtgtcgaagcctgccccaccaaggcactgaccttcggcaatctcaaggatcccgagtcggaattggtcaagttgcttaaagccaagcccagctaccgcgccaaggtggacctggggacccggcccaagctgttccatattcaaaccatagatggggagataatgctatga

SEQ ID NO: 67864 - protein, 230 aa, Shewanella amazonensis SB2B
MLVSKRQFLKGVGALLTGVSVYGATRTLQADSLLQPEAESETKYAMVHDENACIGCNACVQACRETNQIPEGVTRVKIERRGPFGEYPNQSYRFSRVSCQHCEAAPCVRVCPTGAAYIDKETGIVAVNSDRCVGCQYCIAACPYQVRYIHPETRTADKCDFCQKSRLAQGLQPACVEACPTKALTFGNLKDPESELVKLLKAKPSYRAKVDLGTRPKLFHIQTIDGEIML

SEQ ID NO: 67865 - DNA, 543 bp, Prosthecochloris aestuarii DSM 271
  CDS (1)..(543): transl_table=11
atggttatcgatacacgggtctgcgtaggatgctccgcgtgtgtctatatctgcaagtccgaaaacagcgtccctgaaggctactgccgcgactgggtcgttcaggacaccgaaggaacatatccgaaactgcgcatggaaaaccgctcggaacgctgtcagcattgcgaaaacgccccatgcgttacctactgccctacaggggcttcacactatgccgaagacggcaccgtacaggtcaaccgcagccgttgtaccggctgtaaggcttgtctggctgcatgcccgtatgatgcgcgctacgtccatcctgaaggctttgttgataaatgctcgctctgcaagcatcgtcttgaccagggccttgaaacggcatgcgtatcggtctgcccgacaaaaagcctcaatctggtcgattacaacgacccggaacagaaggctcagcacatgatgaatggtaaagtggtttaccggcagaaggaacatgccggaaccaatccgagcctctactggatttcagcaagtaataaacccggagcctaa

SEQ ID NO: 67866 - protein, 180 aa, Prosthecochloris aestuarii DSM 271
MVIDTRVCVGCSACVYICKSENSVPEGYCRDWVVQDTEGTYPKLRMENRSERCQHCENAPCVTYCPTGASHYAEDGTVQVNRSRCTGCKACLAACPYDARYVHPEGFVDKCSLCKHRLDQGLETACVSVCPTKSLNLVDYNDPEQKAQHMMNGKVVYRQKEHAGTNPSLYWISASNKPGA

SEQ ID NO: 67867 - DNA, 1596 bp, Rubrobacter xylanophilus DSM 9941
  CDS (1)..(1596): transl_table=11
atggcgaactacggcttcatcatagacaaccggaagtgcatcggttgccacgcgtgcacggtggcctgcaaggccgagcacgaggtgccgctgggcgtgaaccgcacctgggtgaagtacatcgagaagggagagttccccgacacccagagggcgtttcacgtgatgcggtgcaaccactgtgaggatgccccgtgcgtggaggcctgtccggttacggcgctctacgtgcgcgaggatgggatcgtggatttcaactgggaccgctgcatcggctgtaaggcctgcacgcaggcctgcccctacgatgccctgtacatagaccccgagagccacactgcggcgaagtgcaactactgcgcgcaccgggtggacatggggcttgagccggcgtgcgtcaacgtgtgtcctgagcaagccatcatcagcggggacatggacgatccggcgagcgagatcagccggctgctcgcccgcgagaaggtgaccgttcgccgccctgagaaagggacgaagccgaagctcttctatataaacggcgatgaggcggcgctcacgccggaggacgcgcccgtgcggtcggactacatgtggtccaaccagcgccgcggggtggggcaccacgctccgagcgggcgcgatgggaacgcctcggtggctcagggcgtcatccccctgggcacgaagcccggcagggagcagcccgcgccgcagccggagcgggcccggcgcacctacgacgagcccaacaagggcgtaatgtggggcaaggaggtgcctgggtacgtcttcaccaaggccttggcctccggcgcggtcgcgataccgtttctggcggccgggctcgggctcgaggtggcggcgtctgcgctgcgggccggggccgtcctggggctcgtgttcatggcgctgacgggcatcctgctcataatggatctggaccgcccggaccgcttccactacgtgctcctgcgcccgcagtggaggagctggctggtgaggggggcgtacataatcaccgggttcggcgggctcataacgctgtggctggcgctggagcttctcggggccggcggcatcgcgacggcggttctgagctggccgctcgtggtgctggcggccgccacggcggtgtacacggcgttcctgttcgcgcaggccaggggccgcagcttctggcagagcccggcgctgccggtgcacatgggcgctcatacggcggtggccggcgcggcggtgctctacctcgcctcgtttttcgtttcggggctgcagccgctgcgggcggcgctggagccgacgctggtgctggggctcctgggtggactcttcgtactctgggccgagctgggctcgaggcacccggaccgcgacgcagagcgggcggcgaagatgatctacgggggccgatacaggcggctcttctggggcggctctgtggcgctgggttcccttttgccgctggccctcaccgtagcgggcatcctgctggccgctcctgtggcggtagccgttgccggggctctggcgctccttgggatcctgattaccgaacacgtgtgggttgaggcgccgcagctcattccgctggcctag

SEQ ID NO: 67868 - protein, 531 aa, Rubrobacter xylanophilus DSM 9941
MANYGFIIDNRKCIGCHACTVACKAEHEVPLGVNRTWVKYIEKGEFPDTQRAFHVMRCNHCEDAPCVEACPVTALYVREDGIVDFNWDRCIGCKACTQACPYDALYIDPESHTAAKCNYCAHRVDMGLEPACVNVCPEQAIISGDMDDPASEISRLLAREKVTVRRPEKGTKPKLFYINGDEAALTPEDAPVRSDYMWSNQRRGVGHHAPSGRDGNASVAQGVIPLGTKPGREQPAPQPERARRTYDEPNKGVMWGKEVPGYVFTKALASGAVAIPFLAAGLGLEVAASALRAGAVLGLVFMALTGILLIMDLDRPDRFHYVLLRPQWRSWLVRGAYIITGFGGLITLWLALELLGAGGIATAVLSWPLVVLAAATAVYTAFLFAQARGRSFWQSPALPVHMGAHTAVAGAAVLYLASFFVSGLQPLRAALEPTLVLGLLGGLFVLWAELGSRHPDRDAERAAKMIYGGRYRRLFWGGSVALGSLLPLALTVAGILLAAPVAVAVAGALALLGILITEHVWVEAPQLIPLA

SEQ ID NO: 67869 - DNA, 1023 bp, Magnetococcus sp. MC-1
  CDS (1)..(1023): transl_table=11
atgcaacgcagagcgtttttaaaggccgcagtgggtagtgtcgccgccgtaacatgcggtggcgtggcggcatcggcgcaagcccgtgaaaatttgcaacccgcccccgaagcggtgggcatgctctacgatgccaccctctgtgtggggtgtaaggcgtgcgtgagcaagtgtaaagaggtcaatggtctgccgccggtgcaggatgggaccaaccaaacctgggattctgctcgtgatctgtcgggacaaacccacaatgttatcaaggtgtttaaatcgggaagtggtcaaaacaaggaccaactcaaggatggttacgcctttgaaaagcgtagctgtatgcactgcgtggatcctggctgcgtctccgcctgtccggtaacggccatgcgccgcaacagcttaaccgggattgtcacccaccatgctgatgcttgcattgggtgccgcacctgcatgaccggttgcccctataatgtgcctcaatttgaatatgataaaccctttggtcagattcaaaaatgccaaatgtgcaatcaggctggggtatcgcgcatcgacaacgggcagatgaccggctgtgcggaggtgtgccccactggggccacgctgtttggcaagcgtagcgatctgctggccgaagccaaacggcgcatggccttgcagcccggtacaacctatgcctatccccggggtgatctggccaaccccagccaaccccacgaaaaggcggtgcctcactatcaaccccacgtgtggggtgaaaaagaggcgggcgggaccaatgtcctgcacatctcggccattccctttgacaaattgggcatgccgccgctgggtgagcgctcttacgccgccatctccgaaggggtgcagcatgggctctatcgctacatggcactgcctgcggtggccttggctgggttaaccgccattgtgcggcgcaataccctggcccagggggatgaatcgggcatggacaccgatattgagcatgcagataagggggggcaatcatga

SEQ ID NO: 67870 - protein, 340 aa, Magnetococcus sp. MC-1
MQRRAFLKAAVGSVAAVTCGGVAASAQARENLQPAPEAVGMLYDATLCVGCKACVSKCKEVNGLPPVQDGTNQTWDSARDLSGQTHNVIKVFKSGSGQNKDQLKDGYAFEKRSCMHCVDPGCVSACPVTAMRRNSLTGIVTHHADACIGCRTCMTGCPYNVPQFEYDKPFGQIQKCQMCNQAGVSRIDNGQMTGCAEVCPTGATLFGKRSDLLAEAKRRMALQPGTTYAYPRGDLANPSQPHEKAVPHYQPHVWGEKEAGGTNVLHISAIPFDKLGMPPLGERSYAAISEGVQHGLYRYMALPAVALAGLTAIVRRNTLAQGDESGMDTDIEHADKGGQS

SEQ ID NO: 67871 - DNA, 687 bp, Shewanella frigidimarina NCIMB 400
  CDS (1)..(687): transl_table=11
atggaaaactcaagaagacatttccttaaaagcacctgtgcattggttgccggcgtgtcggtatatccactcagtcgcgatcaagccaatgccgatacgggcataagaataaacaatttaaaatacgccatgctacatgacgaaaccaaatgtattggttgtaacgcttgtgttgaagcgtgtcgagaagtgaatcatgttcccgaaggtgtcaccaggctgagcattgaacagtcgggcccttatggcaagtatccaaatcagtattaccactttagccgccactcctgccaacattgtgaagatgcgccttgcgttaatgtatgcccgactggagccgcctttatcgataaagaaagcggcattgtctcggttaatgcagataaatgtgttggttgccaatactgtattttagcctgcccttacgatgtacgttttattaatcctgtgactaaggcagccgacaaatgtgacttttgcagggaaactaatctcaaacaagataaacaacctgcctgtgtagaagcttgtccaaccaaagcattggtgtttggtaatcttaaagatcctgagtctgaactggttatgctgttaaaagctaatccaacacaacggaccaagttagatttaggtacccggcccaaactgtttcgtattacagccaaacaaggggagattatattatga

SEQ ID NO: 67872 - protein, 228 aa, Shewanella frigidimarina NCIMB 400
MENSRRHFLKSTCALVAGVSVYPLSRDQANADTGIRINNLKYAMLHDETKCIGCNACVEACREVNHVPEGVTRLSIEQSGPYGKYPNQYYHFSRHSCQHCEDAPCVNVCPTGAAFIDKESGIVSVNADKCVGCQYCILACPYDVRFINPVTKAADKCDFCRETNLKQDKQPACVEACPTKALVFGNLKDPESELVMLLKANPTQRTKLDLGTRPKLFRITAKQGEIIL

SEQ ID NO: 67873 - DNA, 600 bp, Prosthecochloris vibrioformis DSM 265
  CDS (1)..(600): transl_table=11
atggcgcgatatggaatggtaatggacatgcgaacctgcgttggatgccaggcctgtatggctgcgtgcacggcggaaaaccagaccccgttctggaacgaaaagttccgcacgcatgtcgaagacaaggctgaaggcatcttccctgatgtacgaagagttctgctgccgaggctctgcatgcactgtgaaaacacaccatgcctcacagcctgcccgaccggggccacatacatgactgaggatggcattgtcaaggtcaactacgaccgatgcatcggctgctacgcctgctgcattgcatgcccctacgatgcacggtacgcctacgacggtgaggatgtgaaaaaggaagaagaggtatacggcaaattcaccagccacgatcagccgcatgttgacaaatgcacattctgcgaccacagggtttcagaggggcgcgaacccgcatgcgtcagcacctgcccgacccatacaaggattttcggcgacctcgacgatcccgaaagcgaagtacacaaactggcaacgagcggcaaagcccaggcattgaacccgcagctcggaacatccccgaaagtattttacatcccatcatag

SEQ ID NO: 67874 - protein, 199 aa, Prosthecochloris vibrioformis DSM 265
MARYGMVMDMRTCVGCQACMAACTAENQTPFWNEKFRTHVEDKAEGIFPDVRRVLLPRLCMHCENTPCLTACPTGATYMTEDGIVKVNYDRCIGCYACCIACPYDARYAYDGEDVKKEEEVYGKFTSHDQPHVDKCTFCDHRVSEGREPACVSTCPTHTRIFGDLDDPESEVHKLATSGKAQALNPQLGTSPKVFYIPS

SEQ ID NO: 67875 - DNA, 1632 bp, Prosthecochloris vibrioformis DSM 265
  CDS (1)..(1632): transl_table=11
atgtatgttctccggtcccgacggcgggaaggcgccttatcaatcattagaacatcgcagttcatgaattacggatttgttattgacggacgcaaatgtatcggatgccacgcatgctcagttgcctgcaagtccgaaaaccaggtgccgcttggcgtcaaccgcacctgggtaaaatatgttgaaaaggggtcattccctgatacccggcggtattttaccgtcctgcggtgcaatcactgcgaggagcctccctgtgtggatatctgtccggttgaggcattgcacaagcgcgatgatggtattgtggatttcgattcccgccgctgcatcggctgcaaggcctgtgctcaggcctgcccctataacgcagtctacattgatcccgaaagcggcacaactgccaagtgcagctactgctcgcaccgggttgagattggcatgaagccggcatgtgccgtcatctgccctcagcaggcgattgtgtcgggcgatctggatgatccgcatagtgaaatttccgtgctgcttgccaaagagcgtaccgtggtccgcaagcctgagaaagggaccagtcccaatgttttctacatcaacggtgacggcgcttcgctcgaccccctgcaggcgtctgaatctgaaagctatatgtggagcgcccagtcgcgcggggtaggccattttgcaaagcacgcagttgagggtggtcactttcattcccccgagcccgcagtagagcatcatggaggaaaggcgcctgcagccacagctcgccgtgtgtatgacgctccatcgaagggatcggtctggggttgggaggttccggcctatgtctggtcgaaggcggtctctgcgggtgccttccttatgctttttgtcttctcgcttctgccgggcatgatgctgccggaaccgatgcagtgggctctctgggcggtttcgctgctcttcctctcgctgactggcggctttctggtcaaggatcttgaccgccccgaccggtttgtctcagtcatgctccgtccgcagttcagctcctggctggttcgcggcgggttgaccattacggcttatggcgcgtttctggcgctctgggcagcgggaatgtatctgcagctttctttgcttgttatggcagggctttggggcggggcggcgcttgcgcttcttaccgcggtctacactgcattcctgttcggttcggccaaagggcgcgacttctggcagagcccgatgctctcactgcacatgcttctcaattcggtgattgcgggtggttcagcaatggctttgctctcagccttcataggtcttgatgcagcatctctctccctcttgcgcattgtgctcacagtagcattcagccttcatcttcttgtcatgtggactgaactctacggccgccacccctcactcaatgctgagaggtcggctgaagccataacgcagggggcactgaaaggtcagttctggctcggcagcgtggttctcggtaacctgcttccccttctggtgctcattgtttcaccaggtcctctcctgataggcgcagccgcaatcggcgctcttgcaggagtgttctatacagaaaaagtatgggttcaggccccacagtcaatctcattaagttaa

SEQ ID NO: 67876 - protein, 543 aa, Prosthecochloris vibrioformis DSM 265
MYVLRSRRREGALSIIRTSQFMNYGFVIDGRKCIGCHACSVACKSENQVPLGVNRTWVKYVEKGSFPDTRRYFTVLRCNHCEEPPCVDICPVEALHKRDDGIVDFDSRRCIGCKACAQACPYNAVYIDPESGTTAKCSYCSHRVEIGMKPACAVICPQQAIVSGDLDDPHSEISVLLAKERTVVRKPEKGTSPNVFYINGDGASLDPLQASESESYMWSAQSRGVGHFAKHAVEGGHFHSPEPAVEHHGGKAPAATARRVYDAPSKGSVWGWEVPAYVWSKAVSAGAFLMLFVFSLLPGMMLPEPMQWALWAVSLLFLSLTGGFLVKDLDRPDRFVSVMLRPQFSSWLVRGGLTITAYGAFLALWAAGMYLQLSLLVMAGLWGGAALALLTAVYTAFLFGSAKGRDFWQSPMLSLHMLLNSVIAGGSAMALLSAFIGLDAASLSLLRIVLTVAFSLHLLVMWTELYGRHPSLNAERSAEAITQGALKGQFWLGSVVLGNLLPLLVLIVSPGPLLIGAAAIGALAGVFYTEKVWVQAPQSISLS

SEQ ID NO: 67877 - DNA, 759 bp, Syntrophobacter fumaroxidans MPOB
  CDS (1)..(759): transl_table=11
gtgagcgatacaggacattcggaaggcaagcttcgttacggcatggtgatcgacctcgacaagtgcaccggctgcatggcatgcagcgtggcctgtcaggcggaaaacaatatttcgtttcgcgccgacgagtcgaataagctccgttcgatcacatggatggagatttaccatctgaacaacggcaaggggtatcccgactaccagttcgcttacctgcccaggccttgcatgcactgtgatgcgccgcaccattccccgtgcaccttcgtgtgcccggtgaatgccaccacgcgggatgagcgcaacggcctcgtgacgcacatctatccgcgctgcatcggctgccggtactgtatggtggcgtgcccctaccatgcccgcgacttcaactggtgggatccggcatggccgaaacccatggaatcgatgctcagcccggaggtcagcccccggatgcgcggcgtggtcgagaagtgtaccttctgcagccaccgcatgatgaaggcaaggtccaaggcatacctcgacaaggcggacctcgaagccgtcgaatatacgccggcgtgcgccgaagcctgcccgacgaaggccatcaccttcggaaacatcagggatgccaacagcgaagtgggaaagctcatcaaggatcccagggctttcaggattctggccaagctgcacaccgaacccaaggtctactatctgagcgggcacgaatgggttcgcaaacaagcggacaatgtggtgaagggttga

SEQ ID NO: 67878 - protein, 252 aa, Syntrophobacter fumaroxidans MPOB
MSDTGHSEGKLRYGMVIDLDKCTGCMACSVACQAENNISFRADESNKLRSITWMEIYHLNNGKGYPDYQFAYLPRPCMHCDAPHHSPCTFVCPVNATTRDERNGLVTHIYPRCIGCRYCMVACPYHARDFNWWDPAWPKPMESMLSPEVSPRMRGVVEKCTFCSHRMMKARSKAYLDKADLEAVEYTPACAEACPTKAITFGNIRDANSEVGKLIKDPRAFRILAKLHTEPKVYYLSGHEWVRKQADNVVKG

SEQ ID NO: 67879 - DNA, 681 bp, Actinobacillus succinogenes 130Z
  CDS (1)..(681): transl_table=11
atgacaacttgctcacgccgaaactttgtttctggaatgggggcattaatccttacgacgggaacaacagttagtttaacggcacaaggtgaaagcgaaaagcaagaaaaaccaaaacgctatgcaatggtgcatgacgaatcagtctgtatcggttgtacggcgtgtatggaagcttgtcgtgaaaccaatcaagtgccagaaggtgtttctcgtttggaaattatccgtagcgagcctatcggcgaatttccgaatcaggaatatgaatttttccgccagtcttgtcagcattgtactaatgcaccttgtgtagcggtatgccctacaggcgcatcttacattgatccgacaaccggtattgttgatgtaaatcgtgatctttgcgtcggttgccagtattgtgtagcggtttgtccgtatcgtgtccgtttcattcatcctgttcataaaacagcggataaatgtaacttctgccgcgataccaatctggcaaaaggcaagcaaccggcttgcgtagaagcttgtccgaccaaagcgttaacattcggcgatatgaacgacagtaatagtgccgttgcacgtaaagttcgtgaaaatccggtatatcgtaccaaagtacaattaggtaccgaaccgaatttgtatcatattccatttggcaagggggaacatagataa

SEQ ID NO: 67880 - protein, 226 aa, Actinobacillus succinogenes 130Z
MTTCSRRNFVSGMGALILTTGTTVSLTAQGESEKQEKPKRYAMVHDESVCIGCTACMEACRETNQVPEGVSRLEIIRSEPIGEFPNQEYEFFRQSCQHCTNAPCVAVCPTGASYIDPTTGIVDVNRDLCVGCQYCVAVCPYRVRFIHPVHKTADKCNFCRDTNLAKGKQPACVEACPTKALTFGDMNDSNSAVARKVRENPVYRTKVQLGTEPNLYHIPFGKGEHR

SEQ ID NO: 67881 - DNA, 687 bp, Vibrio sp. Ex25
  CDS (1)..(687)
atgaaatgttcgagaagaaactttttagctagcagcggtgcgttgattttaactacaggcgttgcgggcacttccgttgttagctcctctctttatgccagcaacagtgaacaagcgaagcgcatgggtatggttcatgatgaaaatgcctgcattggctgtaccgcttgtaccgatgcttgtcgcgaagtaaataaagtccctgaaggcgtgacgcgacttaaaattcatcgcagtgaaccgattggcgaattcccagatgtggaataccagtttactcgcgaatcctgtcagcactgtgataatccaccatgtgtctatgtgtgcccaacaggcgcagcatacaaagatgaagcgacgggcattgtggatgtacacaaagagaaatgtgtcggatgtggttattgccttgctgcttgtccttaccaagtgcgcttctttaatccagtcgatcactctgcggataaatgcaacttctgccgcgataccaacctggcgcaaggtaagcagccagcttgcgtggaatcttgcccaacaaaagcactcatctttggtgatttaaatgacccagctagcgaggtgagcaaagctatcgaaagccatgttgtctatcgcgataaatcgcatttaggtacgcagcctaaactgtacaaaattccgcatagtaaaggggaggtgtcatcatga

SEQ ID NO: 67882 - protein, 228 aa, Vibrio sp. Ex25
MKCSRRNFLASSGALILTTGVAGTSVVSSSLYASNSEQAKRMGMVHDENACIGCTACTDACREVNKVPEGVTRLKIHRSEPIGEFPDVEYQFTRESCQHCDNPPCVYVCPTGAAYKDEATGIVDVHKEKCVGCGYCLAACPYQVRFFNPVDHSADKCNFCRDTNLAQGKQPACVESCPTKALIFGDLNDPASEVSKAIESHVVYRDKSHLGTQPKLYKIPHSKGEVSS

SEQ ID NO: 67883 - DNA, 768 bp, Vibrio sp. Ex25
  CDS (1)..(768)
atggattccaccaaacgtcgctttctcagcgcggtcacagctggagccgcgttaattccagtcgcgggtattggcacggcaaccgcgggaaacattattcgcaataaccagtccgccgatcgaaaaggacaagtggggaaacgttatgccatggtggtggatttacgaaagtgcgtcggatgccaggcttgcaccgtgggttgcagcattgaaaaccaagcacctatcggtcagttccgaaccacagtaaagcagtacgaagtcacgctggatgatggctctacaaccacacgagaagcgaaagcctttatgctgcctcgcctttgtaaccactgcgaaaacccaccctgcgtggctgtgtgtccggttcaagcgacctttcagcgcgaagatggcatcgtcatggtggataacagtcgctgtgtcgcctgcgcgtattgcgtacaagcctgcccttacgatgcgcgttttatcaatgaggacaccctcaccgcagataaatgtaccttctgtgctcaccgtctagaacaaggtctattgcctgcctgcgtggaaacctgtgttggcggtgcacgtgtaattggtgatttgaatgatccatcaagtgaagtccgccgcttaattgcgaagcaccaagacgacatcaaagtgctaaaacccaatgaagagaccaagccacacgtgttttacatcggcatggatgaacgcttcaccagccatatcgacgggcagccagctatttatgacccacaaggagagcacgcatga

SEQ ID NO: 67884 - protein, 255 aa, Vibrio sp. Ex25
MDSTKRRFLSAVTAGAALIPVAGIGTATAGNIIRNNQSADRKGQVGKRYAMVVDLRKCVGCQACTVGCSIENQAPIGQFRTTVKQYEVTLDDGSTTTREAKAFMLPRLCNHCENPPCVAVCPVQATFQREDGIVMVDNSRCVACAYCVQACPYDARFINEDTLTADKCTFCAHRLEQGLLPACVETCVGGARVIGDLNDPSSEVRRLIAKHQDDIKVLKPNEETKPHVFYIGMDERFTSHIDGQPAIYDPQGEHA

SEQ ID NO: 67885 - DNA, 1680 bp, Chloroflexus aurantiacus J-10-fl
  CDS (1)..(1680): transl_table=11
atgacaaactacggcttcctcatcgatcagcggaagtgcatcggttgccacgcatgcagtactgcctgcaagtcggagaatgaagttccacttggggtttaccgcacgtgggtgaagtatgtagagaccggcaccttccactccacccggcgccattttcaggtgacacgttgtaaccactgcgccaatccaccttgtgttcgcatttgtccggtcacagcaatgtatcagcgcaccgacgggattgtagagtttgatccgaaggtgtgcatcggctgcaaagcctgtttgcaggcctgtccttacgacgccatttacattgatccagagagccacaatgcggcgaagtgccacttctgtgcgcaccgtatcgatcaggggttgaaaccggcttgtgaaattgtctgtcccgaacaggcgatcatctctggcgatctcgatgatcccaatagtctgatcagccaattaattgcccgtgagccggtttcggtgcgcaagcctgaacagggcaccgcacccaagctgttttacattgatgctgaccaaaccacattgacgccaaccgcctcgacgaccagttctacctttatgtgggctgatgtggtgagcgagcaactggttggtcaccaccatacgaacggacgaaaacaacatgcccgtgaggtcattccgcttactgcggcttcgggagcaaagattcgcccgccgcgtgaacaggggctgggaagtggtcagagcgcgctgatgctgggtggccgggtggccggtcacatggtgcaaaccggctacaacgctcaacacaagattccgtggcactggccggtaccggcatatctggtgacaaaagggattgggagtggtgtctttctcgcagtggccgccgctgttggtcttggactggcgccgctgactgcaccactgctggcaattgcgctctttgtaagtctgctcttcattggtattacaaccgctctgctggtgtttgatctggaaaagccgcatctgttctttaccattctcacccgcccacaatggcggagctggctgacacgcggggcgtttatcctgattgcctttacgctggttggcgggctgtggttcctggctgaggccggcgctgccttgaatatctggccagaagccgctgtctcaggcttgcggccaatcctggcctggatcgggatgccgctggccgtgctggcagccatttacaccgcgttcctcttcgcgcaggccgaggggcgtgacctgtggcaaagtcccctcttgccggcccatctcctggtgcaggctgtgatggttggtgccggtacgctcttgctgctcgcaccgtttgtggctatgccggcagcatttctcaccctgctcggctggctctttgccggtagtttgctgatcgatctctttatgctcctggttggtgagttcggtatccctcatgccagtgaagttgctgcccgcgccgcgcacgatattagccacggccgctaccgcaaccacttctggcaaggagcgattgctctcggtcacgttctcccggtgctgtgcatcatcctggcgttcattgctccgaccctggcgatgccactcctggcagtagccggactggccgcaattgccgggttgtacgcctttgaatacgctttcgtcatggcgccgcaacacgtgccgaacagttaa

SEQ ID NO: 67886 - protein, 559 aa, Chloroflexus aurantiacus J-10-fl
MTNYGFLIDQRKCIGCHACSTACKSENEVPLGVYRTWVKYVETGTFHSTRRHFQVTRCNHCANPPCVRICPVTAMYQRTDGIVEFDPKVCIGCKACLQACPYDAIYIDPESHNAAKCHFCAHRIDQGLKPACEIVCPEQAIISGDLDDPNSLISQLIAREPVSVRKPEQGTAPKLFYIDADQTTLTPTASTTSSTFMWADVVSEQLVGHHHTNGRKQHAREVIPLTAASGAKIRPPREQGLGSGQSALMLGGRVAGHMVQTGYNAQHKIPWHWPVPAYLVTKGIGSGVFLAVAAAVGLGLAPLTAPLLAIALFVSLLFIGITTALLVFDLEKPHLFFTILTRPQWRSWLTRGAFILIAFTLVGGLWFLAEAGAALNIWPEAAVSGLRPILAWIGMPLAVLAAIYTAFLFAQAEGRDLWQSPLLPAHLLVQAVMVGAGTLLLLAPFVAMPAAFLTLLGWLFAGSLLIDLFMLLVGEFGIPHASEVAARAAHDISHGRYRNHFWQGAIALGHVLPVLCIILAFIAPTLAMPLLAVAGLAAIAGLYAFEYAFVMAPQHVPNS

SEQ ID NO: 67887 - DNA, 957 bp, Chloroflexus aurantiacus J-10-fl
  CDS (1)..(957): transl_table=11
atgacccggcaaccaactatccccttaaccccggtaagccgcagaggtttactcggtgcactggtagccggcgccggtgccctcgctgcggcttcagtacaggcaggtctccctgccagcaccggaaaatcagccgacactatcgatgtgctttcgcctgaagaagccctggccgcctacgaagccgagattgctcgcctccgtgcaaccaaagtgagcggtacacccctcgatcatctggagcggatgcgggccgaactgctgcgggcactcgccaaaccggtcgccgaacgccgttgggtgatggtgattgatctccgcgcctgcgtcggttgtcacggttgcaccatcgcctgcgtggccgagaacaaactgccacccggcgtggtctaccgaccggtgatcgacgaagagatcggtcgctaccccaatgtcacgcgccgcttcattccccgaccctgtatgcaatgcgacaatccgccctgcaccggggtttgcccggtctcggccaccttcaccaacgagcatggcgtcgtcgaagtagactacgagcagtgcattggctgccgtgcctgtatcgctgcgtgtccgtatggtgcgcgcaccttcgatttcggatacacctacaccgccgacaccaccgaccctggcgtcatgtttggcgccgatcaggcagcgacctacgagacggtcaccaccttcgagtacggcaaagcccacgcacggcgcaacctccacgactcgccggttgggaacgtgcgtaaatgccacttctgcatgcaccgggtactcaacggtcaactcccggcctgtgtcacgacctgcatcgggcgcgccaccttcttcggtgatgccaatgatcccgatagcctggttagcgaactgattgccaaacccaatgtcatgcggttgaaagaagacctcggcaccgagccgcgtgtctactatttgcagtga

SEQ ID NO: 67888 - protein, 318 aa, Chloroflexus aurantiacus J-10-fl
MTRQPTIPLTPVSRRGLLGALVAGAGALAAASVQAGLPASTGKSADTIDVLSPEEALAAYEAEIARLRATKVSGTPLDHLERMRAELLRALAKPVAERRWVMVIDLRACVGCHGCTIACVAENKLPPGVVYRPVIDEEIGRYPNVTRRFIPRPCMQCDNPPCTGVCPVSATFTNEHGVVEVDYEQCIGCRACIAACPYGARTFDFGYTYTADTTDPGVMFGADQAATYETVTTFEYGKAHARRNLHDSPVGNVRKCHFCMHRVLNGQLPACVTTCIGRATFFGDANDPDSLVSELIAKPNVMRLKEDLGTEPRVYYLQ

SEQ ID NO: 67889 - DNA, 705 bp, Shewanella putrefaciens CN-32
  CDS (1)..(705): transl_table=11
atgagattaggaatggtgattgacctacaaaaatgtgtagggtgtggcggctgtagcttagcctgtaaaacagaaaacaacacgaacgacggtattcactggtcgcatcatattgcgaccactgagggtacgttccctgacgttaaatacacatatataccgaccctgtgtaaccattgtgatgatgcaccatgtgttaaagtgtgtccgacaggagcgatgcacaaagataaacgcggtttaacgctgcaaaacaatgatgaatgcattggttgcaagaagtgtatgaatgcttgcccatacggcgtgattagttttaatgcggcaacaccgcaccgtcgttggcaggatgactcagaggtggtcgcgaacggaactgtatctccacttatgctactaaagcgtacaggggctacggcaacacctaatgaaaacccagagcggggtgatacctatccgatgatacggccaaagcgtactacagagaaatgtactttctgtgatcataggcttgataaggggttgaatcctgcctgtgttgacgcttgtccatctgaagcacgggtaattggtgatttagatgatccgcagagcaaggtatcccagttgattaaattgcataaacctatgcagttgaaacctgaagcgggaacgggaccaagggtattttatattcgcagttttggtgttaaaaccgcttattaa

SEQ ID NO: 67890 - protein, 234 aa, Shewanella putrefaciens CN-32
MRLGMVIDLQKCVGCGGCSLACKTENNTNDGIHWSHHIATTEGTFPDVKYTYIPTLCNHCDDAPCVKVCPTGAMHKDKRGLTLQNNDECIGCKKCMNACPYGVISFNAATPHRRWQDDSEVVANGTVSPLMLLKRTGATATPNENPERGDTYPMIRPKRTTEKCTFCDHRLDKGLNPACVDACPSEARVIGDLDDPQSKVSQLIKLHKPMQLKPEAGTGPRVFYIRSFGVKTAY

SEQ ID NO: 67891 - DNA, 687 bp, Shewanella putrefaciens CN-32
  CDS (1)..(687): transl_table=11
atggaaaattcaaaaagaagatttcttaaaggtacctgtgctttattagcgggtgcatctggcgcctcacttctcgccactgtgaatgcatcaggcagtgttaaagctgaagctgatgtgaaatatgcacttatccatgatgaaactaagtgcattggctgccaagcatgtgaagtggcctgccgtgaagtgaataatgtgcctgaaggtgtttctaggattgaaataaaaagagaaggtccttttggcgaataccctaatcagttttatcactttagccgcaagtcttgtcaacattgtgaagatgcaccctgtgtgaatgtttgcccaacgggagcagcgtttattgataaagaaacgggcattgtttctgttgatgcttggaagtgcgtaggttgccaatattgtattgcggcttgtccttatcaagtgcgttttatccatcctgtcacccgtgctgcggataagtgtgatttctgccgtgaaacgaacttggctcaaggtaaacagcctgcttgtgttgctgcttgtccaacaaaagcactcgtgttcggtaatttaaaagatccgacgtcagaggttgttcaagtgctgcggtctaatccaacccaacgcgctaaggttgatctcggaacgcgacctaaactgttccgtatcgttgcaaaatcaggggaggtgacattatga

SEQ ID NO: 67892 - protein, 228 aa, Shewanella putrefaciens CN-32
MENSKRRFLKGTCALLAGASGASLLATVNASGSVKAEADVKYALIHDETKCIGCQACEVACREVNNVPEGVSRIEIKREGPFGEYPNQFYHFSRKSCQHCEDAPCVNVCPTGAAFIDKETGIVSVDAWKCVGCQYCIAACPYQVRFIHPVTRAADKCDFCRETNLAQGKQPACVAACPTKALVFGNLKDPTSEVVQVLRSNPTQRAKVDLGTRPKLFRIVAKSGEVTL

SEQ ID NO: 67893 - DNA, 672 bp, Yersinia bercovieri ATCC 43970
  CDS (1)..(672)
atgaatagccatcgtcgtcactttcttatcagtatgggggcgctgatctttatcaccggctccaccagaggttcgctggcatttagcggcactatcgacggcgttcgctacgggatgctacatgatgagactcgctgtatcggctgtaccgcctgtatggatgcttgccgcgcagtgaatcaggttccggctggggtttcgcggctcactatcattcgcagccagcccatcggggagtttccggcggtgaaatatcagttttatcgtcactcctgccaacattgtgataaagccccttgcgtggatgtttgcccgaccggcgcatcctatcgcgataaggcgaccggcattgtcgatgtcaatcctgacctctgtgtcggctgccagtactgcatcgccgcgtgcccctaccgggtgcgctttattcatccggtcacaaaaactgcggacaagtgcgatttttgccgcaagaccaatctaaagcaggggaagcagccggcctgtgtgctgtcatgccccaccaaagcactggtatttggcaatctggacgacgccaatagtgagctggtgaagctactgcatcagcgcacggtgtatcgcgccaaactacatctggggacacagccgaagctgtaccgtgtgccttttcagtatggggagattaccggatga

SEQ ID NO: 67894 - protein, 223 aa, Yersinia bercovieri ATCC 43970
MNSHRRHFLISMGALIFITGSTRGSLAFSGTIDGVRYGMLHDETRCIGCTACMDACRAVNQVPAGVSRLTIIRSQPIGEFPAVKYQFYRHSCQHCDKAPCVDVCPTGASYRDKATGIVDVNPDLCVGCQYCIAACPYRVRFIHPVTKTADKCDFCRKTNLKQGKQPACVLSCPTKALVFGNLDDANSELVKLLHQRTVYRAKLHLGTQPKLYRVPFQYGEITG

SEQ ID NO: 67895 - DNA, 735 bp, Yersinia bercovieri ATCC 43970
  CDS (1)..(735)
atggatcacgggaagagagcatttttacagcggttgggggtgctaaccgccggagccgcactggtgccgttggcgcaggcgggctggcagatggagccggcgcgcaaacagggtgatatcaaacggcgctatgccatgttgattgatttgcgccgctgcatcggctgccaagcttgcactgttagctgtgctatcgaaaaccaactgccgcaggggcagtttcgcaccacggtcaatcagtatcagatagcactgtcgggggcggagagtgtcaccaacgtcttgttgccacggctgtgtaaccactgcgataacccaccctgtgtgccggtttgcccggtgcaggccacctatcagcggcaagatggcattgtggttatcgacaatacccgctgcgtcggttgcgcctattgtgtgcaggcttgcccctacgaggcccgatttatcaatcacagcacccaaaccgccgataagtgtactttttgtgtgcatcgactggacgccgggctactgcctgcttgtgttgagtcttgtgtcggcggggcgcgcatcattggcgatctgcgcgatggcgatagcaaattacgccaaatgttgctggaacatgcgacggatatcaaagtgttgaagccagaacagggcactcatccgcaggtgttttaccttggcttaaatgagctatttacccgcccattacagggccagcccgcattgtggcaggagatacatccatga

SEQ ID NO: 67896 - protein, 244 aa, Yersinia bercovieri ATCC 43970
MDHGKRAFLQRLGVLTAGAALVPLAQAGWQMEPARKQGDIKRRYAMLIDLRRCIGCQACTVSCAIENQLPQGQFRTTVNQYQIALSGAESVTNVLLPRLCNHCDNPPCVPVCPVQATYQRQDGIVVIDNTRCVGCAYCVQACPYEARFINHSTQTADKCTFCVHRLDAGLLPACVESCVGGARIIGDLRDGDSKLRQMLLEHATDIKVLKPEQGTHPQVFYLGLNELFTRPLQGQPALWQEIHP

SEQ ID NO: 67897 - DNA, 672 bp, Yersinia mollaretii ATCC 43969
  CDS (1)..(672)
atgaagaccaatcgtcgtcactttctggtcggcatgggggcgctgatctttatgaccgggtcaacggggcgttcgttggcacttagcggcacagtcgacggcgttcgctacgggatgctgcatgatgagactcgctgcattggctgcaccgcctgtatggatgcttgccgtgaagtgaaccatgtcccggcgggcgtctcgcgcctcagtatcattcgcagtcaacccatcggggagtttccggcggtgaagtatcagttttatcgtcactcctgccagcattgtgaccacgctccttgtgtggatgtctgcccgacgggcgcatcctatcgcgataaggcgacaggcattattgatgtcaatcctgatctctgtgtcggctgccaatattgcatcgcggcgtgcccctatcgggtacggtttatccatccggtcaccaaaaccgccgacaagtgcgatttttgccgcaaaaccaaccttaagcaggggaaacagcccgcctgtgtgctctcatgccccactaaagcactggtgtttggcaatctggacgatcccaacagtgagctggtgaagctgttgcatcagcgcacagtgtatcgcgccaagttacatctggggacacagccgaagctgtaccgtgtgccttttcagtatggggagataaccggatga

SEQ ID NO: 67898 - protein, 223 aa, Yersinia mollaretii ATCC 43969
MKTNRRHFLVGMGALIFMTGSTGRSLALSGTVDGVRYGMLHDETRCIGCTACMDACREVNHVPAGVSRLSIIRSQPIGEFPAVKYQFYRHSCQHCDHAPCVDVCPTGASYRDKATGIIDVNPDLCVGCQYCIAACPYRVRFIHPVTKTADKCDFCRKTNLKQGKQPACVLSCPTKALVFGNLDDPNSELVKLLHQRTVYRAKLHLGTQPKLYRVPFQYGEITG

SEQ ID NO: 67899 - DNA, 672 bp, Yersinia frederiksenii ATCC 33641
  CDS (1)..(672)
atgaataccaatcgtcgtcactttatcgtcagtatgggggcactgattttcatgaccggttcaaccgggcgttcactggcacttagcggcactgtcgatggcgttcgttacggcatgttgcatgatgaaacccgctgtattgggtgtaccgcctgtatggacgcctgtcgagaagtcaatcatgtgcccgagggtgtctcgcggttaaatattatccggagtcagccaattggcgagtttccatcggtgaaatatcagttttaccgtcattcttgccagcactgtgataaggccccttgtgtggatgtctgcccaacgggtgcctcttatcgagataaaaaaaccgggattgttgatgttgatcctgacctttgtgtcgggtgccaatattgcattgcagcttgtccgtatcgggtgcgttttattcatccggtgacgaaaactgccgacaaatgcgatttttgccggaaaaccaatctcaaacaggggaaacaaccggcttgcgtgctgtcgtgcccaactaaagcgctgacctttggcaatctggacgatcctgatagtgaactggtgaagctgttgcatcagcgcacggtatatcgcgccaagttacatctgggaacacaaccaaaactgtatcgtgttcctttccagtatggggagataaccggatga

SEQ ID NO: 67900 - protein, 223 aa, Yersinia frederiksenii ATCC 33641
MNTNRRHFIVSMGALIFMTGSTGRSLALSGTVDGVRYGMLHDETRCIGCTACMDACREVNHVPEGVSRLNIIRSQPIGEFPSVKYQFYRHSCQHCDKAPCVDVCPTGASYRDKKTGIVDVDPDLCVGCQYCIAACPYRVRFIHPVTKTADKCDFCRKTNLKQGKQPACVLSCPTKALTFGNLDDPDSELVKLLHQRTVYRAKLHLGTQPKLYRVPFQYGEITG

SEQ ID NO: 67901 - DNA, 546 bp, Shewanella sp. PV-4
  CDS (1)..(546): transl_table=11
atgtcgttaaataagaaagtgggctttgtgttcagacaagagaactgtgtcggttgcggtgcctgtaccgttgcctgccagatccacaatgaactgcccgagaaccatagattccgtaaagtcgatcgctatgaagtgaagcgtgacgatggcgctatcgatgtctggttgtcccactcatgcatgcactgcgaaaaccccgcttgtctcatggtctgcccggcgaaagcctaccatgtgcgcgatgacggtatcgtggtgctggaccgtgagaagtgtaccggttgtggcctgtgtgccagcgcctgtccttacgcggccgtcagcatccgcgaggacgacggcaaggcagacaagtgcaacatgtgtgtggagctgctggaccgcggcatgaaacccgcgtgtgtgagtggctgcccggtagagtgcctggatgtcggcaatctgcaagaggtgctcaagcgtccatcggcaagcaaacaaggcataggctatggcgattgcatcaccaaacctaacctagtgatcattaaggaacgcgcataa

SEQ ID NO: 67902 - protein, 181 aa, Shewanella sp. PV-4
MSLNKKVGFVFRQENCVGCGACTVACQIHNELPENHRFRKVDRYEVKRDDGAIDVWLSHSCMHCENPACLMVCPAKAYHVRDDGIVVLDREKCTGCGLCASACPYAAVSIREDDGKADKCNMCVELLDRGMKPACVSGCPVECLDVGNLQEVLKRPSASKQGIGYGDCITKPNLVIIKERA

SEQ ID NO: 67903 - DNA, 693 bp, Shewanella sp. PV-4
  CDS (1)..(693): transl_table=11
atgcaagtttctaaacgccaatttctcaagggggttggggccctactggccggtgtctctgtgtatggtgccacccgcacgccccaggccgattccctactccagcccgagcaggaaagcgagatcaaatacgccatggtgcatgatgagaatgcctgtatcggctgtaacgcctgcgtccaggcctgccgtgaggtcaatcatattcccgagggcgtcacccgggtgaagatagaacgtaaggggcccttcggcgagtacccagatcagagctaccgcttcagccgtgtctcctgtcagcactgcgaagccgcgccctgtgtaagggtctgccccacaggcgccgcctatattgacaaagagacgggcatagtcgcggtcaatagcgaccgctgcgtgggctgccagtattgcatcgccgcctgcccctatcaggtcaggtatatccaccccgagacccgcaccgccgacaagtgcgatttctgtcagaagagtcgcctggctcaggggcttcagcctgcctgtgtcgaggcctgccctaccaaggcactgaccttcggcaacctcaaggatcccgagtcggatctggtcaagctgcttaagcgcaagcccagctaccgcgccaaggtggacctgggcacccggcctaagctgttccatattcaaaccatagatggggagataatgctatga

SEQ ID NO: 67904 - protein, 230 aa, Shewanella sp. PV-4
MQVSKRQFLKGVGALLAGVSVYGATRTPQADSLLQPEQESEIKYAMVHDENACIGCNACVQACREVNHIPEGVTRVKIERKGPFGEYPDQSYRFSRVSCQHCEAAPCVRVCPTGAAYIDKETGIVAVNSDRCVGCQYCIAACPYQVRYIHPETRTADKCDFCQKSRLAQGLQPACVEACPTKALTFGNLKDPESDLVKLLKRKPSYRAKVDLGTRPKLFHIQTIDGEIML

SEQ ID NO: 67905 - DNA, 717 bp, Shewanella sp. PV-4
  CDS (1)..(717): transl_table=11
atgttagatagaagaagaacactcaaactcctggctggcggcgccatcgcaaccacaggcatgatgtttatccccgccgatcctgtgatcgccgatattcgtcgtcagggtaagaagcgtctggccatggtgatcgatctcggtcgctgcaacggttgcaaggcctgtgtggtctcctgtggtatagagaacggcaacctgcctgacgagcatagaacccaggtgccgcaacacagcgtggatctgaatggcaagcagtatgtgtttaacatgccgatcctctgcaacaactgcgacaggccctcctgcgtgtctgtctgcccgacgggcgccaccttcaagcgcgagcaggacggcatagtggtggtggactcagagctgtgtatcggttgtaactactgcatccaggcttgcccctacgatggggtgcgtttcacccattcagccacgggcaccgtggataaatgtaacttctgtattcagcgaaccagccgcggcttgctgcctgcctgtgtcgagacctgtaccggtggtgcccgtgtctttggtgacattaacgaccccgagagcgaggtctccaggctgatacgtcagcacaggccgctggtgttgcaggccggtaagcaaacctcccccaatgtgttctatatcggcttgacccaagacgagagcgacagggcatacagtatcaattctccccaaacctggcagaggtag

SEQ ID NO: 67906 - protein, 238 aa, Shewanella sp. PV-4
MLDRRRTLKLLAGGAIATTGMMFIPADPVIADIRRQGKKRLAMVIDLGRCNGCKACVVSCGIENGNLPDEHRTQVPQHSVDLNGKQYVFNMPILCNNCDRPSCVSVCPTGATFKREQDGIVVVDSELCIGCNYCIQACPYDGVRFTHSATGTVDKCNFCIQRTSRGLLPACVETCTGGARVFGDINDPESEVSRLIRQHRPLVLQAGKQTSPNVFYIGLTQDESDRAYSINSPQTWQR

SEQ ID NO: 67907 - DNA, 573 bp, Shewanella sp. PV-4
  CDS (1)..(573): transl_table=11
atgagtaaaagatatgtaatggtgcacgacgagaaccgctgcatcggctgtcaggcctgtagcgtcgcctgtcgcagcgaaaatggcgtccccgagggagtcacccgcttgcaagtgcgcgtagaaggccccttcggcgatgcgccgcacctgcactttaaatataaccgcgtctcctgccagcagtgtgagaacgccccctgcgtcaccgtctgtccgacgggtgcggcctatgtgggcgacgatggcctggtctccatcaaggaagataaatgcgtcggctgtatgtactgtgtggcggcctgcccctacaaggtgcgtttcatcaaccctgaaaccaaggcggccgacaagtgtaacttctgtaaggacacccgcctggcccgcggcgagctgcccgcctgtgtgaccgtgtgtcccacagatgcactgacctttggcgatgccaatgacccgagcagcgaggtagccaaactcatcaacaccaaagcgacctatcaggagaagacccatctggggaccaagcctagggtctatcgcattccaacgaaacgtggggggatacagtcatga

SEQ ID NO: 67908 - protein, 190 aa, Shewanella sp. PV-4
MSKRYVMVHDENRCIGCQACSVACRSENGVPEGVTRLQVRVEGPFGDAPHLHFKYNRVSCQQCENAPCVTVCPTGAAYVGDDGLVSIKEDKCVGCMYCVAACPYKVRFINPETKAADKCNFCKDTRLARGELPACVTVCPTDALTFGDANDPSSEVAKLINTKATYQEKTHLGTKPRVYRIPTKRGGIQS

SEQ ID NO: 67909 - DNA, 786 bp, Alkalilimnicola ehrlichei MLHE-1
  CDS (1)..(786): transl_table=11
atgagcagtgatccgcgcgaacagggctgcgcccgcaacgggggagacaccccgtgcaacccgacgcgccgccgtatgctcgctgccggcgccgggctgctgggcctgtcggtggcaccgggggtattcctgatgcaggccggcgccacatcggacgccggcaccgccaccggggcctccccccgggtccgctggggactgctgatcgacaccacccgctgcgccgagggctgtgacgcctgcgtgcgcgcctgccgggaggaaaacggctgggcccatctgggccaggcaccgaccgatgcccagtggatccgcaaggtgacggtcagcgatccggacaccggccacagccagagcctgccggtgatgtgccagcactgcgcccatccgccctgcgtccaggtctgccccaccggcgcgtccatgcagcgggccgacggcatcgtccaggtggacaagcacctctgcatcggttgccgctattgcatgatggcctgcccctataaggcgcgctccttcgttcatgagccggtcaccgagttctcccccaacagcccccggggcaagggcacggtggagtcctgccacctgtgcgtgcaccggatcgaccggggccagttgcccgcctgcgtgacccgctgcgcctcagaagggggcggggctatggtcttcggcgatctcaacgatccggacagcgacatctcgcaggccctgagccgccacggcggccgggccatccgccaggacctggggctgaaccccggcgtgcggtaccagggcatctga

SEQ ID NO: 67910 - protein, 261 aa, Alkalilimnicola ehrlichei MLHE-1
MSSDPREQGCARNGGDTPCNPTRRRMLAAGAGLLGLSVAPGVFLMQAGATSDAGTATGASPRVRWGLLIDTTRCAEGCDACVRACREENGWAHLGQAPTDAQWIRKVTVSDPDTGHSQSLPVMCQHCAHPPCVQVCPTGASMQRADGIVQVDKHLCIGCRYCMMACPYKARSFVHEPVTEFSPNSPRGKGTVESCHLCVHRIDRGQLPACVTRCASEGGGAMVFGDLNDPDSDISQALSRHGGRAIRQDLGLNPGVRYQGI

SEQ ID NO: 67911 - DNA, 687 bp, Shewanella sp. MR-4
  CDS (1)..(687): transl_table=11
atggaaaattcaaaaagaagatttctcaaagggacatgcgccctgttggccggcgcttcgggagcgaccctactcgcgactgtcagtgcttcgaatgaggcgaaggccgaacccagcgtgaagtatgcgctgatccacgatgagactaagtgcataggttgcaaggcctgtgaggttgcatgccgtgaaaccaaccaggtgcccgagggcgtggcgcggctgaagatagaacaaaccggaccttacggagaatatccaaaccagttttatcacttcagtcgtaagtcttgccagcactgtgaagatgccccctgtgtcaatgtctgcccgaccggtgccgcttttatcgataaagagacgggaatcgtgtcggtggatgcgtggaagtgtgtgggctgtcagtattgtatcgcggcttgtccctacaaaattcgctttatcaatcccgttacccatgccgcggacaagtgtgatttttgccgtgagactaatctggcccaaggtaaacagcccgcctgcgtcgcggcttgtccaactaaggccttagtgtttggcaacttaaaggatccgagttcacaggtggtacaagtgctgaaggctaacccgacccaaagggctaaggttgacctaggaacgcggccaaaactgttccgcattgtggccaaatcaggggaggttgcaatatga

SEQ ID NO: 67912 - protein, 228 aa, Shewanella sp. MR-4
MENSKRRFLKGTCALLAGASGATLLATVSASNEAKAEPSVKYALIHDETKCIGCKACEVACRETNQVPEGVARLKIEQTGPYGEYPNQFYHFSRKSCQHCEDAPCVNVCPTGAAFIDKETGIVSVDAWKCVGCQYCIAACPYKIRFINPVTHAADKCDFCRETNLAQGKQPACVAACPTKALVFGNLKDPSSQVVQVLKANPTQRAKVDLGTRPKLFRIVAKSGEVAI

SEQ ID NO: 67913 - DNA, 987 bp, Shigella dysenteriae Sd197
  CDS (1)..(987): transl_table=11
gtgaacagacgtaattttattaaagcagcctcctgcggggcattgctgacgggcgcgctgccgtctgtcagtcatgcggctgctgaaaaccgaccgccaattccgggatcgctggggatgttgtacgactcgaccttgtgcgtaggctgccaggcttgcgtcaccaagtgtcaggatatcaacttccctgaacgtaacccgcaaggggaacagacctggtcgaacaacgacaaactgtcgccgtataccaataacatcattcaggtgtggaccagcggcacaggggtcaacaaagaccaggaggagaacggctacgcgtacattaagaaacagtgtatgcactgcgtcgatccgaactgtgtctctgtgtgcccggtctctgcactgaaaaaagatccgaaaaccggcattgtccattacgacaaagacgtgtgcaccggctgccgttactgcatggtcgcctgtccgtacaacgtgccgaagtacgactacaacaacccgtttggtgcgctgcataagtgcgagctgtgcaaccagaaaggtgtggaacgtctcgataaaggcggtctgcctggctgcgtagaagtgtgcccggcgggcgcggtgatttttggtacgcgtgaagagctgatggcggaggcgaaaaaacgtctggcgctgaagcctggcagcgaataccactatccgcgtcagacgctgaaatctggcgacacttacctgcatacggtgccgaaatattatccgcatctgtacggcgggaaagagggcggcggtactcaggttctggtactgacgggtgtgccttatgaaaatctcgacctgccgaaactggacgatctttctaccggtgcgcgttccgaaaatattcaacacaccctgtataaaggcatgatgctaccactggctgtgctggcgggcttaaccgtgctggttcgtcgcaacaccaaaaacgaccatcacgacggaggagacgatcatgagtcatga

SEQ ID NO: 67914 - protein, 328 aa, Shigella dysenteriae Sd197
MNRRNFIKAASCGALLTGALPSVSHAAAENRPPIPGSLGMLYDSTLCVGCQACVTKCQDINFPERNPQGEQTWSNNDKLSPYTNNIIQVWTSGTGVNKDQEENGYAYIKKQCMHCVDPNCVSVCPVSALKKDPKTGIVHYDKDVCTGCRYCMVACPYNVPKYDYNNPFGALHKCELCNQKGVERLDKGGLPGCVEVCPAGAVIFGTREELMAEAKKRLALKPGSEYHYPRQTLKSGDTYLHTVPKYYPHLYGGKEGGGTQVLVLTGVPYENLDLPKLDDLSTGARSENIQHTLYKGMMLPLAVLAGLTVLVRRNTKNDHHDGGDDHES

SEQ ID NO: 67915 - DNA, 873 bp, uncultured bacterium BAC10
  CDS (1)..(873)
atgagcggcccaagccctcgagatccgggcgctcatcggctttccctgtggggagagaagactggcatacggcgcctgcccgtcgtgtcgaagtacatcgacacgacgacctgcatcggctgcaaggcgtgtgaggtggcctgccaggagtggaacgacctccaggtcgtgcccaccaagcagacgggaagctaccagacgctgccgacactcgacgcggagttctggaacctcatcaaattcagcgagcgtgaaacctcagagggcgccctggcgtggctgatgcgcaaggaccagtgcctgcactgcgaggatcccgggtgcctcgccgcctgccccgcgccgggcgcgatcgtgcagtacgagaacgggatcgtggacgtggacccccagaagtgcatcggctgccaactttgcctcacgggctgtcccttcaacgttccgcgcttccacaagaagaccgggaagatggccaagtgcacgctctgcgtggaccgggtgcatgtcggactcgagcccgcctgcgtcaaggcctgcccgaccggctgtctgcacttcgggaccaagctggacatgctggccaagggccaggcacgggtggaacaactcaaggagaatggcttcgatcgtgcggcgctctacgaccctccgggcgtcggcggcacgggtgtcgtgaccgtgctcgcccacggcgaccatcccgagtggtacgacctgcctcgcgatccccatgtcccgctgaccgtgcggctctggaagggcgtgctcaggcctttcggaatgctagccatcttcgcggcgatcctggcggccctcgcgcacttcatgaccttcggaccgaagcggcccgggaccggcgaggagggtgcgtga

SEQ ID NO: 67916 - protein, 290 aa, uncultured bacterium BAC10
MSGPSPRDPGAHRLSLWGEKTGIRRLPVVSKYIDTTTCIGCKACEVACQEWNDLQVVPTKQTGSYQTLPTLDAEFWNLIKFSERETSEGALAWLMRKDQCLHCEDPGCLAACPAPGAIVQYENGIVDVDPQKCIGCQLCLTGCPFNVPRFHKKTGKMAKCTLCVDRVHVGLEPACVKACPTGCLHFGTKLDMLAKGQARVEQLKENGFDRAALYDPPGVGGTGVVTVLAHGDHPEWYDLPRDPHVPLTVRLWKGVLRPFGMLAIFAAILAALAHFMTFGPKRPGTGEEGA

SEQ ID NO: 67917 - DNA, 597 bp, Methylobacterium extorquens
  CDS (1)..(597): transl_table=11
atggcccggatgaagttcctctgcgacgcggatcgctgcattgagtgcaacgcctgcgtcacggcctgcaagaacgagcacgaggtgccctggggcatcaatcgccgccgcgtcgtcaccctcaatgacggcaagcccggcgagcgctcggtctcgatggcctgcatgcactgcaccgacgcgccctgcgcggcggtgtgccccgtgaactgcttctacaccacggccgatgccgtggtgctgcactccaaggacatctgcatcggctgcggctactgcttctacgcctgccccttcggcgcgccgcagtatccgcgggtcgggaacttcggttcgcgcggcaagatggacaagtgcacctactgctcgggcggccccgagcccgacttctcgaccgccgagtacgagaagtacggctcgaaccgtctcgcggaaggcaagctgccgctctgcgccgagatgtgctcgaccaaggcgctgctcgcgggcgacggcgagatgatcgccgagatctacaagcagcgggtgatcaagcgcggctacggctcgggcgcctggggctggaagacggcctaccgcgagaccgtcgcaatctga

SEQ ID NO: 67918 - protein, 198 aa, Methylobacterium extorquens
MARMKFLCDADRCIECNACVTACKNEHEVPWGINRRRVVTLNDGKPGERSVSMACMHCTDAPCAAVCPVNCFYTTADAVVLHSKDICIGCGYCFYACPFGAPQYPRVGNFGSRGKMDKCTYCSGGPEPDFSTAEYEKYGSNRLAEGKLPLCAEMCSTKALLAGDGEMIAEIYKQRVIKRGYGSGAWGWKTAYRETVAI

SEQ ID NO: 67919 - DNA, 717 bp, Azoarcus evansii
  CDS (1)..(717): transl_table=11
atgcaaccggctctggctccgacatcgtgcgggtggcggtgcgcaaggtcgcgcgcgaggagaccgcacaatgaccgctacgcgatgaccatcgacctgcgccgctgcgtgggttgccagacctgtaccgccgcttgcaagaacgccaacgcaacgccgccgggtgtgcagtggcggcgggtgctggatctcgagacgggcgaattcccggacgtgcgccgcagcttcgtgccggtcgcgtgcatgcactgcgacgaacctccgtgtgaggaagtgtgcccgaccaaggcgacgaccaagcggcccgacggcctggtcgccatcgactacgacacctgtatcggctgtgcgaactgcgtgatggcttgtccctacgaggcgcgctccatcgtgcatgaggcgaagttcgcctacggcgacaagccgatcaagtcggaagaggtgcgcttcgacccgtcgcgcatctcggtgtcgatgaaatgcaccttctgcatcgaccgtatcgacctcgcggcaaagaccggacaggtgccgggacgcgatccggacgttacgccggcctgcgtcaattcctgcatctccggcgcgatggctttcggcgacctcgacgaccccaacagcaaggtcagccgcctgatcgccgagaacaagactttccgcatgcacgaggagctcggcaccgggccgggcgtgtattacatctgggacaaggggtaa

SEQ ID NO: 67920 - protein, 238 aa, Azoarcus evansii
MQPALAPTSCGWRCARSRARRPHNDRYAMTIDLRRCVGCQTCTAACKNANATPPGVQWRRVLDLETGEFPDVRRSFVPVACMHCDEPPCEEVCPTKATTKRPDGLVAIDYDTCIGCANCVMACPYEARSIVHEAKFAYGDKPIKSEEVRFDPSRISVSMKCTFCIDRIDLAAKTGQVPGRDPDVTPACVNSCISGAMAFGDLDDPNSKVSRLIAENKTFRMHEELGTGPGVYYIWDKG

SEQ ID NO: 67921 - DNA, 684 bp, Acidianus ambivalens
  CDS (1)..(684): transl_table=11
atgactgacaatccttatttggcttttggaaataataggtcatgcaaaaactggggattcgtagtaagagtagaccagtgcttaggttgtatggcatgcatggctgcatgtgctgtagaaaatcaaacaccgttctgggaagaattatggagaactcatgtcgaagacctagaagtaggagaattccctaactctcaaaggatgttcatacctagactatgtatgcaatgcgaaaacccaccgtgctattacgtctgtccaaccggtgctactcaaattgttgatggaggcatagtcgttgttgatgaatacaaatgcatgggttgcctatactgcgttgaagcatgcccatatggggctaggtatttctacacttatgacgacattcaaaaggccaaggaatactacggagataacttaattcacgtagttccacacgtagataagtgtacgttctgttatggcactgctcctgatggcacttatacaccagcatgtgtaaggacgtgtgtaggtggggcaagagttttcggttgcttagatgatcctaacagtgaagtttcagtactagtgaatactggacaagctgtagtccttaatcctcaacttaatgtacaacctaaggtattttatgtttttaataagcaatctggaagatatgctcaaggaggtgacaactcttga

SEQ ID NO: 67922 - protein, 227 aa, Acidianus ambivalens
MTDNPYLAFGNNRSCKNWGFVVRVDQCLGCMACMAACAVENQTPFWEELWRTHVEDLEVGEFPNSQRMFIPRLCMQCENPPCYYVCPTGATQIVDGGIVVVDEYKCMGCLYCVEACPYGARYFYTYDDIQKAKEYYGDNLIHVVPHVDKCTFCYGTAPDGTYTPACVRTCVGGARVFGCLDDPNSEVSVLVNTGQAVVLNPQLNVQPKVFYVFNKQSGRYAQGGDNS

SEQ ID NO: 67923 - DNA, 1119 bp, Desulfovibrio vulgaris
  CDS (1)..(1119): transl_table=11
atgaacaggagaagattcctgaccctgctgggcaccgccggtgtttccacggccatgagcgctgtaggcgcgaaaaaggccgtcgcggcgggcaaccagagcttcaagggctacaaggacagttacggggtgctgcacgacaccacccgttgcatcggctgccgcaagtgcgagcagggctgcaacgaggtgaacaagctgcccgcgcccaaggtgaagttcgacgacctgacggtgctggaaaaatcgcgccgtaccgattcgaacaactggacggtggtcaacaagtacaatgtggcagggctggaccatccggtgttccgcaagcagcagtgcaaccactgcctggaacccgcctgcgcctcggcctgcttcgtcaaggccttcaccaagaaccccgacggctccgtcacctacgacggcagcctgtgcgtgggctgccgctactgcatgatcgcgtgcccgttcaacgtgcccgccttccagtacgacgagcctttcgacccgctgatccagaagtgcaccatgtgccacccgcgcatccaggaaggcaagctgcccggctgtgtcgaggcctgccccaaggaggccctgaccttcggcaagcgcgaagacctcgtgcgcatcgcccatgaccgcatccgcagcaatcccggtcggtaccaggatcacgtctacggtgaactggaaatgggcggcaccgcgtggatgtacctggctggcgtgcccttcgaggccgtgggccagcaggaaatgggcaccaagtccgcgccggaatacacggcgggggcccttggttccgtgcccatggtggtgggcatctggccggtgctgctgaccggcgcctacgccatctccaagcgcaaggaaaaggttgcggcggaagagcgcgaagaagccgttcaggccgcgctggccaaggcccgcgacgatgcggccaaggccatggataccgccctggccaaggcggccaaggaaaaggacgccgccgtgacccgcgaggtcaagaaggccatggaacaggcggagcaggccttcgaagagaagttcgccgccctgcgtgccgaaggccagaccgccgaaaacggcgacgacggcgaaggcaaggaggatgcataa

SEQ ID NO: 67924 - protein, 372 aa, Desulfovibrio vulgaris
MNRRRFLTLLGTAGVSTAMSAVGAKKAVAAGNQSFKGYKDSYGVLHDTTRCIGCRKCEQGCNEVNKLPAPKVKFDDLTVLEKSRRTDSNNWTVVNKYNVAGLDHPVFRKQQCNHCLEPACASACFVKAFTKNPDGSVTYDGSLCVGCRYCMIACPFNVPAFQYDEPFDPLIQKCTMCHPRIQEGKLPGCVEACPKEALTFGKREDLVRIAHDRIRSNPGRYQDHVYGELEMGGTAWMYLAGVPFEAVGQQEMGTKSAPEYTAGALGSVPMVVGIWPVLLTGAYAISKRKEKVAAEEREEAVQAALAKARDDAAKAMDTALAKAAKEKDAAVTREVKKAMEQAEQAFEEKFAALRAEGQTAENGDDGEGKEDA

SEQ ID NO: 67925 - DNA, 1104 bp, Desulfovibrio desulfuricans
  CDS (1)..(1104): transl_table=11
atgaaacgcagaacatttctgaccattctgggaagcgcgggcgtggtctcggcccttggctcagccaaggtggcccaggccggcccccataccttcccatattacgcagacagttacggggtgctgcacgacaccacccgttgcatcggttgccgcaagtgtgaagaggcctgcaacaaggtcaaccacctgcccaaacccaaaaaacccttcagcgaccttacggtgtgcgacacgcaccgccgcacgggcgaatatgaatggaccgtggtgaacaagtacaaggtcaacggcaaggacgtattccgcaagctgcagtgctttcactgcaacgacccggcctgcgcttccgcctgctttgccaagtgctttaccaagcagcccaacggcgctgttcactacgaaggctcacagtgcgtgggctgccgttactgcatggtcgcctgccccttctatgttcccggcttccagtacgatgaggcctttgaccccctcgtgcaaaagtgcaccttctgcgagccgctgctcaaggaaggcaagctgcccggctgtgtgcaggcctgccccaaggacgccctcaccttcggccgccgcagcgacctgatccgagtggcccgcgcccgcattgccgataatcccggcaagtacgtcaactacctctatggcgagtttgacgcaggcggcactgcctggatggtgctcagccccgcagtgggacaggcagccgcggctgttccggcggatgatgctccgctggctggcgatgaactgaagcagctcggccttgatacccatctcggcaaccgccccatgggcgagctgacctacggcgctctgggcgcagtgcctatgatcgtggccttctggcccgtgctcttcggcggtgcttacgccatcagcaaacgtcgcgaagccatgtacaaggctgaaacggatggcaaggtcaaggaggcccgtgaagacgtggccgccgccgttgacgccgccgtacgcaaaattgaggaaacccaggggccgggcgctgccgatacggcccgccgcgccatgacagaggccctcaaggcccgcgaaacggcgtgcacggggcacggggaggataagtaa

SEQ ID NO: 67926 - protein, 367 aa, Desulfovibrio desulfuricans
MKRRTFLTILGSAGVVSALGSAKVAQAGPHTFPYYADSYGVLHDTTRCIGCRKCEEACNKVNHLPKPKKPFSDLTVCDTHRRTGEYEWTVVNKYKVNGKDVFRKLQCFHCNDPACASACFAKCFTKQPNGAVHYEGSQCVGCRYCMVACPFYVPGFQYDEAFDPLVQKCTFCEPLLKEGKLPGCVQACPKDALTFGRRSDLIRVARARIADNPGKYVNYLYGEFDAGGTAWMVLSPAVGQAAAAVPADDAPLAGDELKQLGLDTHLGNRPMGELTYGALGAVPMIVAFWPVLFGGAYAISKRREAMYKAETDGKVKEAREDVAAAVDAAVRKIEETQGPGAADTARRAMTEALKARETACTGHGEDK

SEQ ID NO: 67927 - DNA, 807 bp, Chromatium vinosum
  CDS (1)..(807): transl_table=11
atgaacgagaacacaaccaatatcgacgccaatgccaagactgaggcggtcgaggccatcgacgccggacgtcgcggcttcatcggcaccgccgccggattgagcgccgccgccctggtggcgccgggcgtttttctgcacagcgtcgcggccgcgccgcgtaccgagccggtcacgggcgatgtgcgctggggcctgctgatcgacacggccaagtgcgccgacggctgttcggcctgtgtcgacgcctgcgaccgtgaaaacggcctggatctccaggaaccgcacggctccgagtccaagtgggagcatcagaagtcggtctggatccgcaaggtcaagctccaggacaaccagaccgggcgcatcacccagctcccgctgatgtgtcagcactgcgagcatccgccctgtgtcgacgtctgcccgaccggcgcctccttcaaacgcgccgacggcatcgtcatggtcgaccgccatctgtgcatcggctgtcgttactgcatgatggcctgcccctacaaggcgcgcagcttcatccatcagccgacgaccggccagttgaccgccgtgccgcgcggcaagggctgtgtcgagagctgcaatctgtgcgtgcaccggcgtgacaacggcgaggaatcgaccgcgtgcgtcgatgcctgcgcgcaggaagggcacggggccatcgtcttcggcgatctcaaggatcccgacagcgccatcagccagcgtctgcgcgagatcccgagccggcagatccgcgaggatctggtgttgaacacgggcgtgcgttacgccggcgtctga

SEQ ID NO: 67928 - protein, 268 aa, Chromatium vinosum
MNENTTNIDANAKTEAVEAIDAGRRGFIGTAAGLSAAALVAPGVFLHSVAAAPRTEPVTGDVRWGLLIDTAKCADGCSACVDACDRENGLDLQEPHGSESKWEHQKSVWIRKVKLQDNQTGRITQLPLMCQHCEHPPCVDVCPTGASFKRADGIVMVDRHLCIGCRYCMMACPYKARSFIHQPTTGQLTAVPRGKGCVESCNLCVHRRDNGEESTACVDACAQEGHGAIVFGDLKDPDSAISQRLREIPSRQIREDLVLNTGVRYAGV

SEQ ID NO: 67929 - DNA, 966 bp, Rhodocyclus gelatinosus
  CDS (1)..(966): transl_table=11
atgagccgccagcccgattccgatccgccggatcgcgacggccaaggtttcaacaccttccgccgccgtttcctcgccggcgtcgccaccgccggcggcgccgtcgtcaccgcccacgccaccggcgcctggggcggccagacgctgcaggacgcgatgggcagcctgctgcaggaccactaccagcgcatgacgaaggacgagatccacgccgcgctggaacgcatcgagcgcaacgcccgccgccgctacggtgtcgacgcgcgctgcgaggacctgccgccgctgccgaacaccgtcttcggctacgcgctgaacatcagcaagtgcaagggctaccgcgactgcgtcgaggcctgcgtcaaggagaacaacctcggccgcgactcgcagatgcagtacatccgcgtgctgcagatgcccgacggcacgatggacctggagaaggccgagcactactacgacgccaagcaggtcccggtgcccggccactggtacctgccggtgcagtgcatgcagtgcgacaacccgccctgcgtgaaggcctgcccgacgaaagccacctggaaggagcccgacggcatcgtcgtcgtcgactacgactggtgcatcggctgccgctactgcatgacggcctgcccgtactgggcgcgccacttcaactggaccgagccgcagatcccggcggccgagttcaacccgaacctcaactacctgggcaaccggccgcgccccaagggcgtcgtcgagaagtgccacttctgcagccagcgcgcgcgcaagggccgccagcccgcctgccaggaagcctgcccgaccggcgcacgcgtcttcggcaacctgctcgacccgaaaagcgagatccgctgggtgctcgagaacaagaacgtcttccggctgaaggaggacctcggcaccgagccgaagttctggtacttcagcgacgaccgggtgagtcgggcatga

SEQ ID NO: 67930 - protein, 321 aa, Rhodocyclus gelatinosus
MSRQPDSDPPDRDGQGFNTFRRRFLAGVATAGGAVVTAHATGAWGGQTLQDAMGSLLQDHYQRMTKDEIHAALERIERNARRRYGVDARCEDLPPLPNTVFGYALNISKCKGYRDCVEACVKENNLGRDSQMQYIRVLQMPDGTMDLEKAEHYYDAKQVPVPGHWYLPVQCMQCDNPPCVKACPTKATWKEPDGIVVVDYDWCIGCRYCMTACPYWARHFNWTEPQIPAAEFNPNLNYLGNRPRPKGVVEKCHFCSQRARKGRQPACQEACPTGARVFGNLLDPKSEIRWVLENKNVFRLKEDLGTEPKFWYFSDDRVSRA

SEQ ID NO: 67931 - DNA, 618 bp, Escherichia coli; identical to SEQ ID NO: 67749
  CDS (1)..(618)

SEQ ID NO: 67932 - protein, 205 aa, Escherichia coli; identical to SEQ ID NO: 67750

SEQ ID NO: 67933 - DNA, 618 bp, Haemophilus influenzae
  CDS (1)..(618): transl_table=11
atggaacaatatggtttttattttgattctgaacgttgcacaggctgtaaaacttgtgaattagcctgtaaggattacaaagatcttggcacagaagtcaattttcgtcgtatttatgaatatacaggtggtcagtggaatcaacaagcagatggatgctggcatcaaaatatatttgcctattatatgtctatttcttgtaatcattgtgcagatcctgcttgtacaaaagtttgcccaactggtgcaatgcacaaaaatgcagatggtttcgtgatcgtcaatgaagaaatttgtatcggttgtcgttattgtcatatggcgtgtccttatgatgcaccgcaatatgatgcacaaaaaggtcatatgacaaaatgtgatggatgttattctcgcgtaaaatcaggtcaaaaaccgatttgtgttgatgcctgcccactacgagcattggatttcgctcctattgatgaacttcgaacaaaatatggcacacaagcctccatcgcaccactaccaccgactgatatcactcaaccaaatttagtggtaaaacccaataaatacgctcgtttaagtggcgatacaagtgggttcttaggaaacccaagagaggtgtaa

SEQ ID NO: 67934 - protein, 205 aa, Haemophilus influenzae
MEQYGFYFDSERCTGCKTCELACKDYKDLGTEVNFRRIYEYTGGQWNQQADGCWHQNIFAYYMSISCNHCADPACTKVCPTGAMHKNADGFVIVNEEICIGCRYCHMACPYDAPQYDAQKGHMTKCDGCYSRVKSGQKPICVDACPLRALDFAPIDELRTKYGTQASIAPLPPTDITQPNLVVKPNKYARLSGDTSGFLGNPREV

SEQ ID NO: 67935 - DNA, 618 bp, Shigella flexneri; identical to SEQ ID NO: 67547
  CDS (1)..(618)

SEQ ID NO: 67936 - protein, 205 aa, Shigella flexneri; identical to SEQ ID NO: 67548

SEQ ID NO: 67937 - DNA, 603 bp, Wolinella succinogenes
  CDS (1)..(603): transl_table=11
atggaaagtcaagctagagtcaagttctattgtgatgaggctagatgtattgattgtcatggatgtgatgtggcttgtaaagaggcccatcaccttcctgtgggagtcaaccgaagaagagtggtgaccctcaatgaaggtcttgtaggcaaagagaaatccctctctattgcctgcatgcactgctctgatgccccttgtgctcaggtctgcccagtggactgcttctatgttcgagccgatgggattgtattgcatgacaaagagaagtgcattggatgcggttactgcctctatgcctgcccctttggtgctcctcaattccccaagagtggaatctttggttcaagaggacctatggataagtgcaccttctgtgctggaggtcctgaagagactcacagcgagaaggagtataagctctatggacagaatcgtatcgctgagggcaaagtccctgtatgtgcagcgatgtgctccaccaaggcactcctagcaggagattctgatagcatctcgctcatcattcgtgagagagtgctcaagcgaggcagtggaacagccagtgttccttacacctggtcacaagcctacaaggattaa

SEQ ID NO: 67938 - protein, 200 aa, Wolinella succinogenes
MESQARVKFYCDEARCIDCHGCDVACKEAHHLPVGVNRRRVVTLNEGLVGKEKSLSIACMHCSDAPCAQVCPVDCFYVRADGIVLHDKEKCIGCGYCLYACPFGAPQFPKSGIFGSRGPMDKCTFCAGGPEETHSEKEYKLYGQNRIAEGKVPVCAAMCSTKALLAGDSDSISLIIRERVLKRGSGTASVPYTWSQAYKD

SEQ ID NO: 67939 - DNA, 939 bp, Haemophilus influenzae
  CDS (1)..(939): transl_table=11
atggctggaactgctcaaggcgttcaaacgcaagacgttattaaaatctccgcaacatctggtttaacaccagcaccacaagcgagagatcataaagttgaaatcgcaaaattaattgatgtttcaacttgtataggatgtaaagcctgtcaagtgggttgttcagagtggaatgatattcgctctgatatcaatgcacaatgtgttggggtttatgacaatccagttgatcttgatgcaaaagcatggacagtgatgcgttttaacgaagttgaagaaaacgatcgtttagaatggctgattcgtaaagatggctgtatgcactgcacagaacctggttgtttaaaggcttgtcctgcacccggtgcaatcattcaatatgctaacggtattgtagatttccaatccgataaatgtattggttgtggttattgtattgcaggctgtccattcaatattccacgaatgaatcctgaagacaatcgtgtatacaaatgtactctttgtgtagatcgtgtttctgtgggacaagagcccgcttgcgtgaaaacctgtccaacaggtgctattcgtttcggctctaaagaagaaatgaaaatttacgcagaacaacgcgtggcagatttaaaatcccgtggttatgaaaacgcaggactttacgatcctccaggtgtaggcggtacacacgtaatgtatgtgttgcatcacgcagataaacctgagctttacaatggtcttccaaaagatcctcaaattgatttgagtgtgaccttatggaaagatgtattgaaaccagtcgctgcagttgcaatgggtggtctagctctagcagaagttgcgcactacttaaccgttggcccaaatgtagaagaagatgtggaagatcatcatcacgaatttgaagaaaataaaccatctaagggggaaaataatgagtaa

SEQ ID NO: 67940 - protein, 312 aa, Haemophilus influenzae
MAGTAQGVQTQDVIKISATSGLTPAPQARDHKVEIAKLIDVSTCIGCKACQVGCSEWNDIRSDINAQCVGVYDNPVDLDAKAWTVMRFNEVEENDRLEWLIRKDGCMHCTEPGCLKACPAPGAIIQYANGIVDFQSDKCIGCGYCIAGCPFNIPRMNPEDNRVYKCTLCVDRVSVGQEPACVKTCPTGAIRFGSKEEMKIYAEQRVADLKSRGYENAGLYDPPGVGGTHVMYVLHHADKPELYNGLPKDPQIDLSVTLWKDVLKPVAAVAMGGLALAEVAHYLTVGPNVEEDVEDHHHEFEENKPSKGENNE

SEQ ID NO: 67941 - DNA, 1113 bp, Desulfovibrio vulgaris
  CDS (1)..(1113): transl_table=11
atggatcgcagaagattcctgaccctgctgggaagcgccggccttaccgccacagtggccacggcgggcacggccaaggccgcgtccacgggcaccttcccgggatacaaggacagctacggggtgctgcacgacaccacccgttgcatcggttgccgcaagtgcgagcaggcctgcaacgaagtgaacaagctccccgcccccaaggccaagttcgacgacctgacggttctcgaaaagacgcgtcgcaccgacgccgactcgtggaccgtggtcaacaggtacaacgctgccgggctcgaccatccggtcttccgcaagcagcagtgcaaccactgtctcgaaccggcctgcgcctcggcgtgtttcgtcaaggccttcaccaagaaccccgacggctccgtcacctatgacggcagcctctgcgtcggctgtcgctactgcatggtcgcctgcccgttcaacgtgccggccttccagtacgccgaagccttcgacccgctcatccagaagtgcaccatgtgccacccgcgtctggccgagggcaagctccccggctgcgtcgagatatgcccgaaggaggccctcaccttcggtcgccgcaaggacctcgtgcgcatcgcccatgaccgcatccgccagaaccccggtcgttacatcgaccacgtgtacggcgaacaggaaatgggcggcaccgcgtggatgtacctctcgggcgtgcccttctccgcgaccggcatgaacgaggaactcggcaccaagtcggcccctgaatacaccgcaggcgcactgggtgccgtgcccatggtcgttggcatctggcccatccttctgacgggtgcctatgccatcaccaagcgcaaggaaaagatcgccgccgaagagcaggccgaagccgtgaagcaggccgttgctgcaagccgcgccgaagccgacgacaagctcaaggctgcccttgccaaggccgacaaggacaaggaggccgccgtcacccgcgaggtgaagaaggccgtcgacgaagcgcgcaagaccttcgaggaggaactggcagcgaaagagcagcccgaagcccccgaaggcgacgacgccggcaagcccggggaggatgcgtag

SEQ ID NO: 67942 - protein, 370 aa, Desulfovibrio vulgaris
MDRRRFLTLLGSAGLTATVATAGTAKAASTGTFPGYKDSYGVLHDTTRCIGCRKCEQACNEVNKLPAPKAKFDDLTVLEKTRRTDADSWTVVNRYNAAGLDHPVFRKQQCNHCLEPACASACFVKAFTKNPDGSVTYDGSLCVGCRYCMVACPFNVPAFQYAEAFDPLIQKCTMCHPRLAEGKLPGCVEICPKEALTFGRRKDLVRIAHDRIRQNPGRYIDHVYGEQEMGGTAWMYLSGVPFSATGMNEELGTKSAPEYTAGALGAVPMVVGIWPILLTGAYAITKRKEKIAAEEQAEAVKQAVAASRAEADDKLKAALAKADKDKEAAVTREVKKAVDEARKTFEEELAAKEQPEAPEGDDAGKPGEDA

SEQ ID NO: 67943 - DNA, 810 bp, Archaeoglobus fulgidus
  CDS (1)..(810): transl_table=11
atgatgtcgagaagaaaatttctgttgctaacgggagcagcagcagcgggagctattttaactccgcaaatctcagcaaaaacacagttcatcgaatctcctgaggaggtcagagagaagagaagatgggccatggccgttgacgttgaaaggtgcacgcagtgcatggaggagcttatcgcaaaaactggcgacgagaagataaagccaccgtgcgttgttgcatgcgacaaagaaaacaacgttccagagtttgaggaagagagatttgaccctcagtggatgaggatagcgaaactgaagctcgataagcctgaagtgaatcctaaagagtactacatccctctgctctgcaaccactgcgagcacccaccatgtgttcaggtctgccttacaaaggcgagcttcaagagacccgatggcattgttgagatagacatgcaccgttgcatcggctgcagatactgcatgattgcctgtccctacggggcgagatgcttcaacttcattgatccaagagaggggctgaaggaggtaaatccgaacgtccagatgagaacagaaggtgtggtggagaagtgtactttctgcgtccacaggattgatgaggctgtgaagaagggtgaggagccgattccggcatgcgttgaggcctgccacaagtacgggaaaggagcgctggtgtttggaaatattaaagatccaaacagcgagatttcaaagattctcagggaaaatatcgtcgttcagctcagggcaaatcttggcacagatccgcacgttttctacgccaagctggggggtgagtaa

SEQ ID NO: 67944 - protein, 269 aa, Archaeoglobus fulgidus
MMSRRKFLLLTGAAAAGAILTPQISAKTQFIESPEEVREKRRWAMAVDVERCTQCMEELIAKTGDEKIKPPCVVACDKENNVPEFEEERFDPQWMRIAKLKLDKPEVNPKEYYIPLLCNHCEHPPCVQVCLTKASFKRPDGIVEIDMHRCIGCRYCMIACPYGARCFNFIDPREGLKEVNPNVQMRTEGVVEKCTFCVHRIDEAVKKGEEPIPACVEACHKYGKGALVFGNIKDPNSEISKILRENIVVQLRANLGTDPHVFYAKLGGE

SEQ ID NO: 67945 - DNA, 987 bp, Escherichia coli O157
  CDS (1)..(987)
atgaacagacgtaattttattaaagcagcctcctgcggggcattgctgacgggcgcgctgccgtctgtcagtcatgcggctgctgaaaaccgcccgccaattccgggatcgctggggatgttgtacgactcgaccttgtgcgtaggctgccaggcttgcgtcaccaagtgtcaggatatcaacttccctgaacgtaacccgcaaggggaacagacctggtcgaacaacgacaaactgtcgccgtataccaataacatcattcaggtgtggaccagcggcacaggggtcaacaaagaccaggaggagaacggctacgcgtacattaagaaacagtgtatgcactgcgtcgatccgaactgtgtctctgtgtgcccggtctctgcactgaaaaaagatccgaaaaccggcattgtccattacgacaaagacgtgtgcaccggttgccgttactgcatggtcgcctgtccgtacaacgtgccgaagtacgactacaacaacccgtttggtgcgctgcataagtgcgagctgtgcaaccagaaaggtgtggaacgtctcgataaaggcggtctgcctggctgcgtagaagtgtgcccggcgggcgcggtgattttcggtacgcgtgaagagctgatggcggaggcgaaaaaacgtctggcgctgaagcctggcagcgaataccactatccgcgtcagacgctgaaatctggcgacacttacctgcatacggtgccgaaatattatccgcatctgtacggcgagaaagagggcggcggtactcaggttctggtactgacgggtgtgccttatgaaaatctcgacctgccgaaactggacgatctttctaccggtgcgcgttccgaaaatattcaacacaccctgtataaaggcatgatgctaccactggctgtgctggcgggcttaaccgtgctggttcgtcgcaacaccaaaaacgaccatcacgacggaggagacgatcatgagtcatga

SEQ ID NO: 67946 - protein, 328 aa, Escherichia coli O157
MNRRNFIKAASCGALLTGALPSVSHAAAENRPPIPGSLGMLYDSTLCVGCQACVTKCQDINFPERNPQGEQTWSNNDKLSPYTNNIIQVWTSGTGVNKDQEENGYAYIKKQCMHCVDPNCVSVCPVSALKKDPKTGIVHYDKDVCTGCRYCMVACPYNVPKYDYNNPFGALHKCELCNQKGVERLDKGGLPGCVEVCPAGAVIFGTREELMAEAKKRLALKPGSEYHYPRQTLKSGDTYLHTVPKYYPHLYGEKEGGGTQVLVLTGVPYENLDLPKLDDLSTGARSENIQHTLYKGMMLPLAVLAGLTVLVRRNTKNDHHDGGDDHES

SEQ ID NO: 67947 - DNA, 678 bp, Haemophilus influenzae
  CDS (1)..(678): transl_table=11
atgacagtctgctcacgccgaaactttgtttctggcatgggggcagtgatccttatgacggggacatctttacctgcttttgcaaaagaaaacaaggcagataaacctaaacgttacgcaatgatacatgatgaaaatgcgtgtatcggttgtacagcctgtatggactcatgtcgtgatgtaaaccaagtgccagaaggcgtttctcgcttagagattctacgtagtgaaccttatggggaatttccaaatcaagaatacgagttctttcgtcaatcttgccaacattgtacaaatgcaccttgtgtagcagtttgtccaactggtgcatcttttattgataaagagactggcattgtagatgtacataaagatttatgcataggctgccaatactgtatagcagtttgcccatatcgtgtacgttttattcatccaatacatcgtaccgcagataaatgtaacttctgccgcgatacaaatttagccaatggtaaacaacctgcttgtgtagaggcttgcccaaccaaagcattaacctttggggatatgaatgatccaacaagtgcagtttcacgtaaagtgaaagaaaaaccggtttatcgcactaaagtggaattaggtacacaaccaaacttatatcacattccattccaacatggggagcctagaagatga

SEQ ID NO: 67948 - protein, 225 aa, Haemophilus influenzae
MTVCSRRNFVSGMGAVILMTGTSLPAFAKENKADKPKRYAMIHDENACIGCTACMDSCRDVNQVPEGVSRLEILRSEPYGEFPNQEYEFFRQSCQHCTNAPCVAVCPTGASFIDKETGIVDVHKDLCIGCQYCIAVCPYRVRFIHPIHRTADKCNFCRDTNLANGKQPACVEACPTKALTFGDMNDPTSAVSRKVKEKPVYRTKVELGTQPNLYHIPFQHGEPRR

SEQ ID NO: 67949 - DNA, 579 bp, Salmonella typhi
  CDS (1)..(579): transl_table=11
atgaatcatttaacgaatcagtacgtcatgctgcatgatgaaaaacgttgtatcggctgccaggcgtgtaccgttgcctgcaaagtgcttaatgacgtaccggagggatttagccgcgtacaggtacaaattcgcgcccctgaacaggcatccaacgcactaacccattttcaatttgtccgcgtctcctgtcagcactgtgaaaatgcgccatgtgtcagcgtttgtcctaccggagcgtcatatcgtgatgaaaacgggatcgtgcaggtggataaatcgcgctgtattggctgcgattattgtgttgccgcgtgtcctttccatgtgcgctatctgaatccgcaaaccggcgtcgccgacaagtgtaacttctgtgccgacacgcggttggcggctggccagtctccggcgtgcgtatccgtttgcccaacggacgcgctgaaattcggcagactggatgagagcgagatccagcgctgggtcggtcagaaagaggtctatcgccagcaggaagcgcgtagcggcgcggtcagtctgtaccgtcgtaaagaagtccatcaggagggtaaagcatga

SEQ ID NO: 67950 - protein, 192 aa, Salmonella typhi
MNHLTNQYVMLHDEKRCIGCQACTVACKVLNDVPEGFSRVQVQIRAPEQASNALTHFQFVRVSCQHCENAPCVSVCPTGASYRDENGIVQVDKSRCIGCDYCVAACPFHVRYLNPQTGVADKCNFCADTRLAAGQSPACVSVCPTDALKFGRLDESEIQRWVGQKEVYRQQEARSGAVSLYRRKEVHQEGKA

SEQ ID NO: 67951 - DNA, 576 bp, Wolinella succinogenes
  CDS (1)..(576): transl_table=11
atggcaaaaaaatatggaatgatccacgatgagaatctatgcatcggttgccaagcgtgcaatatcgcctgtcgatctgaaaacaagattcctgatagtgtttaccgattgcaagtctgggtgcagggccccaagaagctacctgatggaacactcagcttcaactatcaccgacaatcttgcgttcagtgtgaaaacaccccctgcgtgagtgtctgccccaccaaggcctcttacgtgaatgaagatgggattgtgagcgtcaatgtcgatctttgcgttggatgcctctattgcatcgcggcgtgtccctatcaggcgcgatatgtggatcctgtgaccaaggctcccgataagtgcaacttctgtaaagatacgcgtctagcgcgtggcgaagagcctgcgtgtgtgaccgtctgccctacagatgcgcttacttttggtgatatgagtgatcccaaaagcaaaatcaataaagtgttggcgtccaagccgacccttcgccccaaagaatccttgggaactaaacccaagctctttatcgtgcctaacaagagaggaggaatcgagtcatga

SEQ ID NO: 67952 - protein, 191 aa, Wolinella succinogenes
MAKKYGMIHDENLCIGCQACNIACRSENKIPDSVYRLQVWVQGPKKLPDGTLSFNYHRQSCVQCENTPCVSVCPTKASYVNEDGIVSVNVDLCVGCLYCIAACPYQARYVDPVTKAPDKCNFCKDTRLARGEEPACVTVCPTDALTFGDMSDPKSKINKVLASKPTLRPKESLGTKPKLFIVPNKRGGIES

SEQ ID NO: 67953 - DNA, 618 bp, Escherichia coli O6
  CDS (1)..(618)
atgaccacacaatatggattttttatcgattccagccgctgcactggctgtaaaacctgcgaactggcgtgcaaagattttaaagatcttggcccggaagtcagtttccgccgtatttatgaatatgctggcggcgactggcaggaagataatggcgtctggcaccagaacgtgttcgcttattatctctccatctcctgtaaccattgcgatgaccccgcatgtacaaaagtctgccccagcggcgcaatgcataagcgtgaagatggctttgtggtggttgatgaagatgtttgtatcggctgccgctactgccacatggcttgtccgtacggcgcgcctcagtacaatgctgaaaaaggacacatgacgaagtgcgatggttgttattcgcgcgtcgccgaggggaaacaacccatatgtgtcgaatcctgcccgctgcgtgcacttgagttcggtccaattgaagagctgcgccagaagcacggcactcttgctgccgtcgcgccactgccgcgcgcgcatttcacaaaacccaatatcgttatcaaacctaacgccaacagccgcccgaccggcgataccactggttatctggctaatccggaggaagtgtaa

SEQ ID NO: 67954 - protein, 205 aa, Escherichia coli O6; identical to SEQ ID NO: 67522

SEQ ID NO: 67955 - DNA, 19 bp, Artificial sequence
  Primer sequence
atgacctggtctcgtcgcc

SEQ ID NO: 67956 - DNA, 25 bp, Artificial sequence
  Primer sequence
ttattggctcacctccccgtattta

SEQ ID NO: 67957 - protein, 279 aa, Artificial sequence
  Consensus
  Variant (2)..(4): Xaa in position 2 to 4 is any amino acid
  Variant (6)..(6): Xaa in position 6 is any amino acid
  Variant (8)..(8): Xaa in position 8 is any amino acid
  Variant (9)..(21): Xaa in position 9 to 21 is any or no amino acid
  Variant (23)..(24): Xaa in position 23 to 24 is any amino acid
  Variant (26)..(28): Xaa in position 26 to 28 is any amino acid
  Variant (30)..(42): Xaa in position 30 to 42 is any amino acid
  Variant (43)..(116): Xaa in position 43 to 116 is any or no amino acid
  Variant (118)..(118): Xaa in position 118 is any amino acid
  Variant (121)..(124): Xaa in position 121 to 124 is any amino acid
  Variant (125)..(127): Xaa in position 125 to 127 is any or no amino acid
  Variant (129)..(131): Xaa in position 129 to 131 is any amino acid
  Variant (134)..(135): Xaa in position 134 to 135 is any amino acid
  Variant (137)..(141): Xaa in position 137 to 141 is any amino acid
  Variant (142)..(143): Xaa in position 142 to 143 is any or no amino acid
  Variant (145)..(145): Xaa in position 145 is any amino acid
  Variant (147)..(152): Xaa in position 147 to 152 is any amino acid
  Variant (154)..(154): Xaa in position 154 is any amino acid
  Variant (157)..(158): Xaa in position 157 to 158 is any amino acid
  Variant (160)..(162): Xaa in position 160 to 162 is any amino acid
  Variant (165)..(177): Xaa in position 165 to 177 is any amino acid
  Variant (178)..(229): Xaa in position 178 to 229 is any or no amino acid
  Variant (232)..(233): Xaa in position 232 to 233 is any amino acid
  Variant (235)..(237): Xaa in position 235 to 237 is any amino acid
  Variant (238)..(261): Xaa in position 238 to 261 is any or no amino acid
  Variant (263)..(263): Xaa in position 263 is any amino acid
  Variant (265)..(267): Xaa in position 265 to 267 is any amino acid
  Variant (269)..(270): Xaa in position 269 to 270 is any amino acid
  Variant (271)..(274): Xaa in position 271 to 274 is any or no amino acid
  Variant (276)..(278): Xaa in position 276 to 278 is any amino acid
DXXXCXGXXXXXXXXXXXXXXCXXCXXXCXXXXXXXXXXXXXXXXXXXXXXXXXXXXXXXXXXXXXXXXXXXXXXXXXXXXXXXXXXXXXXXXXXXXXXXXXXXXXXXXXXXXXXXCXHCXXXXXXXCXXXCPXXAXXXXXXXGXVXXXXXXCXGCXXCXXXCPXXXXXXXXXXXXXXXXXXXXXXXXXXXXXXXXXXXXXXXXXXXXXXXXXXXXXXXXXXXXXXXXXKCXXCXXXXXXXXXXXXXXXXXXXXXXXXXXXPXCXXXCXXXXXXAXXXG

SEQ ID NO: 67958 - protein, 47 aa, Artificial sequence
  Consensus
  Variant (2)..(2): Xaa in position 2 is any amino acid
  Variant (5)..(6): Xaa in position 5 to 6 is any amino acid
  Variant (7)..(7): Xaa in position 7 is any or no amino acid
  Variant (9)..(9): Xaa in position 9 is any or no amino acid
  Variant (11)..(13): Xaa in position 11 to 13 is any amino acid
  Variant (16)..(24): Xaa in position 16 to 24 is any amino acid
  Variant (25)..(25): Xaa in position 25 is any or no amino acid
  Variant (27)..(34): Xaa in position 27 to 34 is any amino acid
  Variant (36)..(36): Xaa in position 36 is any amino acid
  Variant (38)..(38): Xaa in position 38 is Cys or Thr
  Variant (39)..(40): Xaa in position 39 to 40 is any amino acid
  Variant (42)..(43): Xaa in position 42 to 43 is any amino acid
  Variant (44)..(44): Xaa in position 44 is Ala, Gly, Asn, Ser or Val
  Variant (47)..(47): Xaa in position 47 is Phe, Trp or Tyr
CXHCXXXPXCXXXCPXXXXXXXXXXGXXXXXXXXCXGXXXCXXXCPX

SEQ ID NO: 67959 - protein, 15 aa, Artificial sequence
  Consensus
  Variant (2)..(2): Xaa in position 2 is any amino acid
  Variant (4)..(6): Xaa in position 4 to 6 is any amino acid
  Variant (8)..(10): Xaa in position 8 to 10 is any amino acid
  Variant (11)..(11): Xaa in position 11 is Ala, Cys, Ser or Thr
  Variant (12)..(14): Xaa in position 12 to 14 is any amino acid
PXCXXXCXXXXXXXG

SEQ ID NO: 67960 - DNA, 1659 bp, Escherichia coli
  CDS (1)..(1659)
atgttgaccccgttgacggccttcgcgggagtgcggttgcgctggcctgccatgatgcgactcacttgcatcggcattctggcgcagttcgcgctcctgctgctcgcctttggcgtactgacgtattgttttctcatcagcgatttctcggtcatttatgtcgcgcaacatagctatagcctgctgtcgtgggaactcaagctggcagcggtgtggggcggccatgaaggttcgctgctgctttgggtgctgctgctttccgcctggagcgcgctgtttgcctggcattatcggcagcaaaccgatccgctatttccgctgacgttagccgttttatctctcatgctcgccgcactgctactgtttgtggtgctgtggtccgatcccttcgtgcggatatttccaccagcaatcgaaggccgcgatctcaatccgatgctgcaacatcccggtcttatctttcatccaccgctgctttaccttggctatggcggtttgatggtagcggcgagcgtggcgctggcgagtctactgcgcggcgagtttgatggtgcctgcgcccgaatttgctggcgctgggcgttacctggctggagtgcattaacggcggggatcatcctcggttcctggtgggcctactgcgaactcggctggggcggctggtggttctgggatccggtggaaaacgcctctttattaccctggctttctgccactgcgctgctgcacagtttgtccctgacacgccagcgggggattttttgccactggtcgctgttgctggcgatagttactctgatgctgtcgctgctgggcaccttaattgtccgttctggcattctggtttcggttcatgcgttcgcgctggataacgtccgcgccgtgccgttgttcagcctgtttgcactgattagccttgcgtctctggctctgtatggctggcgagcgcgggacggtggcccggcggtgcatttttcggggttatcgcgggaaatgttaatcctcgctacgctgttgctgttttgcgcagtgctactgatcgtgctggtgggaacgctttatccgatgatttacggcctgctgggctggggacgcctctccgttggcgcgccgtattttaaccgcgcgacgttaccgtttggtctgttgatgctggtggtgattgtgctggcgacgtttgtctctggcaaacgcgtgcagcttccggcgctggtagctcatgcgggcgtgctgttatttgccgctggggtcgtggtctccagcgtcagccgtcaggagatcagcctgaatttacagccgggtcagcaggtgacgctggcaggatacaccttccgttttgagtgcctcgatctacaagccaaaggcaattacaccagcgaaaaagcgatagtggcactgtttgaccatcagcaacgcattggtgaactgacgccggagcggcgtttttatgaagcacgccgtcaacaaatgatggaaccgtcaattcgctggaacggcatccatgactggtatgcggtcatgggggagaaaactgggccggatcgttacgcttttcgtttgtatgtacaaagcggtgtgcgctggatctgggggggaggattgttgatgattgcgggcgcattgttaagcggatggcgggggaagaagcgcgatgaataa

SEQ ID NO: 67961 - protein, 552 aa, Escherichia coli
MLTPLTAFAGVRLRWPAMMRLTCIGILAQFALLLLAFGVLTYCFLISDFSVIYVAQHSYSLLSWELKLAAVWGGHEGSLLLWVLLLSAWSALFAWHYRQQTDPLFPLTLAVLSLMLAALLLFVVLWSDPFVRIFPPAIEGRDLNPMLQHPGLIFHPPLLYLGYGGLMVAASVALASLLRGEFDGACARICWRWALPGWSALTAGIILGSWWAYCELGWGGWWFWDPVENASLLPWLSATALLHSLSLTRQRGIFCHWSLLLAIVTLMLSLLGTLIVRSGILVSVHAFALDNVRAVPLFSLFALISLASLALYGWRARDGGPAVHFSGLSREMLILATLLLFCAVLLIVLVGTLYPMIYGLLGWGRLSVGAPYFNRATLPFGLLMLVVIVLATFVSGKRVQLPALVAHAGVLLFAAGVVVSSVSRQEISLNLQPGQQVTLAGYTFRFECLDLQAKGNYTSEKAIVALFDHQQRIGELTPERRFYEARRQQMMEPSIRWNGIHDWYAVMGEKTGPDRYAFRLYVQSGVRWIWGGGLLMIAGALLSGWRGKKRDE

SEQ ID NO: 67962 - DNA, 1980 bp, Gluconobacter oxydans 621H
  CDS (1)..(1980)
atgttcggacctgaacagggccatttcgccctggccctcgcctgcgtgctcgccctcgtgcagttcgccgtcccgctctggggcgcaaaccgccgcgatgcccgcctcgtggggctcgcgccctatctcgcggtctcgcagcttatcgcgctgggctattcgttcctgtgcctcgtgatgtgcgccgtcagcgacgatttctcggtccagaacgttgcagcaaactctgccgtctccaagccgctcctgtataaaatcacgggcgtctggggaaaccacgaaggctcggtcctgctctggacgctgatccttgccgtctgcggcggtgcggtctcgctgttcggccgtaacctgccagacatcctgcgcggacgcgttctggccattctcggcggtgtctccgccgggttccagatgttctgcctcctgacctccgatccgttcgaccgcgtcttcccggcaccgatggacggtcagggcatgaacccgctcctgcaggatccgggtctcgccttccacccccccattctctacaccggctatgtcggtttcgccgtccccttcgccttcgccgtcgcggctctgatcgaaggccgcgtcgatgccgcatggggccgctgggtccgtccctgggccgtggcggcctggtgcttcctgacctgcggcatcgcgctgggctcctggtggtcctattatgtgctgggctggggcgggtactggttctgggatccggtggaaaacgcctccctcattccctggctgacgggcacggccctcgtgcattccgccatcgtcgtggaaaagcgcgaaggcctgaaaatctggacggtcctgctggctatcgcgaccttctcgttctcactgtccggcaccttcctcgtccgctcgggcatcctgaactcggtccacgccttcgccaacgatcccgcacgcggcgtgttcatcctggccctgctcgccatcgtcatcggcggttcgcttgccctatttgcttggcgcgccccgtccctcacctcgaccggcctgttttcgccgatctcccgtgaaggctcgttggtcctgaacaacatcctgctgtgctcgatctgcgccgtggtcgtgacgggcacgatgtatccgcccttcatgcagcttctggccggccgtaccatttccgtcggcaagccgttctttgacgccgccacgatcccgctgaccctgccgctcctgctggccatgggtgttggcaccgccctgccgtggaaacgcgcacagctcgcccggaccttctcgcatctctatgccgccgccggcatcgccgcgatcgggctggtcctgtgcttctggaagctctccggtgtcctgcccatcgcctgcggcgcgctggccatctgggtcatcgcggcttccgcttccgacgtcctgcgccggatcggcattggccacacctccgcacagggcgtgtgggagcgcatgaagcacctgccgcgttcaagctggggcgcggctctcgcccatatcggcgcaggcatcaccgtgcttggtctgtgtggcatgtcgcaggcgcagcacgccatcgtcgaagtccatattggcgagacccgctcgctggccggcgacgactggaccctgctcgacgtgcacgactatatcggcccgaactacaaggccatgcaggctgacatcgccatccgccacaacggcaagctggtcaccatcctgcaccccgaaaagcgcgacttcacgacgcagagccagaccacgaccgaagtcgccatccacaccaatttcatcaccgatctgtacggcgtggtcggtgaccggcacggcacgggcaaggacacgacctatgtcctgcgcctgcaccgcaatccgctcgcaccctggatgtggctgggcggactggtcatggccatcggcggcgcgttctcgctgtctgaccgccggatgcgaattggcgcccccaagcgcgccgccgcccgcaacatggcgcgtgcctga

SEQ ID NO: 67963 - protein, 659 aa, Gluconobacter oxydans 621H
MFGPEQGHFALALACVLALVQFAVPLWGANRRDARLVGLAPYLAVSQLIALGYSFLCLVMCAVSDDFSVQNVAANSAVSKPLLYKITGVWGNHEGSVLLWTLILAVCGGAVSLFGRNLPDILRGRVLAILGGVSAGFQMFCLLTSDPFDRVFPAPMDGQGMNPLLQDPGLAFHPPILYTGYVGFAVPFAFAVAALIEGRVDAAWGRWVRPWAVAAWCFLTCGIALGSWWSYYVLGWGGYWFWDPVENASLIPWLTGTALVHSAIVVEKREGLKIWTVLLAIATFSFSLSGTFLVRSGILNSVHAFANDPARGVFILALLAIVIGGSLALFAWRAPSLTSTGLFSPISREGSLVLNNILLCSICAVVVTGTMYPPFMQLLAGRTISVGKPFFDAATIPLTLPLLLAMGVGTALPWKRAQLARTFSHLYAAAGIAAIGLVLCFWKLSGVLPIACGALAIWVIAASASDVLRRIGIGHTSAQGVWERMKHLPRSSWGAALAHIGAGITVLGLCGMSQAQHAIVEVHIGETRSLAGDDWTLLDVHDYIGPNYKAMQADIAIRHNGKLVTILHPEKRDFTTQSQTTTEVAIHTNFITDLYGVVGDRHGTGKDTTYVLRLHRNPLAPWMWLGGLVMAIGGAFSLSDRRMRIGAPKRAAARNMARA

SEQ ID NO: 67964 - DNA, 1989 bp, Wolbachia endosymbiont strain TRS of Brugia malayi
  CDS (1)..(1989)
atgcctgagcttgggaatatattactactgttgtcctgcttattgtccttaacatatctatttctaccgttcaattcttaccgattcattaccactgccatattcttctgtatatcagtatcaatggctattttgatctactgccacattataaacgatttctcactcgaaaacgtatattaccactctcatacgacaaaacctttgatctataaaatctgtggcgtttggggaaataaagaagggtctatgttgctttggaccttagtgcttactttttacctatttctaatggatatttttattggtgataacagtgaattaaagaaagtatccttgatcactcaaggcttaatctgcttttgtttttcgctgtttactttacttaagtccgatccttttactaaaatgccaagcatagaaacagatggccttggttttcatccgatattgcaggacataggccttgccattcatccaccaatattatatttggggtaccttggatttagcgttcccttttcgctctctatagctgggttaattataaacatcgaaggagacatttgggctaaaattgtcaggccatgggtacttgtttcttggtcgctacttaccttgggtattagccttggcagttggtgggcataccgcgaacttgggtggggtggattttggttttgggatccagtagaaaacgtttctttaatgccatggttaattgcagtagcactgacgcatctgttactcgtggtacgaaatttcaatattttaaggaactttgccattttgcttacgctcacaactttcatattgagtgtaactggaacatttttagtccgctctggaatactttcttcagttcacacgtttgcagatgatccaggatatgggctgtatatactggctttacttggtgtaattacagccagtagcttagcaatatttgtggcatttacgaaaaagagtggatctcttattacattaccatctatcatccaattagctgatattgggatccagggaaaaagtatgcagtcacatgctggcatgacaccaaagaatacaccaaagcaaaactttcctattttgtcccgctttacaatgatactgatgaacaatttattattaattactgcctttttcatcgtgtttattggcactttataccctacaatgcttaaatatttaaccggtgaactcatttcagttggagcaccgtactacaattccttatttaatcctattgcactggctactctagtgcttaccatggtaggacaatactgccgttggcaggggaatagcttgttaccaatattccatgaatatagactctcattctgtagtgctgcagccatcttaccgtttatctttcatatggagctaatgattgtgctatcaattacaatctccatggcactattagcctttgttttagaagcatatagcaaaagaattcgtttatttaaagtggcatttagtgaatcaatttcattagtaagaggagtttccaagtcttactatgctatgatgttagctcatgctggggtagcaattctagtacttggtatagcctattcagtcggttggcaagaaaaaaaagaaaattacctaaaaataggagatagcataacagtcaacaaattcaaagttactttacgaaatactgaatttataaaaaagaagaatttccatgcagtgagaggcacaatggatattagaaatttgttgaacaacaagatactaggtgaagtaacccctgaatatagattttatcttgtggagggtcagaaaaatattgaaagcagtatttaccacaatttattttctgatatttatattgtaattggcgagattgataaaaataaaaacaagatcgccactaaagtacactacaaacctggaatgcctataatctggtttggatcctgccttatcgcttttggttcgctccttgttgctttgcccttattgagaagattttga

SEQ ID NO: 67965 - protein, 662 aa, Wolbachia endosymbiont strain TRS of Brugia malayi
MPELGNILLLLSCLLSLTYLFLPFNSYRFITTAIFFCISVSMAILIYCHIINDFSLENVYYHSHTTKPLIYKICGVWGNKEGSMLLWTLVLTFYLFLMDIFIGDNSELKKVSLITQGLICFCFSLFTLLKSDPFTKMPSIETDGLGFHPILQDIGLAIHPPILYLGYLGFSVPFSLSIAGLIINIEGDIWAKIVRPWVLVSWSLLTLGISLGSWWAYRELGWGGFWFWDPVENVSLMPWLIAVALTHLLLVVRNFNILRNFAILLTLTTFILSVTGTFLVRSGILSSVHTFADDPGYGLYILALLGVITASSLAIFVAFTKKSGSLITLPSIIQLADIGIQGKSMQSHAGMTPKNTPKQNFPILSRFTMILMNNLLLITAFFIVFIGTLYPTMLKYLTGELISVGAPYYNSLFNPIALATLVLTMVGQYCRWQGNSLLPIFHEYRLSFCSAAAILPFIFHMELMIVLSITISMALLAFVLEAYSKRIRLFKVAFSESISLVRGVSKSYYAMMLAHAGVAILVLGIAYSVGWQEKKENYLKIGDSITVNKFKVTLRNTEFIKKKNFHAVRGTMDIRNLLNNKILGEVTPEYRFYLVEGQKNIESSIYHNLFSDIYIVIGEIDKNKNKIATKVHYKPGMPIIWFGSCLIAFGSLLVALPLLRRF

SEQ ID NO: 67966 - DNA, 1914 bp, Reclinomonas americana
  CDS (1)..(1914)
atgtcttctttttttggacattttttaataattatagctatttttttacttataattattttttttaaatcatttttttataacaaacaaaataaaattatatacaaaaatcaaatacaaatacttatctcaatatatttttttatcttaacattatcttttttttctttattagaatcacacttgttttctaatatttctattattaatattttaaatagtacacattcaaaacaaccacttatttataaaatttgtgcactttggagtaatcatgaaggatctatgttactttggtgctggattctttcaatatatacctacagtttactttttttaagaaaattaactattgatttttttcgtagtactattctaatacaatctttaattaatttattttttcttttttttattctttttacatcaaatccatttttacaaattattgaccgctttcttgatgggaaacaactaaatccaatacttcaagacattgttttatcaatacatccacctcttgtatatttaggatacttaggattttcaataccattttcactaactatcgcatatttatttaatcattctaaagaaacacaagcatggttattttatatacaaaaatataatctaatttcatggtgttttcttacatttggtatttttttaggaagttggtgggcttactatgaattgggatggggtggttggtggttttgggaccctgttgaaaatgcttctttaatgccttggattcttagtacagctcttttacattctattcttaatactaagaaatcaaataccttaactaaaacaacgatatatttatcttttttttgtttttattcaagtttattgggtactttttttgtacgttctggacttatcgattctgttcacagtttcgcatctgattctaatcgcggacaatttattttttgttttcttttctttttatttttaatctttatttatcttattttaaaatataataaatatattttttctaaagatattcgtaatcttttttcaaaagaaggtcttatttctttaaatcaatttttttttatttctttctatattattattttaattggtactttttatccaacaatacattattttttttttaaacaatccataaccattggaccttctttttacaatcaaatgataataccaattctcgtacctttttttatttttatgatttcttcattatattttcattgggaatctattaaaattaaaaaaatttttttttctactaaagaacttctttttattttttgtttttcaactgctattttcagttttcttttttttgaaaattatcaacgtttttatattttatatctttttataccatttttagtatggtctattttgaaacatttctattctttttttatttttaaaaaatataattctttttcaatgttaatttctcattttggtgttactatttttatactttctgttttattatggtattgtttttacaaagaaagtcatcaaattatgtatccaggagatagacattttttcaatcattatgaatatatttttaaaggtattaatcttattaaaggtcctaattacgatgctttttatggatcttttttaattcttaaaaataatacaattaatggaacattatttccagaaaaacgacattattatattcaagatttttatgcttctaaagttgatattcatagtaatttttttgatgatgtccatgctattattggagacggtaatttatatactggatggtcaacaagtttttatgtttatccatttttatcttggatatggtttgctggttttttacttgttttaggaggtcttgtttctatttttaaaaaaaaacaaagaatacatattttacaacaatctctataa

SEQ ID NO: 67967 - protein, 637 aa, Reclinomonas americana
MSSFFGHFLIIIAIFLLIIIFFKSFFYNKQNKIIYKNQIQILISIYFFILTLSFFSLLESHLFSNISIINILNSTHSKQPLIYKICALWSNHEGSMLLWCWILSIYTYSLLFLRKLTIDFFRSTILIQSLINLFFLFFILFTSNPFLQIIDRFLDGKQLNPILQDIVLSIHPPLVYLGYLGFSIPFSLTIAYLFNHSKETQAWLFYIQKYNLISWCFLTFGIFLGSWWAYYELGWGGWWFWDPVENASLMPWILSTALLHSILNTKKSNTLTKTTIYLSFFCFYSSLLGTFFVRSGLIDSVHSFASDSNRGQFIFCFLFFLFLIFIYLILKYNKYIFSKDIRNLFSKEGLISLNQFFFISFYIIILIGTFYPTIHYFFFKQSITIGPSFYNQMIIPILVPFFIFMISSLYFHWESIKIKKIFFSTKELLFIFCFSTAIFSFLFFENYQRFYILYLFIPFLVWSILKHFYSFFIFKKYNSFSMLISHFGVTIFILSVLLWYCFYKESHQIMYPGDRHFFNHYEYIFKGINLIKGPNYDAFYGSFLILKNNTINGTLFPEKRHYYIQDFYASKVDIHSNFFDDVHAIIGDGNLYTGWSTSFYVYPFLSWIWFAGFLLVLGGLVSIFKKKQRIHILQQSL

SEQ ID NO: 67968 - DNA, 1863 bp, Cyanidioschyzon merolae
  CDS (1)..(1863)
atgtttggttacgtattgcattttttattaatttttatctttatttattcatgtaactttttttttttagattcattttacaaatacaagaaagttactaccctattagaaatagtacatcattattatttttattttaattacatatacaatattattattatcattatttggttaattggtataatattactattgtcggatttttctatattgtttgtggtggaattatcttctgtaaaccaaccaagtctttataaattaataactttatggtccaataatgaaggatcattattcttaggatatttcttgcaattcattatttattttacttttatcaattattttattaacaaattaacactgattgttaaactaacttttttttataatgtctattttattctatttaatataagttttctaagtctaacattattgctaatatttttgcgctttgatttttttttcaatttcactgttttggaaggtaatgaactaaattttttattacaagatataaatatattaattcatccaccattaatatatataagttatgcttcgtactctattattttttctatttcttttaccattttaataataaaatgtaaattttatgtgctttatattttaagatttttaaatctaattggttggtttattgcatcttttagtattttattaggaagtagatgggcttatacagaattaggttggggtggtttctggttttgggattccgtagagattatttctctattaccatggttattaagccttgctttattacatagtttgttgctaaacttgaagttttgcattatccgtttagattctttatttctgggaatggctatctattttgttattattattggaataattctagttcgttccggtttgctgcaatcagtacatacttttgtcaattcgccaaattttttaataattttcttgtatttctttttggtattcatttttattctaatagttatacttttaaagaaatatacttattttactagtatttttgacttaaataatcattataattttgtttattatatatttttattagtaattttatatttcttatacttattatttgttttatatttcccttttttaattaaatgttataatgataatgcgttattatttagtttcggttttttcaataaaatattattattatttataggaattttattaacattaataattatatttttaataaattcttggaaattaatttttatttttctaggcattatcataataggcggaattaggggatttcctgaaatttttttagccttatatttttttatttatttattgttatttactctaattttaattataaaacaaaaattttcctttattgtttatcattttaacttttttttcataatgttaagtttattattaataacaatttatggagaagaatttattttaaatttttctattggtaaaacattgctattaaatgataattttatcataatttttcgtgatttaaatcacatatggtcgactaattatttatccacttacggaaacttcttaattacagattttcataatcctatgtgttatgaaaacattcagaacgtattattttctgaaaaacgtttttatttatatcaaagtttaataaatacaaaatcaattatttacacgaatttaatgagtgatgtatacatcttattgggtgatggaaattttgaaaatggttggtatagtagaattttatttatgccatttatatcctggttttggttaggtggaatattcttattagacagtattattttttctttatttcggtgtataaaaaattttcaataa

SEQ ID NO: 67969 - protein, 620 aa, Cyanidioschyzon merolae
MFGYVLHFLLIFIFIYSCNFFFLDSFYKYKKVTTLLEIVHHYYFYFNYIYNIIIIIIWLIGIILLLSDFSILFVVELSSVNQPSLYKLITLWSNNEGSLFLGYFLQFIIYFTFINYFINKLTLIVKLTFFYNVYFILFNISFLSLTLLLIFLRFDFFFNFTVLEGNELNFLLQDINILIHPPLIYISYASYSIIFSISFTILIIKCKFYVLYILRFLNLIGWFIASFSILLGSRWAYTELGWGGFWFWDSVEIISLLPWLLSLALLHSLLLNLKFCIIRLDSLFLGMAIYFVIIIGIILVRSGLLQSVHTFVNSPNFLIIFLYFFLVFIFILIVILLKKYTYFTSIFDLNNHYNFVYYIFLLVILYFLYLLFVLYFPFLIKCYNDNALLFSFGFFNKILLLFIGILLTLIIIFLINSWKLIFIFLGIIIIGGIRGFPEIFLALYFFIYLLLFTLILIIKQKFSFIVYHFNFFFIMLSLLLITIYGEEFILNFSIGKTLLLNDNFIIIFRDLNHIWSTNYLSTYGNFLITDFHNPMCYENIQNVLFSEKRFYLYQSLINTKSIIYTNLMSDVYILLGDGNFENGWYSRILFMPFISWFWLGGIFLLDSIIFSLFRCIKNFQ

SEQ ID NO: 67970 - DNA, 1851 bp, Malawimonas jakobiformis
  CDS (1)..(1851)
atgattgcgaatttaggacattattctttaatttttttattgatttttgctatttttcttctatttattaaaaaaagtattattagtaagaaaatacttataaatgttttttcaataaaaataatcttaataacaattgttttaactactttagaatattcatatataatttcagattttagtattctaaatattaaagaaaattctcacatttcattaccattattatataaaataactgcgttatggggtaaccatgaaggatcaatattactttggtcctttatattaattgttttaactttcctaataatttttattttcagaaatttatctattatttatttgtataaaacagtttatatccaaaacgtattcattatcttttttattatatatacaatatttacaagtaatccatttatatatacatatatatatagccttaatggttctgaactgaatccgatactacaagatactgttttagcaattcatccacctttaatatacattggatatattaatagttctattaatttatctttggtgtcaatcagtttgatagaaaagaattataatgaaatattaaaaaaatatcttaatatatcaggattaataacatggattttcttaacaataggtattttattaggaagttggtggtcatattatgaattaggttggggaggatggtggttttgggaccctgtcgaaaattctgcattattaccttggttattaacattaatactaattcattccattaaatatgaatatttaattcgatggactattttagttaatattagtattttcattttttcaattttaggcacattttttgtaagatcaggaatattggtatctgtacattcatttgctgttgattattcacgcggtattttgatctttgtgtttttaataattcttttaatattaacaggtattttatattttaaaaatataaagtatttatataaacatacgtattattcatataaagccatagataatataattacaataaataatattattattttaattatttttacaacaatattattaggaacagttcttcctacgatttactctatgtttctaaataaaaatatatccattggtatatcattttataataaaacgataatacctatgataattccgatattaataataatgtcaatgattacatatataaataagataaaagaaataaataattatattttttcgattggaactttattatttatattatttataatatttatttataaaattgacttctcttattaccacttaataatactaatgttattattatggctaataacatctttaatcaaatatgtatctctatataaaataataaatccaatgattcttgcacatttaggattctttgtttttattacaggtattataatatcaagtgtttctcaattggattctgtacaaatagtttttccgggagaagaaatcaatttagaaaatcatatttttaattttagggatattaattatattacaggattaaactattattctatttatggtaatattgccgtaattaataagggagattatataaatatactttttccagaaaaacgttactattttataaaaggaatctatattacaaaatcggttatatatagtaattattttgcagatatatatgcaataattggagatggtaattttaaatctggttggtatactaaatactattatcgacctctaatgtcatttatatggataggtcctatgttttttatttttagtgccttaatctcaataaaaaaaataattagtaaaaaaaaaataataaattggttataa

SEQ ID NO: 67971 - protein, 616 aa, Malawimonas jakobiformis
MIANLGHYSLIFLLIFAIFLLFIKKSIISKKILINVFSIKIILITIVLTTLEYSYIISDFSILNIKENSHISLPLLYKITALWGNHEGSILLWSFILIVLTFLIIFIFRNLSIIYLYKTVYIQNVFIIFFIIYTIFTSNPFIYTYIYSLNGSELNPILQDTVLAIHPPLIYIGYINSSINLSLVSISLIEKNYNEILKKYLNISGLITWIFLTIGILLGSWWSYYELGWGGWWFWDPVENSALLPWLLTLILIHSIKYEYLIRWTILVNISIFIFSILGTFFVRSGILVSVHSFAVDYSRGILIFVFLIILLILTGILYFKNIKYLYKHTYYSYKAIDNIITINNIIILIIFTTILLGTVLPTIYSMFLNKNISIGISFYNKTIIPMIIPILIIMSMITYINKIKEINNYIFSIGTLLFILFIIFIYKIDFSYYHLIILMLLLWLITSLIKYVSLYKIINPMILAHLGFFVFITGIIISSVSQLDSVQIVFPGEEINLENHIFNFRDINYITGLNYYSIYGNIAVINKGDYINILFPEKRYYFIKGIYITKSVIYSNYFADIYAIIGDGNFKSGWYTKYYYRPLMSFIWIGPMFFIFSALISIKKIISKKKIINWL

SEQ ID NO: 67972 - DNA, 1512 bp, Archaeoglobus fulgidus DSM 4304
  CDS (1)..(1512): transl_table=11
ttggagccaggcttcctgctgctggcaacttcttttgtagctacattttcggcattttcactgtttctcgcgaaaaaagaaagtctgggtgagttctcactttaccttgcaacctccacgacttttgctgccctgctgctgcttgtaaactactttgttaccgacacgttttcgatatggtacgtttatgctaactccaatgccgaaatgccgctggcctacaaaataagcgcggtttgggccgggaaggaaggcagcctcctcttgtgggttgtgctcaatctgatggtgacctcactctacattaactggggggttaaggacagaaagaaagccaaggtggctgctgtaatgactcttttcacgtcttacctcctccttaaccttttgattttctcaaatccctttacggtcttaccttacacacccccagatggagcaggactgaatcctctgctgagaactgtggagatgatactccaccctccagtggtattcctcgcctactcgcttgccgctctgctgtactccgtaatcgttgcaaattcggaaggggaaagaaccatcgcgaggctcacgtggttatccctaaccctcggcattcttatcggaagtttgtgggcatacaaaactcttggatggggaggtttctggggatgggatccggtggagaacgcttccctacttccgtggctaactcttacagcctacttccatctcactaggggcagagactttttcgcttatctcaccttctcactcgttctttttgcaaccctagtcacgagaagtggcattataagctcagtgcacagttttggaggggaggttagtgattacagctacgtaattccgattctggcctctttagctcctttagttgtcagggcgagacagttttcgatttcaagtctctgcaatcagaatttgccaatcctctttttgtcagcagttattgtggtttttctaggaacgattgccggcgtttctgttgaggtgagcagagaatactacttcgtcacgtttctgccggtcttcgccttaatagtgctgctggttgtgcttaaaataaaaaaagtctcgatgcccgcgacgctgcttcacctgggcgtaattttcctctttgtcggagcaacttccgtttggcttttcgaggaaagcaagaccatcactcttgactcagagggttacaagcttctcgatttaagcattagcgaggatgcggaaaagtacactctcacagcgatagtcaaaaccccggatggcgtaatagcaccgaaagtttacttttacaaagttgctgggaacaacagagtttcttcagttgagataattccgacagtattgtgggacaactattactcaatcaagagcttcgatttggacaacaacgttgtaacgcttgagtactaccgcgttccgctgataaacgccgtctggttgggctcagccctaatgcttcttggagctctcctcaggttctcaggtaaagtttttaaattgggaggctga

SEQ ID NO: 67973 - protein, 503 aa, Archaeoglobus fulgidus DSM 4304
MEPGFLLLATSFVATFSAFSLFLAKKESLGEFSLYLATSTTFAALLLLVNYFVTDTFSIWYVYANSNAEMPLAYKISAVWAGKEGSLLLWVVLNLMVTSLYINWGVKDRKKAKVAAVMTLFTSYLLLNLLIFSNPFTVLPYTPPDGAGLNPLLRTVEMILHPPVVFLAYSLAALLYSVIVANSEGERTIARLTWLSLTLGILIGSLWAYKTLGWGGFWGWDPVENASLLPWLTLTAYFHLTRGRDFFAYLTFSLVLFATLVTRSGIISSVHSFGGEVSDYSYVIPILASLAPLVVRARQFSISSLCNQNLPILFLSAVIVVFLGTIAGVSVEVSREYYFVTFLPVFALIVLLVVLKIKKVSMPATLLHLGVIFLFVGATSVWLFEESKTITLDSEGYKLLDLSISEDAEKYTLTAIVKTPDGVIAPKVYFYKVAGNNRVSSVEIIPTVLWDNYYSIKSFDLDNNVVTLEYYRVPLINAVWLGSALMLLGALLRFSGKVFKLGG

SEQ ID NO: 67974 - DNA, 1992 bp, Mesorhizobium loti MAFF303099
  CDS (1)..(1992): transl_table=11
atggttgaaaccggacatttcgccctggtcctggcgttcgcgctttcgctggtgcagacgatcgtgccgctgttcggcgcgcgcctcaacaaccagcgcctgatggctgtcggcggtcctgtcgcggtcaccggcttcgcgctgacggcgctgtccttcgtcgcgctggcgagcgcctatgcgaactctgatttctccgtggcgagcgtctgggagaactcgcattcgctgcagccgatgatctacaagatcaccggaacctggggcaatcacgaaggctcgatgctgctctgggtgctgatcctgacctttttcggtgctctcgttgcggctttcggttccaatttgccggcaactctgcgcgccaatgtactggccgtgcagggcgccatcggcgcggccttcttcctgttcatcctggcgacgtccaatccattcatccggctcaatccggcgccgatcgaaggccgcgacctcaacccggtcctgcaggatctcggcctcgccattcatccgccgctgctctatctcggctatgtcggcttctcgatctgcttttccttctcggtcgccgccttgatcgaggggcgcatcgacgcctcctgggcgcgctgggtgcggccatggacactggtcgcctggatgtttttgaccggcggcatcgccatgggatcgtactgggcctattacgagcttggctggggcggtttctggttctgggatccggtcgagaacgcctccttcatgccttggctggcgggcaccgcgctgctgcattcggccatcgtcatggaaaagcgctcggcgctgaagatctggacgctgctgctcgccatcctcaccttttcgctgtcgctgctcggcaccttcctggtgcgctcgggcgtgctcacctcggtccacgccttcgccaccgacccggcgcgcggcgtcttcatcctgtgcatcctgacgctgttcatcggcgggtcgctggcgctgtttgcgctgcgcgcctcgagattgacggccggcggcctgttccatccgatctcgcgtgaaggcgcgctcgtcctcaacaatctgttcctgaccacggcgaccgccacggtgctcgtcggcacgctctatccgctggcgctggaggcgctcaccggcgacaagatctcggtcggagcaccgttcttcgatctgactttcggccccttgatgttgccgcttctggtcctcgtgccgttcggcccgctgctggcctggaagcgcggcgacgtcatcgccgcgtcgcagcgcctgatggcggccttcgcgacggcgctggcggcaatgctcgttaccggcctgtttatcgacggcgcgtcggtgttcgccgccctcggcatcggccttgcggtctggctggtcgccggtgcgctcaccgaccttgccgtcaagtccggcgccggatcggttgcgccggccgtcatgctcaggcgctttgccggcctgccgcgctcggtcttcggcacggcattggcccatctcggcctcggcctgaccttgctcggcattgtcgccacgctctccttcggcaccgagaagatcctcaccatgcgcgccggcgagacggtggaactgtcaggtcatacgctgcgtttcgtcgggctttatccggcgcaggggccaaactacagcgaggaccgtggccgcttcgagctgatcggtgtcggcggcagtcctgtcggtgaaatgagttccgccaagcgtttctatccggtgcggcagacgacgacgactgagtccggcatcagaaccctcggtctttcccagctctacatctcgcttggcgacgaagccaaggacggctcggtcgtggtgcgcctgtggtggaaaccattggtgacgctgatctggggcggcggcctgatgatgatggcgggcgcggccatgtcgctgatggacaggcgcctgcgcgtcggcgcgccttcgcgccggcgcaagcaggcgagcgccgtgacgcccgcggtcctgccatga

SEQ ID NO: 67975 - protein, 663 aa, Mesorhizobium loti MAFF303099
MVETGHFALVLAFALSLVQTIVPLFGARLNNQRLMAVGGPVAVTGFALTALSFVALASAYANSDFSVASVWENSHSLQPMIYKITGTWGNHEGSMLLWVLILTFFGALVAAFGSNLPATLRANVLAVQGAIGAAFFLFILATSNPFIRLNPAPIEGRDLNPVLQDLGLAIHPPLLYLGYVGFSICFSFSVAALIEGRIDASWARWVRPWTLVAWMFLTGGIAMGSYWAYYELGWGGFWFWDPVENASFMPWLAGTALLHSAIVMEKRSALKIWTLLLAILTFSLSLLGTFLVRSGVLTSVHAFATDPARGVFILCILTLFIGGSLALFALRASRLTAGGLFHPISREGALVLNNLFLTTATATVLVGTLYPLALEALTGDKISVGAPFFDLTFGPLMLPLLVLVPFGPLLAWKRGDVIAASQRLMAAFATALAAMLVTGLFIDGASVFAALGIGLAVWLVAGALTDLAVKSGAGSVAPAVMLRRFAGLPRSVFGTALAHLGLGLTLLGIVATLSFGTEKILTMRAGETVELSGHTLRFVGLYPAQGPNYSEDRGRFELIGVGGSPVGEMSSAKRFYPVRQTTTTESGIRTLGLSQLYISLGDEAKDGSVVVRLWWKPLVTLIWGGGLMMMAGAAMSLMDRRLRVGAPSRRRKQASAVTPAVLP

SEQ ID NO: 67976 - DNA, 3000 bp, Aeropyrum pernix K1
  CDS (1)..(3000): transl_table=11
atgtctagcctagtcggtctgcactacgccacggttctaccgctggcagcttacctactactagccgttgttattctgcttctcgctatggggagagatggcgcggcgaggaaaacattcacagctagcttgcttatgatagtgcttggctggatcccctatattgctgcgttcctcctgctcgactatagtcttgatgaggttgcgaaaaacgcgtcagacgagttatcgccgtacctgcggatcggggctgcatggtccgggggcggcggtagcctttatctcttctccgctttcctatcactagcaatcctgcttcaaatgctgcttaacaagggcttgaataggcgtgccatggccgttttcacgcttctagtattaacttcgatgacttcagcaactctcatgggagctttcggaaccggaccgggagagcggggagggctaggcataaatcctgttctaaagaactactgggttgtaccccacccaactacaaccttcctgggctacagcttcatattagtagggtctgtagctctggtactaggttattatagaacaggccttccaattcagcttctgggcctcgcgtttctcaccttcggcctcgtcttcggcggcatgtggagctacgagacatttgggtggggaggctactgggcatgggaccctgtcgagacaagccagctcgcggtctggcttgcaacggtcgcctcgatacatatgataggcccccttaggagccttaaccgggggttcgctgcgtatgccgccagctccgtattcttagctctctatgttactaggagcggggttagccctctacacagctttgcggcagagagcttttccgcggttctactgttatcggcttcactggtaatgctggctctctcgatgctactattttcagagggtgtcggagagactctcgagaagtggaagagccgtcttcaggacgcgcgctggccccctagaattgcggagatgaatctctcgaacatacttctgacggttggctctgtgtctattgccctctcagcacttatagtctactcgtcgctgttaacaccatcagtgttaaagctagttggtctcgatactcagcctccatcgtttgagcagggggtgaggttctacaatagactactcatacctctagctcttgtctccctctatgcggtggccggttactacgtctctgttagggcaggggcgaaggcggcttacagtctattcgcaacactgactgttgttctagccataatgggcctggctacggtcaagaataccataattatatcccccctttccgacacgaccacaaacctagcctccgctaccctactagccgcgggctcgatatcgggatcagtgctactagctatgtcactctggatgttatatggcatggtaaagggtaaggtagcaaagagtgtacacacactcaggatagtgcttgagaagctagtgcacgccactatgattatgatacttgtttctgtggccatgagcggtagctatgcttacaaccagggatacagcgaagaggtcttagtaccgttaggcggagaagttagcgttatgggggtcaccatatcatacgagggctacgattatgaattacaccagggtacggtggatctaaagaataatctcgacccttcaagcgccattttgattacagccagggaagccctaaacatgatggatgaggatttatcttcgactatcagggaatataggcttgcatcagcggaatcccagtcagaccggactcttcagactcttctaaaggcttcagccagcaactccgaatataggggcgtcttcacctcaaccagaggtgtagctgatgctgcagttgtcgatgtgagaacaggagaaaatatatctaacattcaaacggctggagaaacggttcttcagcttgaagaccctacacttgaggtcacaatagatcccaagctcgacccggagactgggaggatagagggaggtgctctgagcgttgtcttctaccctgagaggcttgtggtgtatgggatcggcagccccgtgtcacttgatccttattcatacttatatgttcggttccgtgagccggtggagattaatttggacgatataactgtgaatatggaggaagtagtcgtttattctactggtggcagtagcatagagggtgtggtatcggggcaatctgtcctattcgagggtgtagccattagggtagtttcgggggagttatcgttcggttctatgaacatagagttgccgtaccagctggataggggtgaattcttctactttatggtttataagggtcaggctgaggttttagatgatatcttgtcttccagcatatccgaccttctagagtctggaatagcgggactggcagccggagaagatatggacgattttaatgtgcctaggagagccccggctggagtcagtcttagactgttcatggaggttaacggggagcctgtggaggctgatctacggttcgaggctaacggggaggctatagggatacatggccttgtgatagacacaataatattgaggagggggctaacgaatgtatacataacagtacaggcgcccctagtcagcggccacttcggggaatatcacgagctcatggtttattatttaaatgaagctatgaacaccctcaggccagaagagtacttggcccttgcttcggtgatggctgcaggctacaatatagcgagcatagtatcctcgcccagtaaagagagggccgcgctagaggtagagagagctacgatagacctgtacctgctctcggagaagttagatgagaagcgttcaagcgcggctgagggaatagttgttagtgtgaagatagttcctggggttccgctcctctggttaactggcgtgctagcaggggtcctcctgcttgctatggcttctatccacttctacctgggcttcaggcagggccgacttattgatacttag

SEQ ID NO: 67977 - protein, 999 aa, Aeropyrum pernix K1
MSSLVGLHYATVLPLAAYLLLAVVILLLAMGRDGAARKTFTASLLMIVLGWIPYIAAFLLLDYSLDEVAKNASDELSPYLRIGAAWSGGGGSLYLFSAFLSLAILLQMLLNKGLNRRAMAVFTLLVLTSMTSATLMGAFGTGPGERGGLGINPVLKNYWVVPHPTTTFLGYSFILVGSVALVLGYYRTGLPIQLLGLAFLTFGLVFGGMWSYETFGWGGYWAWDPVETSQLAVWLATVASIHMIGPLRSLNRGFAAYAASSVFLALYVTRSGVSPLHSFAAESFSAVLLLSASLVMLALSMLLFSEGVGETLEKWKSRLQDARWPPRIAEMNLSNILLTVGSVSIALSALIVYSSLLTPSVLKLVGLDTQPPSFEQGVRFYNRLLIPLALVSLYAVAGYYVSVRAGAKAAYSLFATLTVVLAIMGLATVKNTIIISPLSDTTTNLASATLLAAGSISGSVLLAMSLWMLYGMVKGKVAKSVHTLRIVLEKLVHATMIMILVSVAMSGSYAYNQGYSEEVLVPLGGEVSVMGVTISYEGYDYELHQGTVDLKNNLDPSSAILITAREALNMMDEDLSSTIREYRLASAESQSDRTLQTLLKASASNSEYRGVFTSTRGVADAAVVDVRTGENISNIQTAGETVLQLEDPTLEVTIDPKLDPETGRIEGGALSVVFYPERLVVYGIGSPVSLDPYSYLYVRFREPVEINLDDITVNMEEVVVYSTGGSSIEGVVSGQSVLFEGVAIRVVSGELSFGSMNIELPYQLDRGEFFYFMVYKGQAEVLDDILSSSISDLLESGIAGLAAGEDMDDFNVPRRAPAGVSLRLFMEVNGEPVEADLRFEANGEAIGIHGLVIDTIILRRGLTNVYITVQAPLVSGHFGEYHELMVYYLNEAMNTLRPEEYLALASVMAAGYNIASIVSSPSKERAALEVERATIDLYLLSEKLDEKRSSAAEGIVVSVKIVPGVPLLWLTGVLAGVLLLAMASIHFYLGFRQGRLIDT

SEQ ID NO: 67978 - DNA, 1956 bp, Vibrio cholerae O1 biovar eltor str. N16961
  CDS (1)..(1956): transl_table=11
atgattgctgaaattggccactttgcactgattgtatcgctcagcttagcgatattactcagtgtgctgccattagttggggcgtcacgcaacaacacactattgatgaacacggctcgccctttggcatggggtatgttctttttgctgtcgatctcgtttgcggttttgctgtgggcattctatatcaatgattttacagtgcaatatgtggcaagtaactccaatagtgagctgccttggtactatcgcctcactgctgtatggggcgcgcatgaaggttcattactgctttgggtgcttatccaagcggcttggactgtggctgtcgcgagttttagccgcggtatgccacaagaatcggtagcgcgtgtgcttgcggtgatggggatgattactgttgggttcttactcttcatcattctaacgtctaacccgtttttacgcaccttgccttattttccgattgacggccgtgatttaaatccgctgctgcaagaccccgggttaatcattcacccgcctatgttgtacatgggatatgtgggattctccgtggccttctcgtttgcgattgcttctttgatgacaggccgtctcgacacggcatgggcacgttggtcacgaccttggacaacggccgcttggctctttttgacgctgggtatcgtactgggttcatggtgggcttactacgaacttggctggggcggttggtggttctgggatccagtggaaaacgcctctttcatgccttggcttgccggaacagcgctgatgcactcattagcggtgactgaaaaacgcggcacgttcaaagcgtggacggtactgctggcgatttctgcattctcgttgagcctattgggcaccttcttagtgcgctcaggcatcttggtttcggtgcatgctttcgcctccgatccggcgcgcggtatgttcattctcggcttcttgattgcggtgattggtggttcactactgctatttgcgatcaaaggcgcttcagtacgagtgcgtggtaattttgagctggtatctcgtgaaaacagcttgttggtaaacaacgtgctgctgatgaccgcactcgcggtggtactgattggtaccttgttgcctttagtgcacaaacaactgggtcttggttccgtctctatcggtgcgcctttctttaacatgctgtttgcctggttgatgattccttttgcattttttatgggaattggtccactgatccgctggaagcgcgatcaaatctccacactctttaaacctatgctcatcacagcgatggcatcgttagtattggcagcgttgatgatgtggctgaatgctccgacgtttagcccaatggcttatcttggttgggtcatggcgtggtggatcttactgttacacgcttatgaactgcacacgcgagcgactcatcgtcaccgcttcatagttggggtgaagaaactgcaacgtagccactgggcgatgatgcttggtcatgttggtttagcggtgagcatcattggtattgctatggtgcaaaactacagcattgaacgtgatgtgcgtttggctccgggagataacttccaactcaatgagtacaacttttacttccaaggtgtgcgtgataaagatggaccgaactacgatggctacattgctgattttgaaatcactagccaaggccaatatgtcaatacattgcatgccgagaaacgtttctatcgcaccgcaaagtcaatgatgaccgaagcggcgatcgaccgtggcattacgcgtgacctttacattgcgatgggtgagcgtttggatgataaccgctcttgggctgtgcgtatttattacaaaccttatgtgcgctggatttgggcaggcggcttgctgatggccatcggtggtgccttagccatcagtgacaagcgttaccgctttagaaaaaacgcacatcaggaggcttaa

SEQ ID NO: 67979 - protein, 651 aa, Vibrio cholerae O1 biovar eltor str. N16961
MIAEIGHFALIVSLSLAILLSVLPLVGASRNNTLLMNTARPLAWGMFFLLSISFAVLLWAFYINDFTVQYVASNSNSELPWYYRLTAVWGAHEGSLLLWVLIQAAWTVAVASFSRGMPQESVARVLAVMGMITVGFLLFIILTSNPFLRTLPYFPIDGRDLNPLLQDPGLIIHPPMLYMGYVGFSVAFSFAIASLMTGRLDTAWARWSRPWTTAAWLFLTLGIVLGSWWAYYELGWGGWWFWDPVENASFMPWLAGTALMHSLAVTEKRGTFKAWTVLLAISAFSLSLLGTFLVRSGILVSVHAFASDPARGMFILGFLIAVIGGSLLLFAIKGASVRVRGNFELVSRENSLLVNNVLLMTALAVVLIGTLLPLVHKQLGLGSVSIGAPFFNMLFAWLMIPFAFFMGIGPLIRWKRDQISTLFKPMLITAMASLVLAALMMWLNAPTFSPMAYLGWVMAWWILLLHAYELHTRATHRHRFIVGVKKLQRSHWAMMLGHVGLAVSIIGIAMVQNYSIERDVRLAPGDNFQLNEYNFYFQGVRDKDGPNYDGYIADFEITSQGQYVNTLHAEKRFYRTAKSMMTEAAIDRGITRDLYIAMGERLDDNRSWAVRIYYKPYVRWIWAGGLLMAIGGALAISDKRYRFRKNAHQEA

SEQ ID NO: 67980 - DNA, 1926 bp, Pasteurella multocida subsp. multocida str. Pm70
  CDS (1)..(1926): transl_table=11
atgatcccagaacttggttttttggctttactgatcgcttctttgtgtgcgttcttgcttgcgctagtgccacaagtcggcatttttttgcgtaagccgtatatgattggtactgcgtggaatttgagttatctctttgggatatttacctgtatagcgttattctgccttgcctatgcctttgcactcgatgatttttctgtgcaatatgtggcacatcattctaattcacaactgccaattttctttaaagtgtctgctacttggggtggacatgaagggtcgatgctattttggttgtttgctttagcactctggttgatgctctttgcgttttccagtcgtcataaagatccgattatttgtgcgcgtgcactttcagtgcttgggctcatttgttttggtttttgtctctttattttatttttatcaaatccatttgaacgcagttttccacaagcatttgaagggcgtgatttaaatccgatgttgcaagatgtggggctgatttttcatccgcctttattgtatttgggctatgtgggctttgccgtcaattttgctattaccatttctgctttagtgagtgggcatttagatgccgccgtggctcgcatgatgcgcccttgggttttgctatcttggttatttttaactttagggattgtgttagggtcttggtgggcgtattacgaactaggctggggcggctggtggttttgggatccggtcgaaaacgcctcattgatgccttggttattaggtttggcattattacatagtctatctatcacagaacagcgtggcatttttagttactggacgctgctattttcacttttggcattttctttcagtttactgggtaccttcatcgtgcgctcgggcgtcttaacttctgtgcacgcgtttgcagtagatggtgatcggggaattgccttactgattttattctttttgttgactgtgagtgcattcactttatttgcattaaaggttaacttgccacaaagtgcggtacgtttccgtttaatttcgaaggaaaatgccctgttgcttctcaatattttattgacgattgccacggtcagtgtctttttaggcactttttatccgattgtctttaccgcattacaatggggatctatttcagtcggcgcgccgtattttaatacaatttttctgccactgtttgtgatggcaatgcttgctatgattttggtgttgtctttacgttggaaaacactgaataaaaaaccgtttattcaacgtacgttattgttatttcccgcgcttatattggcttatggattaatccgttattatgtagatcataaccaagggttgcctttcaatttcagcgcttatggcttgttaagcttgtcgatttggttaattctggcgacgttatggctcccatggacgcagctgaaactgaaacagctcgccatggtgatcgcgcatttaggtgtagcgataacggcaattggggcgatcatgagtagctattacagcagtgagattggcgtgcgcttggcaccgcaacaacgccaaaaactcggtgattacgagtttcactatcagggttttcagcatgtgttaggtccgaattacaccagtgaaaaagcccattttgtggtgacaaagcaaaaccaagcttatgctgagatttacccagaacgccgttattatgatgtgcgtactatgaacatgagcgaagttgggattgattggggatggcttggtgatgtctatattgtaatgggcgataaattgggacaaggcgaatttactttccgcttgcaatataaaccttttatccgttggttatggtttggcgggcttttaatggcactaggcgccttgcttgccatattttccttgcgcaatagcaataaactaaaaccacgtcgtcaatcagattga

SEQ ID NO: 67981 - protein, 641 aa, Pasteurella multocida subsp. multocida str. Pm70
MIPELGFLALLIASLCAFLLALVPQVGIFLRKPYMIGTAWNLSYLFGIFTCIALFCLAYAFALDDFSVQYVAHHSNSQLPIFFKVSATWGGHEGSMLFWLFALALWLMLFAFSSRHKDPIICARALSVLGLICFGFCLFILFLSNPFERSFPQAFEGRDLNPMLQDVGLIFHPPLLYLGYVGFAVNFAITISALVSGHLDAAVARMMRPWVLLSWLFLTLGIVLGSWWAYYELGWGGWWFWDPVENASLMPWLLGLALLHSLSITEQRGIFSYWTLLFSLLAFSFSLLGTFIVRSGVLTSVHAFAVDGDRGIALLILFFLLTVSAFTLFALKVNLPQSAVRFRLISKENALLLLNILLTIATVSVFLGTFYPIVFTALQWGSISVGAPYFNTIFLPLFVMAMLAMILVLSLRWKTLNKKPFIQRTLLLFPALILAYGLIRYYVDHNQGLPFNFSAYGLLSLSIWLILATLWLPWTQLKLKQLAMVIAHLGVAITAIGAIMSSYYSSEIGVRLAPQQRQKLGDYEFHYQGFQHVLGPNYTSEKAHFVVTKQNQAYAEIYPERRYYDVRTMNMSEVGIDWGWLGDVYIVMGDKLGQGEFTFRLQYKPFIRWLWFGGLLMALGALLAIFSLRNSNKLKPRRQSD

SEQ ID NO: 67982 - DNA, 1995 bp, Deinococcus radiodurans R1
  CDS (1)..(1995): transl_table=11
atgcttgatttcctcggatacaacttttcgccgctcggcgctgccgggtcgctctcgctgctgctcgcgctggggtttgcgctcgtcgcgctggtgtccggcgtgctggggggcgtgcggcgcgacgagcggctgaccggcatggcccggtatgcgctgtggggcaacttcggcttcatgaccgtcgccacccttctgctgcaatacgccatcctgaccgacgacttctcggtgcgctacgtggcgcagcactccatgaccgtctcgccgctgtgggtcaaatgggtcacgctgtgggcggcgctggaaggctcgattttgctgtgggcgtggattctgtcgctctacgccttcctggtcagcctgaccgcccggcgcgacgtgctgcggccctgggtgctggcgacgatggcgctctcggtggtgtttttcgtggggctgaacttgacggtcgccagtccctttaccccggtggtggacgtgccgctgcaaggacgggggcccaacccgctgctgcaaaaccactggatgatggccgtgcacccggtgctgatgtacctgggcttcgtcggcctgagcgtgcctttcgcctacgcggtggccgccatgatcaccgggcggctcggcgagtcgtggctggtgcagacccggcgctggacgctggtggcgtggggctttctctcggcggcgattgtggcgggcggctggtggagctacgagattctgggctggggcggctactgggcctgggacccggtggaaaacgccagcttcattccctggctgctggcgaccgccttcctgcacagcgtgcagattcaggagcggcggcggatgctcaagacctggaacatttacctcatcgtcttcgcctacgccgccaccgtgctcggcaccttcctgacgcgctcgggcgtggtggaaagcgtgcacgccttttccaacggccccatcggcccggtgttcctgggctttttcgtgctgctggtggcccttggcgtggggctggcgacgtggcggctgccgcagatccgcgacccgcacagcctcgacagcccgctgtcgcgtgaggggtctatgctcggcggcaacgtggtcttcgtggtgttcggactgctggtcgtgctcggcacgctgtttccggtgctggtggaggaggtgcgcggcatccgcaccagcgtgggcgagccgttctacaactacttcgccattccgctgggcctgctgctgctgctggtgatgggcgtcggcccggtgctgccctggcgcaaggccggcaacggcgacctgcggagcctgtgggcgctcacccgctggccggtggccgccgccgtggtcggcacggtgctcgccttcgcgctgggcgtccgcaacgtggggctggcactcacgctggggctgtgcgcgtacaacgtggtcgggctggggcagctcgtcgccggcagcgcccgcgcccgtggcggtctgggcgccctgccgggactggtgcgcgagtatccccggcgctacggggcgtatgtcgctcacctcggcatcgtgctcatcgccatcggcatcggcttttcgggcacctacaaggcgcggcaggaagtcaccctgcgccctaacgtgccgcaaaccgtgctcggcaagaccctgacgctgacgaacctgggcaccgagcagcgccccgaacgccagtccattgtggcgacggtgcaggcggggagtgaaacgctgatgcccaagctcaacacctacgtcaacatgccgcaacaggtcgccatgcccgccgtcaaatatcacctgatgggcgacacctacgtgacgctgctcagcggcgacgtgaaccagcagtgggcgacggtggccgtcatcgactcgccgctggtcggctggatctggtggggcggcctggtgctgctgctcggcacggcgctgagcgtgacggccccagtgcgcgagacggtggcggtccgtgccccggcacgggggctggaaggggtgacagcgtga

SEQ ID NO: 67983 - protein, 664 aa, Deinococcus radiodurans R1
MLDFLGYNFSPLGAAGSLSLLLALGFALVALVSGVLGGVRRDERLTGMARYALWGNFGFMTVATLLLQYAILTDDFSVRYVAQHSMTVSPLWVKWVTLWAALEGSILLWAWILSLYAFLVSLTARRDVLRPWVLATMALSVVFFVGLNLTVASPFTPVVDVPLQGRGPNPLLQNHWMMAVHPVLMYLGFVGLSVPFAYAVAAMITGRLGESWLVQTRRWTLVAWGFLSAAIVAGGWWSYEILGWGGYWAWDPVENASFIPWLLATAFLHSVQIQERRRMLKTWNIYLIVFAYAATVLGTFLTRSGVVESVHAFSNGPIGPVFLGFFVLLVALGVGLATWRLPQIRDPHSLDSPLSREGSMLGGNVVFVVFGLLVVLGTLFPVLVEEVRGIRTSVGEPFYNYFAIPLGLLLLLVMGVGPVLPWRKAGNGDLRSLWALTRWPVAAAVVGTVLAFALGVRNVGLALTLGLCAYNVVGLGQLVAGSARARGGLGALPGLVREYPRRYGAYVAHLGIVLIAIGIGFSGTYKARQEVTLRPNVPQTVLGKTLTLTNLGTEQRPERQSIVATVQAGSETLMPKLNTYVNMPQQVAMPAVKYHLMGDTYVTLLSGDVNQQWATVAVIDSPLVGWIWWGGLVLLLGTALSVTAPVRETVAVRAPARGLEGVTA

SEQ ID NO: 67984 - DNA, 1941 bp, Xylella fastidiosa 9a5c
  CDS (1)..(1941): transl_table=11
atgctgcctgagtttggccagatcctcctgatcctcgccctgctgacagcactgctgcagggactgcttcccctgattggcgcccagcgccgccgcacggcttggatggccgttgcacgcccagccgcctatgtgcaactgagcctgctcgctggcgcattcgcactgctcacctatgccttcctcggcaacgacttctccgtccaatacgtcgccgaaaactcccattcactgctacccaccctctaccgctctaccgccgtgtggggtgcccacgaaggatccctcttactctgggtattgctcctggcaggatggaccgctagcgtcgccttacgttcccacaccctcccagccaccctgagcgcacgcatccttggcgtcctgggcctgattgcactcggcttcctcgccctgatcctcttcacctccaacccattcgcacgtctcctgcctgccgtcccagaagggaacgacctcaacccgttgctgcaagatcccgggatgattgtgcatccccccctgttatatgccggctacatcggtttcgcagtgccattcgcctttgccgtcgcggtcctgctggaaggacgcatcgatccaacctggctacgctggagccgcccttggacccataccgcctgggcactgctgaccctgggtatcgcactgggcagctggtgggcctactacgaactcggctggggcggctggtggttctgggaccccgtggaaaacgccagcttcatgccgtggctcatcggtgtcgcactgattcattcccaagcgatcaccgacaaacgcggcagcttcacccactggacactcctgctcgcaatcaccgcctttgcactagcactgctgggcacattcctcgtccgctcaagcgtactgacctcagtccatgcctttgctgctgatccggtacgcggcgcgtttattctgctgctcatcttcacgttgattggcggcgcactgctgctgtatgcacggcgtgcaccgcagctcacccccgtcacaataaacatgcaacaacgctttacacccgtctcacgcgaaaccctattactgctcaacaacctattgctgacctgcgcctgtgcgatggtgctgctaggcaccctctatcccctgctggccgatgcactggcactgggtcaactttcagtcggcccaccctacttcggccccctattcaccctgctgatgacaccactaatcgtcttactgccattgggtccattcacccgatggcaacgcgaacacccctcaacacccctcgtactgctggccccttgggccgcactgagcctggctgtcgccgcactggctggcatcaccacaccacagcaccattggaaaaccatgctcagcgtggccgcggcagcatgggtactcctgggaaccctccgcttcctctggtggcactggcgcatcaccggatcccgtcccacccccagcaccctgggcatggtcctggcacacgccggaattggtgtcttcctcactggcgcgctgttagttgaaacactcagcctacaacgtgaaattgcactcagcccgggccagacactcaccctcggccccatcaccctgcactttgatgccctcctcgaacaccacggccccaactacgtggctgatcgtgcccgattcagcctattacgcaacacgcatcccctgggcaccctgacgacagaaaaacgccgctatgtcagtggcggccaagtcaccaccgaagccggcatccatcctggagcgctcggtgacatctacgtcgcattaggagaatccctgggcaatgggtcatgggcaattcaggcacactacaaacccttcgtccgctggatctggctgggcgcagcactaatggccctgggcgggctgatcgctgctgctgatcgccggttccgccaccacccggagtcatcgcatgtctga

SEQ ID NO: 67985 - protein, 646 aa, Xylella fastidiosa 9a5c
MLPEFGQILLILALLTALLQGLLPLIGAQRRRTAWMAVARPAAYVQLSLLAGAFALLTYAFLGNDFSVQYVAENSHSLLPTLYRSTAVWGAHEGSLLLWVLLLAGWTASVALRSHTLPATLSARILGVLGLIALGFLALILFTSNPFARLLPAVPEGNDLNPLLQDPGMIVHPPLLYAGYIGFAVPFAFAVAVLLEGRIDPTWLRWSRPWTHTAWALLTLGIALGSWWAYYELGWGGWWFWDPVENASFMPWLIGVALIHSQAITDKRGSFTHWTLLLAITAFALALLGTFLVRSSVLTSVHAFAADPVRGAFILLLIFTLIGGALLLYARRAPQLTPVTINMQQRFTPVSRETLLLLNNLLLTCACAMVLLGTLYPLLADALALGQLSVGPPYFGPLFTLLMTPLIVLLPLGPFTRWQREHPSTPLVLLAPWAALSLAVAALAGITTPQHHWKTMLSVAAAAWVLLGTLRFLWWHWRITGSRPTPSTLGMVLAHAGIGVFLTGALLVETLSLQREIALSPGQTLTLGPITLHFDALLEHHGPNYVADRARFSLLRNTHPLGTLTTEKRRYVSGGQVTTEAGIHPGALGDIYVALGESLGNGSWAIQAHYKPFVRWIWLGAALMALGGLIAAADRRFRHHPESSHV

SEQ ID NO: 67986 - DNA, 1989 bp, Rickettsia conorii str. Malish 7
  CDS (1)..(1989): transl_table=11
gtgagtgaaatcggtaattttttactactaacaacgatgtacttgtcggttatcggtttgtcttttgtcttttatgtcattcctgcgaaagcgggaatccataaaaaatctctactttatagactgaattgccgctttcgcgggaatgacaactacctcattacttgccccttctacatagctgcctcatgtactatacttgccttttttaccctagtctatgcctttattatctctgacttttcactacaaaatgttttcttaaattccagtactttaaaacctttaatatataaaatagccggtagttggtcgagccacgaaggctcaatgttattatggttttgtttattacaaatcgttagttgctgttatatatttttacttgaagataaccgtcttaaatttttatctattattattctatcagccatacaattattgtttagcagctttatttactttacctccaatccttttaacgtgttttctttcgttcctaaagaagggttaggcttaaacccgatgctacaagatattgctttgagcatccatcctcctctgctttatttaggctatgttagctatgtagtaccgtttactattgtttgtgcctctatgtcattctcatacccacttatgtcattcccgcgaaagcgggcatccattaatgacctaagacttctcaaaacattttccaatatcggtatcttatttactaccataggaattagccttggttcttggtgggcatatagagaactcggctggggcggattttggttttttgatccggtagaaaatatttcactatttccttggttatccggaattatgctccatcattctataattgtaacaacaaaaaccagacgtatgcaaaactggacagtaattttatccatcattacttttttattagtaatatttagtgcttttttagtacgttccggttttattacctcaattcactcttttgcattctcacctgagagaggaatatacttgcttgggatatttttgattatggggattggtagtattgggtggtatactaccacatcattgcgaggaaatgcattaacattgacgaagcaatctcaggaagctaaccaagattgctacagccacttttgtggcttcgcaatgacgcattgtggaaactccatactcctcggtaatatattcctccttcttagccttattgtgctaatagctgccacactttatccgccactttactctttattcgacgataaatctattattattagtgaaacattttttgttaataattttattatattcgttatccctattcttggtaccataggattatttactaccagaagctctattaaaaaacatattataattctaatattatctctaataattacttatttaatatcattaaaagtaacatttagtgttatatcgattttaactataatcgcatctatatttcttatgcttcataatattcattatcttttggttaaaactaattattgtagaaatagacttaaagcaagtaacgctagtatgatccttgggcattttggttttgcactaattagttttagtattactatgaatacattattacaaagtgaaatggattttaccggcagagtaggaacaagtaaaacatttaacgaatttaaagtaacattgcaaaatattaagtttgctcaaggtaaaaattattatagacaaatcgctgaattttggcttgaggataatagccgtaatataactatattaaagccggaaaatagactttatatagttgaaaagagtttatcgcaagaaagtgatatatactcttacttattatatgatctttacgcagttttaagtaatatagacggcgatataatccatgctaaaatatattacaagccaacgataagctttatttggcttggaattattcttaccgcgtccggtttttttattgcactaatcagaaaaaattctagctaa

SEQ ID NO: 67987 - protein, 662 aa, Rickettsia conorii str. Malish 7
MSEIGNFLLLTTMYLSVIGLSFVFYVIPAKAGIHKKSLLYRLNCRFRGNDNYLITCPFYIAASCTILAFFTLVYAFIISDFSLQNVFLNSSTLKPLIYKIAGSWSSHEGSMLLWFCLLQIVSCCYIFLLEDNRLKFLSIIILSAIQLLFSSFIYFTSNPFNVFSFVPKEGLGLNPMLQDIALSIHPPLLYLGYVSYVVPFTIVCASMSFSYPLMSFPRKRASINDLRLLKTFSNIGILFTTIGISLGSWWAYRELGWGGFWFFDPVENISLFPWLSGIMLHHSIIVTTKTRRMQNWTVILSIITFLLVIFSAFLVRSGFITSIHSFAFSPERGIYLLGIFLIMGIGSIGWYTTTSLRGNALTLTKQSQEANQDCYSHFCGFAMTHCGNSILLGNIFLLLSLIVLIAATLYPPLYSLFDDKSIIISETFFVNNFIIFVIPILGTIGLFTTRSSIKKHIIILILSLIITYLISLKVTFSVISILTIIASIFLMLHNIHYLLVKTNYCRNRLKASNASMILGHFGFALISFSITMNTLLQSEMDFTGRVGTSKTFNEFKVTLQNIKFAQGKNYYRQIAEFWLEDNSRNITILKPENRLYIVEKSLSQESDIYSYLLYDLYAVLSNIDGDIIHAKIYYKPTISFIWLGIILTASGFFIALIRKNSS

SEQ ID NO: 67988 - DNA, 1983 bp, Caulobacter crescentus CB15
  CDS (1)..(1983): transl_table=11
atgatcgtcgaactcggcgctttcgcgctcattctctctctgatgctgtcggtcgcccagaccggcctgtcggccgtgggcggcgcgcggcgctcgccggtgctggcgggcgcgggccagggcgcggcgatcgcgaccttcgtggccctgctggtctcgttcgcggcgctgatctacgccttcgtgacgtcggacttctcggtgaccaacgtcgccaccaactcccacaccgacaagccgatgctctacaaggtggccggcgcctggggcagccacgagggctcgatgctgctgtggtgcttggtgctgaccggctttggcgcggccatggccgtgttcggcgacagcctgccgccgcgcctgcgcgcctacgccatcgccgtgcagggcgggctgggcgtcatgttcctggcctacaccgtgttggcgtcgaacccgctggcgcggctgcttgaggcccccatcgagggcaagtcgctcaatccgctgctgcaggactgggccttggccttccacccgccgttcctctacgtcggctatgtcgggttctcggtagtctattcgctgtcgatggcggccctgatcgaaggccggatcgacgcggcctgggcgcgctggattcgcccctggaccctggcggcctggagcatgctgacggtcggcatcacgctgggcgccttctgggcctattacgaactgggctggggcggctggtggttctgggacccggtcgagaacgccagcttcatgccctggctgatcggggcggccctgctgcactcggccatcgtcaccgaaaggcgcggcgcgctgccgggctggacggcgttcctggccctggcggcctacaccttctcgatgctgggcgccttcctggtgcgctcgggcgtgctgacctccgtccacgccttcgcggtcgatccgacgcgcggcgtgctgctgctgatcatgatggccgtggccgccggcgcgggcttcctgctgtttggcctgcgcgcccccagcctgaaccgcggtggccagttccggccgatcagccgcgagagcgccatcgtgctcaacaacatcctgctgtcgacggcgacggcggtggtgctgctgggcaccctctatccgctgatccgcgaggccatggacggcgaggccgtgtcggtgggcgcgccgttcttcaacctgaccttcacgccgctgatgatcctggccttcgccgtgctgcccgccggaccactgttggcttggaagcgcggcgacgccaagggcgtggcgcgcaagctgtgggtcgtgctggccctggcggccctgctgggcctgatcgcctatgccgtggtgcagccgcgcaaggccctggccagcggcggcctggtggtcggcttctggctgatcggcggcgcgctgctcgagatcgccgagcgcctgaagctggcgcgcgcgcccttcgccgagagccttcgccgggcacacggcctgccgcgcggcgcctggggcacgaccctggcccatgcgggtctgggcgtgttcgtgctgggggcctcgttcgagaccgcctggcgcgtcgaggcggctcaggccctgagcctgaacggcagccagccgctgggcgcctataccgtaaccctgacggatgtggtgacgatcgaggggccgaactatctggccgagcgcggcatcatcaccgtcaccaacaaggccggcgccgaggtgtgccgcgcccagcctgagcgccgcttctatccgacgggggcccagaccacgtccgaggtcgccatctgcgccaagggcctggacgacatctatgtggtgatgggcgagcggcgggcaggcgagggcggcaagccggcctggctggtgcgggcctatgtgaacccgtgggtgcggctgatcttcctgggtccgctgctgatggccgtcggcgggatcgtctcgctgtcggaccgccgcgtgcgcctgggcgtgggacgacggaccggggaggtggtgtcgtga

SEQ ID NO: 67989 - protein, 660 aa, Caulobacter crescentus CB15
MIVELGAFALILSLMLSVAQTGLSAVGGARRSPVLAGAGQGAAIATFVALLVSFAALIYAFVTSDFSVTNVATNSHTDKPMLYKVAGAWGSHEGSMLLWCLVLTGFGAAMAVFGDSLPPRLRAYAIAVQGGLGVMFLAYTVLASNPLARLLEAPIEGKSLNPLLQDWALAFHPPFLYVGYVGFSVVYSLSMAALIEGRIDAAWARWIRPWTLAAWSMLTVGITLGAFWAYYELGWGGWWFWDPVENASFMPWLIGAALLHSAIVTERRGALPGWTAFLALAAYTFSMLGAFLVRSGVLTSVHAFAVDPTRGVLLLIMMAVAAGAGFLLFGLRAPSLNRGGQFRPISRESAIVLNNILLSTATAVVLLGTLYPLIREAMDGEAVSVGAPFFNLTFTPLMILAFAVLPAGPLLAWKRGDAKGVARKLWVVLALAALLGLIAYAVVQPRKALASGGLVVGFWLIGGALLEIAERLKLARAPFAESLRRAHGLPRGAWGTTLAHAGLGVFVLGASFETAWRVEAAQALSLNGSQPLGAYTVTLTDVVTIEGPNYLAERGIITVTNKAGAEVCRAQPERRFYPTGAQTTSEVAICAKGLDDIYVVMGERRAGEGGKPAWLVRAYVNPWVRLIFLGPLLMAVGGIVSLSDRRVRLGVGRRTGEVVS

SEQ ID NO: 67990 - DNA, 1932 bp, Salmonella typhimurium LT2
  CDS (1)..(1932): transl_table=11
atgatgcctgaatacggccacgcgctgctgtgcctggcgctcggcgtggcgctgctgctgtccgtttacccgctgtggggcgtggcgcgcggtgacgcgcggatgatggcgtcggccggggtgttcgcctggctgctgtttatctgcgtggcgggcgcgtttttcgtgctggtgcacgcctttgtggttaacgacttcaccgtggcctatgtcgccggcaactcgaacacgcagctgccggtgtggtaccgggtggccgccacctggggggcgcacgagggctcgctgctgctgtgggtgctgctgatgagcggctggaccctggcggtggcggtgttcagccggcaggtgccggcggatatcgtcgcccgggtgctggcggtgatggggatggtctgcgccggttttctggcgttcatcctgttcacctccggcccgttcgcccgcacgctgccggcctttccggtggaggggcgcgacctgaacccgctgctgcaggacccggggctgattttccacccgccgctgctgtacatgggctatgtcggcttctcggtggccttcgccttcgccatcgccgcgctgctgagcgggcgtctggacagcgcgttcacccgttttgcccgcccgtggacgctggcggcgtgggtgttcctgacgctgggcatcgtgctcggctcggcgtgggcctactacgagctgggctggggcggctggtggttctgggacccggtggagaacgcctcctttatgccgtggctggcgggcaccgccctgctgcactcgctggcggtcaccgaacagcgcgccggctttaaggcgtggacgctgctgctgtccatctgcgccttctcgctgtgcctgctgggcaccttcctggtgcgctccggggtgctggtgtcggtgcacgccttcgcctccgacccggcgcgcgggatgtttatcctcgcctttatggtgctggtcaccggcggctcgctgctgctgttcgccgtgcgcgggcacagggtgcgttcgcgggtgaacaacgcgctgtggtcgcgcgagtcgctgctgctcggcaacaacgtcctgctgatggccgccatgctggtggtgctgctgggcaccctgctgccgctggtgcacaaacagctggggctgggcagcatttcggtgggggagccgttctttaacaccatgttcacctggctgatggtcccctttgccctgctgctgggggtggggccgctggtgcgctggggccgggaccggccgcgtaacatcaggacgctgctgctcaccgccctggtctccaccctggtgctgtcggtacttttgccatggctgctggaagataaaatcatcgccatgacggcggtggggatggcgatggcctgctggattgcggtgctggcggtggccgaagccgtacagcgcgtgtcccgcggcacgaaaacctctctcagctactggggaatggtggcggcgcacctcgggctggcggtgacgattaccggcatcgccttcagccagaattacagcgtggagcgtgacgtgcggatgcgggcgggcgacagcgtgaccattcacgactaccgcttcaccttccgggaggtgcgggacatcaccgggcccaactaccgcggcggggtggccctcatcggggtgacgcgccacggcgagccggaggcggtgctgcacgcggagaaacggctctacaacaccagccggatggtgatgaccgaggcggcgattgacggcgggctgacccgcgacctgtacgccgcgctcggggaggagctggacaacggcgcgtgggccgtgcgcctgtactacaaaccgtttgtccgctggatatgggccgggggactgctgatggcgctgggcgggctgctgtgcctggcggacccgcgctaccgccgccgtaaaccattgccggaggccggatga

SEQ ID NO: 67991 - protein, 643 aa, Salmonella typhimurium LT2
MMPEYGHALLCLALGVALLLSVYPLWGVARGDARMMASAGVFAWLLFICVAGAFFVLVHAFVVNDFTVAYVAGNSNTQLPVWYRVAATWGAHEGSLLLWVLLMSGWTLAVAVFSRQVPADIVARVLAVMGMVCAGFLAFILFTSGPFARTLPAFPVEGRDLNPLLQDPGLIFHPPLLYMGYVGFSVAFAFAIAALLSGRLDSAFTRFARPWTLAAWVFLTLGIVLGSAWAYYELGWGGWWFWDPVENASFMPWLAGTALLHSLAVTEQRAGFKAWTLLLSICAFSLCLLGTFLVRSGVLVSVHAFASDPARGMFILAFMVLVTGGSLLLFAVRGHRVRSRVNNALWSRESLLLGNNVLLMAAMLVVLLGTLLPLVHKQLGLGSISVGEPFFNTMFTWLMVPFALLLGVGPLVRWGRDRPRNIRTLLLTALVSTLVLSVLLPWLLEDKIIAMTAVGMAMACWIAVLAVAEAVQRVSRGTKTSLSYWGMVAAHLGLAVTITGIAFSQNYSVERDVRMRAGDSVTIHDYRFTFREVRDITGPNYRGGVALIGVTRHGEPEAVLHAEKRLYNTSRMVMTEAAIDGGLTRDLYAALGEELDNGAWAVRLYYKPFVRWIWAGGLLMALGGLLCLADPRYRRRKPLPEAG

SEQ ID NO: 67992 - DNA, 2223 bp, Salmonella typhimurium LT2
  CDS (1)..(2223): transl_table=11
ttgcataatctggacatcttccttcctgaagccggatttctggcgctgttgttgagtctcggggtcaacgtgctgaccccgctggcgacgtggtgcgggatggggcagcactggcgcggcgtcatgcgcctgacgacctgcggcgcgtggacggcgttcacgctgctgctactggcgtttgcgattctggttagctgttttctgaccagcgatttttcggtcgtttatgttgcgcagcatagccatagtcagttgtcatggggactgaaactggcggcggtatggggcggtcatgaaggttcgctcctgctgtgggcgctgcttctttcggggtggacggcgctattcgcctggcgctcccggcatgaatctgacgcgctttttccgctgaccctgagcatcttgtccttcattatggcctcgctgctgctatttattgtgctgtggtccgatccgttcctgcgtattttccctcccgccatggaagggcgcgaccttaatcccatgctgcaacatctggggctgatcttacatccgccgctgctctatctgggttatggcggcctgatgaccgcggcgagcgtagcgctggcttcgctactgtgcggcggctttaacgccacaaccgcctgggtttgctggcgctgggcgttaccgggttggtgcgctctgacgctggggatcattctcggatcgtggtgggcatattgcgaactgggctggggcggctggtggttctgggacccggtggaaaatgcctcgttgttgccgtggcttgccgccagcgcgttgctgcacagtctgtatgtcagccgccagcgcgggagcttccgccactggtcgttgctgctggcgatactgacgctgatcctctcgttgctgggaacgctgattgtgcgttccggcattctgctctccgtccatgcttttgcgctggataacgtgcgcgcggtgccgctgtttatcctttttgccgcgttaagtctggcatcgcttgctctgtacggctggcgggcacgggagccgtatccggcgacgcgtttgggcggcggaaagtgcgaaacgctcattctgacgacgctgctgctctttagcgccgtcttgttgatcgtgctggtcgggacgctctaccccatgatttatggtttgatgggctggggaaggctttcggtgggcgcgccctattttaatcgcgtcacgctgccgtttggcctgctgatgctggtagttatcgtgctggcgacaatcagaagccgcaaagtctctgtgcgttgtcagcttccggcattgctggcgcatacgggcgtatttatcttcgccgccgggatcatggtttccagcggcagtcggcatgaaatcagccttaacctcagccccggtcagcaggtggtactggcgggctatacctttcgtttcgagcgtctggatctggaagccaaaggcaactacaccagtgaaaaagcgcggatcacgttgtggcggaatgaaaaacgcattggcagcctgcagcctgaaaggcgcttctatgccgcgcgtcgtcaacagatgatggagccggggattcactggaacctgctacatgactggtacgcggtgatgggcgaaaaaaccggaccggatcgttacgccatgcgcttatacgtgcagaccggcgtgcgctggatctggggtgggggattgttgatggtgtgtggagcgctgctgagcggatggcgggggaggaagcatcctgagttattgcctgatggcgctgcgcttatcaggcctacgagtgaaaagcatggtaggccggataaggcgttcacgccgccatccggcaaaacgatgttacttttggctttactgatttttctgccttttgccacccatgcccaggtggtggacacatggacgtttgccaacccgcagcagcaggagaaagcgctgtctattgccagtcagctgcgctgtccgcagtgtcagaaccagaacttgctggaatccaatgcgcccgtggcggtcagtatgcgccatcaggtttacagcatggttgccgaaggtaaaagcgaagcggaaatcaccgcctggatgaccgaccgctatggtgatttcgtgcgctacaacccgccgctgaatgagcaaacgctgctgttgtgggcgctgccgtacctgctgttattgctggtgggcgtggtggcctggcgggtgagaaagcgtcagcacgcaggagagggggaacaatga

SEQ ID NO: 67993 - protein, 740 aa, Salmonella typhimurium LT2
MHNLDIFLPEAGFLALLLSLGVNVLTPLATWCGMGQHWRGVMRLTTCGAWTAFTLLLLAFAILVSCFLTSDFSVVYVAQHSHSQLSWGLKLAAVWGGHEGSLLLWALLLSGWTALFAWRSRHESDALFPLTLSILSFIMASLLLFIVLWSDPFLRIFPPAMEGRDLNPMLQHLGLILHPPLLYLGYGGLMTAASVALASLLCGGFNATTAWVCWRWALPGWCALTLGIILGSWWAYCELGWGGWWFWDPVENASLLPWLAASALLHSLYVSRQRGSFRHWSLLLAILTLILSLLGTLIVRSGILLSVHAFALDNVRAVPLFILFAALSLASLALYGWRAREPYPATRLGGGKCETLILTTLLLFSAVLLIVLVGTLYPMIYGLMGWGRLSVGAPYFNRVTLPFGLLMLVVIVLATIRSRKVSVRCQLPALLAHTGVFIFAAGIMVSSGSRHEISLNLSPGQQVVLAGYTFRFERLDLEAKGNYTSEKARITLWRNEKRIGSLQPERRFYAARRQQMMEPGIHWNLLHDWYAVMGEKTGPDRYAMRLYVQTGVRWIWGGGLLMVCGALLSGWRGRKHPELLPDGAALIRPTSEKHGRPDKAFTPPSGKTMLLLALLIFLPFATHAQVVDTWTFANPQQQEKALSIASQLRCPQCQNQNLLESNAPVAVSMRHQVYSMVAEGKSEAEITAWMTDRYGDFVRYNPPLNEQTLLLWALPYLLLLLVGVVAWRVRKRQHAGEGEQ

SEQ ID NO: 67994 - DNA, 1992 bp, Agrobacterium tumefaciens str. C58
  CDS (1)..(1992): transl_table=11
atgatcaacgagatcggccattatgtcctggttttggcgctcggtgttgggctgatcgtctcgacgctgcctgttatcggcgcgcgccgcaacgatcgggcactgatggatgtcgcctcccttggctcggtcctgatgttcctgctggtggggttctccttcgcggcactgacacatgcctatgccgtctcggatttttccgtgcgcaacgtctgggaaaactcccattcgctgatgccgatgctctacaagctgaccggtgtttggggcaaccatgaaggctccatgctgttgtggctgctgatcctggtgtttttcagcgcgcttgtcgccgccttcggcggcaacctgccggaaacgctcaaagccaatgtgcttgcggtacaggcatggatttcggtcgccttcctgctgttcatcctgctcacctccaacccgttcctgcggctggagcgggtgccggccgaggggcaggacctcaatcccatccttcaggatttcggcctcgccatccatccgccgctgctctatctcggttatgtcggtttttccgtctgcttctcctttgccgtcgcagcacttctggaaggtcgtatcgacgccgcctgggcgcgctgggtaaggccgtggacgctcgccgcctggacgttcctgaccgcaggtatctccatgggctcctactgggcctattatgaactcggctggggcggctggtggttctgggatccggtggaaaacgcctccttcatgccctggcttgccggcacggcgctgctgcattcggcgctcgtcatggaaaaacgcgaggcgctgaaaatctggaccgtgcttctggcgatcatgaccttttcgctgtcgctgctcggcaccttcctcgtgcgctccggcgtgctgacctccgtgcatgctttcgccaccgatccgagccgcggcatcttcattctcggcattctgacgatcttcatcggtggcgcctttgcgctctttgcctggcgcgcgccgtcgctgaaggccggcggcctgttcgcgccgatctcgcgtgaaggcgcgctcgtcctcaacaaccttatcctgacggtttcgaccgccaccgtgctgatcggcacgctttacccgctcattctcgaaaccctgacgggcgaaaaaatctcggtcggtgcgccgttcttcaacctcaccttcggcctgctgatgatcccggtcctgatcgtcacacctttcgggccgatgctcgcctggaagcgcggcgatctcttgggtgccttccagcggctttatgtggccgcggctatcgcggctctggccgggctgaccctctggtatatcgaaaatggcggtccggtgctggcagcactcggtattgccgccggtttctggttgatcttcggggcgctcaccgatctctggtatcgcgccaatttcggcaaactggccttcggcattgcattccgccgcctgaaaggcctgccgcgttcggccttcggcacggcgctggcgcatatgggcctcggcatcaccgtgctcggcatcgtcatcgtcaccacctatgagaccgaaacggttctggaaatgaaacagggcacggtggcggaagcgggcggttacagcctgaccttcgacggcatccgccacgccgtcggcccgaatttcaccgaggatcgtggccatttcaccgtgcgcaaggcgggtgttgaggtggccgacgtctggtcgtccaagcggctttataccgcgcggcgcatgccgacgacggaagccggcatcctgaccttcggcctcagccagctttatgtctcgctgggcgatcccatggccgatggcggcatggtcgtgcgcatctggtggaaacccttcatcctctgcatctggggcggcacgctgttcatgatggcgggcggtttcatctcgctttccgacaggcggttgcgggtgggtgcgccgacccgcaaggcgaagcctgtacgggctgcaatgccggaggcggcggaatga

SEQ ID NO: 67995 - protein, 663 aa, Agrobacterium tumefaciens str. C58
MINEIGHYVLVLALGVGLIVSTLPVIGARRNDRALMDVASLGSVLMFLLVGFSFAALTHAYAVSDFSVRNVWENSHSLMPMLYKLTGVWGNHEGSMLLWLLILVFFSALVAAFGGNLPETLKANVLAVQAWISVAFLLFILLTSNPFLRLERVPAEGQDLNPILQDFGLAIHPPLLYLGYVGFSVCFSFAVAALLEGRIDAAWARWVRPWTLAAWTFLTAGISMGSYWAYYELGWGGWWFWDPVENASFMPWLAGTALLHSALVMEKREALKIWTVLLAIMTFSLSLLGTFLVRSGVLTSVHAFATDPSRGIFILGILTIFIGGAFALFAWRAPSLKAGGLFAPISREGALVLNNLILTVSTATVLIGTLYPLILETLTGEKISVGAPFFNLTFGLLMIPVLIVTPFGPMLAWKRGDLLGAFQRLYVAAAIAALAGLTLWYIENGGPVLAALGIAAGFWLIFGALTDLWYRANFGKLAFGIAFRRLKGLPRSAFGTALAHMGLGITVLGIVIVTTYETETVLEMKQGTVAEAGGYSLTFDGIRHAVGPNFTEDRGHFTVRKAGVEVADVWSSKRLYTARRMPTTEAGILTFGLSQLYVSLGDPMADGGMVVRIWWKPFILCIWGGTLFMMAGGFISLSDRRLRVGAPTRKAKPVRAAMPEAAE

SEQ ID NO: 67996 - DNA, 1992 bp, Brucella melitensis 16M
  CDS (1)..(1992)
atgagtgtcgagatcggccattttgctctggtgctggcgcttgcgctgtcgattgttcaatccatcgtgccggtggtcggcgcgcatcgccgtgatgcgcaactgatggcagtggccgtgccaacggcgcttgcagtcttcgctctgatcgttctggcatccgccgctctgatccacgcctatgtcgtttccgatttctcggtccttaacgtggtcgagaactcccattcgcaaaagccgcttctctacaagatcaccggtgtctggggcaatcatgaaggctccatgctgctctgggtgttcatcctcacccttttcagcgcgctggttgcagccttttccggcaatctgcctgaaacgctgcgtgccaatgttctggccgtgcagggctggattggcaccgcctttctcgcattcatcattttcacgtccaatcccttcacccgcattttcccggctcccatggaaggcggcgatctcaacccggtccttcaggatatcggcctcgccatccatccgccgcttctttatctgggctatgtcggcttttcggtctgtttctcctttgctgttgcggcgcttctcgaaggccgtctcgacgcggcatgggcgcgctgggtgcgcccatgggcgctcatggcgtggatgttcctcaccggcggtatcgcaatgggttcttactgggcctattatgaactgggttggggtggctggtggttctgggatccggttgaaaatgcatcgctcatgccatggctggtcgggacggcgctgcttcattccgccatcgtcatggagaagcgctcggcgctcaagatctggacggtgcttctcgccattctcaccttctcgctgtcattgctcggcactttccttgtgcgctccggcgtgctgacctccgtgcacagtttcgcgaccgatccggggcgcggcctgttcattctgggcattctcgcgctcttcattggcggctcgctgtcgctcttcgcgctgcgcgtccaaagcctgagcgcaggcggcattttccatccgatttcccgcgaaggcgcgctggtcttcaacaatctctttctgacgactgccgccgcaaccgttctcatcggaacactctatccgttgcttcttgaagttacgaccggcgaaaagatttccgttggcgcacccttcttcaacatgaccttcggcccgctgatggtgccgctcctgtttgccgtgcctttcggcccgctgctcgcatggaaacgcggtgatctttatggcgtcgggcagcgcctgatgacggctttcgcattgtcgctggccgttgtcggcatcatgctctggcgaacctccgcgcattcggtcctagctgctctcggcatcggtcttgcggcatggctcatcttcggcagcctgaccgatcttgttctcaaggctggtattggcaaggtgtcggccagcaaggcgtttgcgcgcttcaagggcctgccgcgctccgtcttcggaacgtcgcttgcgcatatcggacttggtctcacgcttctcggtattgtcagcgtcacgacattcggtaccgaaaacgtgctcgtcatgcagcccggcgggaccgccaaagtccagaattacacgctgcgttttgaaggactgcgccccatcacgggttccaacttcaccgagaacaggggcgccttcacgctgcttgattccagtggccgcgatctggccgtgatcgaaccgtccaagcggttcttccctgcgcgccagatgcccacgactgaatccggtatcaagacgctctggttcagccaggtctatgtcgcccttggtgacgagccgggcaatggcgcggtggtcgtgcgcatctggtggaagccgctggtcacgctcatctggtacggtgcgcttgtcatgatgctgggtggcttgttctcgctggccgaccgccgcctcagggttggtgcgccttccaaggtgcgcaggtccgcctcgaaggaagcggaagccgtcgcatga

SEQ ID NO: 67997 - protein, 663 aa, Brucella melitensis 16M
MSVEIGHFALVLALALSIVQSIVPVVGAHRRDAQLMAVAVPTALAVFALIVLASAALIHAYVVSDFSVLNVVENSHSQKPLLYKITGVWGNHEGSMLLWVFILTLFSALVAAFSGNLPETLRANVLAVQGWIGTAFLAFIIFTSNPFTRIFPAPMEGGDLNPVLQDIGLAIHPPLLYLGYVGFSVCFSFAVAALLEGRLDAAWARWVRPWALMAWMFLTGGIAMGSYWAYYELGWGGWWFWDPVENASLMPWLVGTALLHSAIVMEKRSALKIWTVLLAILTFSLSLLGTFLVRSGVLTSVHSFATDPGRGLFILGILALFIGGSLSLFALRVQSLSAGGIFHPISREGALVFNNLFLTTAAATVLIGTLYPLLLEVTTGEKISVGAPFFNMTFGPLMVPLLFAVPFGPLLAWKRGDLYGVGQRLMTAFALSLAVVGIMLWRTSAHSVLAALGIGLAAWLIFGSLTDLVLKAGIGKVSASKAFARFKGLPRSVFGTSLAHIGLGLTLLGIVSVTTFGTENVLVMQPGGTAKVQNYTLRFEGLRPITGSNFTENRGAFTLLDSSGRDLAVIEPSKRFFPARQMPTTESGIKTLWFSQVYVALGDEPGNGAVVVRIWWKPLVTLIWYGALVMMLGGLFSLADRRLRVGAPSKVRRSASKEAEAVA

SEQ ID NO: 67998 - DNA, 2109 bp, Pyrobaculum aerophilum str. IM2
  CDS (1)..(2109): transl_table=11
atggccagcctgcggcgaatactcgctaattatttccacctatccccggccgtttctctcgcccttttatttttttacatctctaggtttataacgctagacacctcctatttagacgtctacgccaacacctcatggggaatgccgctgtactaccggctggccgcctcgcttgtaaacgtgggggggattatgttgtacatcgccgcgattttaggcctaatggccgttgtggcaaaaagctggaggctcgccgcggcttcgcacgtatttctactcgccgcattttactggggggcttttgtcaaatggggaggcggggggccgggcattggcctaaaccccttgttgagaaacccctgggccctcccccacccgctaatggttattgcctcttacgccatggttttagccgcagtggcggagcccagagtcagggagagagcgggcgttttggcctgggttttctccacggccgggctggccgcgggcgggtattggtcttataccaccttcggctgggggggctactgggcgtgggaccccgtcgagacctctgtgtttattatgtggcttttcctaaccgcttggatacacggcagaggctccggggctttgtacgcggcgcttggggccgtcttcctcaccatggccgtcacgtacagcggggtgtcgccgttgcactccttcgcgggagtggcggccgcggggaagtggctcctcataacctctgtaattgccttaatctacggcctcataaaggcgagctgggagaggggatctgcgttctcctacctcccgcctctcgtcgccggggcgtatatctattggataatcgccggccccatggcggcgcagtcattaggcctccccgtggctattccctcaggggatagcgccgtggcgcttatccacccgctcttaatacccgcagtcttggcggcgttttttggaatggcgaaaagggcctttcccccgagggcagtggccctttacatgggggcgtcggcagttgcctcgctcgccctagtctctatgggcattctctggtcccccctgagcagcctctggacaaacgtggctatttacctcatagtcctaaccgctccgctgccaattgccgcgtcgcttttaaaaatacgtaaagacttggcagagctttcccacataggctttgccgttttagcagtgggggccgcgctgagcggcccgtatgcctatcacatgcagtacggcgtcgtggtgcccctcggcgtgggacagccggcgcttgtgcccctgcccagcccttacgggccggaggcggttagcattaaagttgtggagtggcgggcggcggggccgtgggagttagtgtcaatcccgccgtatctctcaaggctcgtctcgcccgatttggccggcttaatgggcgtgtggggcttggatttgaggtttgacagcgtcgtcctcaacggcactaaatacgtagtggcctttggcaattacacgcctggttttcacaggctgggtagctactggctatacgttaactccacagtagacaccccgaggggcaagcttttagtagccgccctgggcatcggggacagggcccttgtcttcagccctcagaaattcgacgtaatttcagcagtcgtcgcgtgtaagcccaacgccacttcattgaatttaatagaggagagagtcatcctggggatagacggcgcggctgttgaggctacaattagatacgaggcctcgggggagttcaaactcattaggggcttaatacacggaatagccacagtgcccagagggctagacgacgtttatatcgccgtgacccccgaggtggccgtggtgggcaacgtgagctatacccgcatcgccttagagctggcgaggcggaatttaaatgcgtgtctcccccttggcgcgtggatgttgctgtcggcatatagcggtaggccgctcagcggcggggaggtaaacgccttgttgaaaaacagcccccagggctacgtggcgtatgtaaagataatccccatggttcaattagtgtggataggggcggcgcttttagtagcaggaggccttgtaaaggctgttaggagacatgtggcttag

SEQ ID NO: 67999 - protein, 702 aa, Pyrobaculum aerophilum str. IM2
MASLRRILANYFHLSPAVSLALLFFYISRFITLDTSYLDVYANTSWGMPLYYRLAASLVNVGGIMLYIAAILGLMAVVAKSWRLAAASHVFLLAAFYWGAFVKWGGGGPGIGLNPLLRNPWALPHPLMVIASYAMVLAAVAEPRVRERAGVLAWVFSTAGLAAGGYWSYTTFGWGGYWAWDPVETSVFIMWLFLTAWIHGRGSGALYAALGAVFLTMAVTYSGVSPLHSFAGVAAAGKWLLITSVIALIYGLIKASWERGSAFSYLPPLVAGAYIYWIIAGPMAAQSLGLPVAIPSGDSAVALIHPLLIPAVLAAFFGMAKRAFPPRAVALYMGASAVASLALVSMGILWSPLSSLWTNVAIYLIVLTAPLPIAASLLKIRKDLAELSHIGFAVLAVGAALSGPYAYHMQYGVVVPLGVGQPALVPLPSPYGPEAVSIKVVEWRAAGPWELVSIPPYLSRLVSPDLAGLMGVWGLDLRFDSVVLNGTKYVVAFGNYTPGFHRLGSYWLYVNSTVDTPRGKLLVAALGIGDRALVFSPQKFDVISAVVACKPNATSLNLIEERVILGIDGAAVEATIRYEASGEFKLIRGLIHGIATVPRGLDDVYIAVTPEVAVVGNVSYTRIALELARRNLNACLPLGAWMLLSAYSGRPLSGGEVNALLKNSPQGYVAYVKIIPMVQLVWIGAALLVAGGLVKAVRRHVA

SEQ ID NO: 68000 - DNA, 1998 bp, Xanthomonas campestris pv. campestris str. ATCC 33913
  CDS (1)..(1998): transl_table=11
atgacgcctgaacttggccagatcgcgctgattttggcgttgctgttgtcgctgacgcagggcgtgttgccgctgatcggtgcctggcgcggcaacaccgcgctgatggcggttgcgcggcctgccgccgccggccaggcggtgttcgtgtggctggccttcggcctgttggcctggtcgctgctgtcgctggatttttcggtgcgctatgtcgccgacaacgccaacatcgccctgccctggtattaccgcatcgccgcggtgtggggcgcgcacgaaggttcgctgctgctgtggatcgcgatcctgtccacctggacggtgctgctggccgcctgcagccggcacttgccgcagcacttcgccgcacgcgtgctggcggtgctggggctggtatcggtgggctttctggccttcatcctgctgacctccaatccgtttgggcggctgtcgccgattccgctcgacggcagggaactcaatccggtgctgcaggacccgggcatgaccttccacccaccggtgctctacaccggttatgtcggcttctcggtggcattcgcgttcgcggtagccgccctgctgggcggcgaactcgaacaggcctgggtgcgctgggcgcggccatggaccaacgtcgcctgggcctgcctcaccgccggcatcgtggccggcagctggtgggcgtatgcggaactgggctggggcggctggtggttctgggacccggtggaaaacgccagtttcatgccgtggctggtgggcaccgcgctgattcatacccaggcagtgaccgaaaaacgcggcagcctgcgtgcctggaccatcctgctgtcgatcctggcattttcgttgtcgttgctgggtaccttcctggtgcgctcgggcgtgctcacctcggtgcatgcgtttgccgccgacccacggcgcggcctgtacatcctgattttcctggtggcggtggtgggcggctcgctgctgctgtatgcgctgcgcgcgcccaagatcgccaccggcaaaccgttcgcagcggcctcgcgcgagaccgcgatcctggtcggcaacctgctgctcaccgtggccgcggcgatggtgttgctgggcaccttgttcccgctggtggccgatgcgttcgggctgggcaaggtgtctgtgggcccgccctacttcggcctgctgtttccgttgctgatggcgccggtggtgctgttaatgccattcggcccgtacttgcgctggggcaaggccgagatggcaccgctgctgtcgctgggcgcgcgtgcgggcattgccgccatcgcctgcgcgctggtcgccagcgtgtttgccgagggccaggccaaggccattgccggcatcggtgcggccgcctgggtggctgccggcaccgcgttgtacatgcacaagcgctggcgcgagatgccgcgcggccggcgctttcctgccgagatggccggcatgttgttggcgcacgccggtgtggcggtgttcgtggccggcgtgctggtgtcggacagcctgtcggtggaacgcgacgtgcggctggcgcccggccagagcgcggagatcgccggctacagcttccgcttcgatggcgtgcagctggtggatgggcccaactggaaagccgaacaaggcagcgtgcaggtcagccgtgatggtgcgccggtggctaccttgcatccgcaaaaacgcctgtacagcagtgagcgcatccagaccgaatcggcgatcgacgccggcgccacccgcgacctctacgtggcgctgggcgagccgctggacgaccagcacatcgaaaacgactggacgctgcggctgtactacaaaccgttgatccgctggatctgggccggcgggctgttgatgatgctgggcgggttcgtcagcgcctgcgcgcggcgcttccgcgcaccggtacctgcggttgccgcggtgtcgtcgcctgctcccatcgcccccactcccctcgccgttgccggagagttgcacctgtga

SEQ ID NO: 68001 - protein, 665 aa, Xanthomonas campestris pv. campestris str. ATCC 33913
MTPELGQIALILALLLSLTQGVLPLIGAWRGNTALMAVARPAAAGQAVFVWLAFGLLAWSLLSLDFSVRYVADNANIALPWYYRIAAVWGAHEGSLLLWIAILSTWTVLLAACSRHLPQHFAARVLAVLGLVSVGFLAFILLTSNPFGRLSPIPLDGRELNPVLQDPGMTFHPPVLYTGYVGFSVAFAFAVAALLGGELEQAWVRWARPWTNVAWACLTAGIVAGSWWAYAELGWGGWWFWDPVENASFMPWLVGTALIHTQAVTEKRGSLRAWTILLSILAFSLSLLGTFLVRSGVLTSVHAFAADPRRGLYILIFLVAVVGGSLLLYALRAPKIATGKPFAAASRETAILVGNLLLTVAAAMVLLGTLFPLVADAFGLGKVSVGPPYFGLLFPLLMAPVVLLMPFGPYLRWGKAEMAPLLSLGARAGIAAIACALVASVFAEGQAKAIAGIGAAAWVAAGTALYMHKRWREMPRGRRFPAEMAGMLLAHAGVAVFVAGVLVSDSLSVERDVRLAPGQSAEIAGYSFRFDGVQLVDGPNWKAEQGSVQVSRDGAPVATLHPQKRLYSSERIQTESAIDAGATRDLYVALGEPLDDQHIENDWTLRLYYKPLIRWIWAGGLLMMLGGFVSACARRFRAPVPAVAAVSSPAPIAPTPLAVAGELHL

SEQ ID NO: 68002 - DNA, 1938 bp, Xanthomonas campestris pv. campestris str. ATCC 33913
  CDS (1)..(1938): transl_table=11
atgctgcctgaactcggtaccttcctgctggtgctggcgctgctggtggcgctggtgcaggccgtcgtgccgctggccggtgcgcagcgcgggcgcagtgcctggatggcggttgcccgccccgccgcattggtgcaactggcactgatcgctgcggcattcgcggtgttgacgcacgctttcctggtgcaggatttttcggtgcgatacgtggccgagaactccaactcgctgctgccgttgatctatcgctattcggcggtctggggcgcacacgaaggctcgttgctgctatggacgctggtgctggcgctatggacgggcgcggtggcgatctggtcgcggcagttgcccgcccaggtgatcgcacgcgtgctgggcgtgatggcgctggtgagcatcggcttcctggcgttcctgttgttcacctccaatccgttcgcgcggttgatgccggtgccgctggaaggcgccgacctcaatccgctgctgcaggacccgggcctgatcatccatccgccgatgctttattgcgggtatgtgggctttgcggtgccgttcgcgttcgccattgccgcgctgctggaaggccgcatggacgcacgctggctgcgctggacgcggccatggaccaacattgcctggtcgatgcttaccgtaggcatcgcgctgggcagctggtgggcgtattacgaactgggctggggtggctggtggttctgggacccggtggaaaatgccagcttcatgccctggctggtcggaactgcgctgctgcactcgcaggcggtcaccggaaaacgcggcagcttcgccagctggacgctgctgctggcaatcgccgccttcgcgctgtcgctgctggggaccttcctggtgcgttcgggtgtgctgaccagcgtgcattcgtttgcggccgatccctcgcgcggcgtgttcatcctggtgttcctgctgagcgtggtcggcggctcgttgctgctgtatgtgctgcgcgcgccgcggttgtcgcagggcgatgacccgcgccgggcctttgccggcagctcgcgcgaaacgctgttgctgttgaacaacctgctgctggcctgcgcctgcgcgatggtgctgctgggcacgctgtacccgctgctggccgatgcgctgggcctgggcaaactgtcggttggcccgccctacttcggcacgctgttcctggtgctgatggcgccgctggtggcgctgctgccgttcgggccgctgacccgctggcagcgcgaccaaccctcgcgtccgctggcgatgctcgcgccctgggccgcgctggccgtcgtgctcggggtgctggcctggttcgccgcaccgcagggccagctgaaaacggcactcggcgtggcgggagcggcctgggtggtgctgggcacgctgcgttttttgtggacgcgccgcgctgccaaggggcgcaagttcaccgccgagatgctcggcatggcgctggcgcatacgggcgttgctgtgttcctggccggtgccttgctggtggaatcgctcagcctgcagcgcgaagtcgcgctggcacccggccagcagatggagatcggcagctacgcactgcatttcgacgggctgaaagaagtgcgcgggccgaactacgtctccgaccgcgccaccttgcaggtgttcaaggacgacgcggcagtgggcacgctgcatgccgaaaaacgccgttacgccagtggcggccaaaccctgaccgaggcggcgatccgcccgggtccgtttggcgatctttacgtcgccctgggcgaaccgctgggcaatcaggcctgggcggtgcgtgtgcatctcaaaccgtttgtccgctggatctggctgggagcgctgctgatggcgctcggcggcctggtcaccgcggccgaccggcgtttccgtcgttctccggagtccctaaatgtctga

SEQ ID NO: 68003 - protein, 645 aa, Xanthomonas campestris pv. campestris str. ATCC 33913
MLPELGTFLLVLALLVALVQAVVPLAGAQRGRSAWMAVARPAALVQLALIAAAFAVLTHAFLVQDFSVRYVAENSNSLLPLIYRYSAVWGAHEGSLLLWTLVLALWTGAVAIWSRQLPAQVIARVLGVMALVSIGFLAFLLFTSNPFARLMPVPLEGADLNPLLQDPGLIIHPPMLYCGYVGFAVPFAFAIAALLEGRMDARWLRWTRPWTNIAWSMLTVGIALGSWWAYYELGWGGWWFWDPVENASFMPWLVGTALLHSQAVTGKRGSFASWTLLLAIAAFALSLLGTFLVRSGVLTSVHSFAADPSRGVFILVFLLSVVGGSLLLYVLRAPRLSQGDDPRRAFAGSSRETLLLLNNLLLACACAMVLLGTLYPLLADALGLGKLSVGPPYFGTLFLVLMAPLVALLPFGPLTRWQRDQPSRPLAMLAPWAALAVVLGVLAWFAAPQGQLKTALGVAGAAWVVLGTLRFLWTRRAAKGRKFTAEMLGMALAHTGVAVFLAGALLVESLSLQREVALAPGQQMEIGSYALHFDGLKEVRGPNYVSDRATLQVFKDDAAVGTLHAEKRRYASGGQTLTEAAIRPGPFGDLYVALGEPLGNQAWAVRVHLKPFVRWIWLGALLMALGGLVTAADRRFRRSPESLNV

SEQ ID NO: 68004 - DNA, 1938 bp, Xanthomonas axonopodis pv. citri str. 306
  CDS (1)..(1938): transl_table=11
atgcttcctgaactcgggacgttgctgctggtgctggccctgctggtggcgctggtgcaggccgtggtgccgctggccggcgcacagcgcggacgcagcagctggatggccgtggcgcgaccggcggcgctggtgcagctggcactgatcgcatcggccttcgccgtgttgacgcacgccttcttggtgcaggatttttcggtgcgctacgtcgccgagaattccaacagcctgctgccggtgatgtaccgctattcggcagtgtggggtgcgcacgaaggctcgctgctgctgtggacgctggtgctggggttgtggaccggcgcggtggcgatctggtcgcggcagctgccggcgcatgtgatcgcgcgcgtgctcggcgtcatggcgctggtcagcatcgggtttctggcgttcttgctgttcacctccaacccgtttgcgcggttgtttccggtgccgctggagggtggcgacctcaatccgctgctgcaggatccggggctgatcgtccatccgccgatgctgtattgcggctacgtcggctttgcggtgccgttcgcattcgccatcgccgcactgctggaaggccgcatggacgcgtgctggctgcgctggacgcggccgtggaccaatgtcgcctggtcgatgctcaccgtcggcatcgcgctcggtagctggtgggcgtattacgagctgggctggggtggctggtggttctgggacccggtggagaacgccagtttcatgccgtggctggtgggcaccgcactgttgcattcgcaggcggtgaccgaaaagcgcggcagcttcgccagctggaccttgttgctggcgatcgccgcctttgcgctgtcgctgctgggcacgtttctggtgcgctcgggcgtgctgaccagcgtgcattcgttcgccgccgacccgtcgcgcggactgttcattctggtattcctgctggccgtggtcggtggttcgttgctgctgtatgcgctgcgcgcgccgcttctgtcggtggcggacgatccgcgtcgcgcattcgccggcagttcgcgcgaaaccttgttgctgttgaacaacctgctgctcacctgcgcctgcgcaatggtgttgctgggcaccttgtatccgctgctcgccgatgccttggggctgggcaagctgtcggttggcccgccctacttcggcaccttgttcgtggtgttgatggcgccgctggtggcactgctgcccttcggcccgctcacccgctggcagcgcgaacaggcctcgcggccggtggcgctgctggcgccgtgggcagccctggcgttggctgccggcgtgctggcctggttcgccgcgccgcaggggcagttgaaagccgccttcggtgtcgccggtgcagcctgggtgttgctgggcaccgcgcggttcctgtggacgcggcgggcggccaaggggcgcaaattcaccgccgagatgctgggcatggtgctggcgcacctgggcgttgcggtgttcctgtccggtgccatgctggtggagggattgagcctgcagcgcgaagtggcgctggcgcccgggcaacaggtgcagatcggccgctatgcactgcatttcgacgggctggaagagctgcgcgggcccaattacgtgtccgaccgtgccaacctgcaggtgttcaaggacgatgcgccggcgggcatgctgcatgcggaaaagcgccgctacgccagtggcggccagacgttgaccgaggcggcgatccgccctggcccgtttggcgacctgtatgtcgcccttggcgaaccgctgggcaaccaggcctgggcggtacgtgtccacctcaaaccgttcgtccgctggatctggctgggagcgctgctgatggcgctcggcggcctggtgaccgcggccgaccggcgttttcgtcgttctccggagatccaagatggttga

SEQ ID NO: 68005 - protein, 645 aa, Xanthomonas axonopodis pv. citri str. 306
MLPELGTLLLVLALLVALVQAVVPLAGAQRGRSSWMAVARPAALVQLALIASAFAVLTHAFLVQDFSVRYVAENSNSLLPVMYRYSAVWGAHEGSLLLWTLVLGLWTGAVAIWSRQLPAHVIARVLGVMALVSIGFLAFLLFTSNPFARLFPVPLEGGDLNPLLQDPGLIVHPPMLYCGYVGFAVPFAFAIAALLEGRMDACWLRWTRPWTNVAWSMLTVGIALGSWWAYYELGWGGWWFWDPVENASFMPWLVGTALLHSQAVTEKRGSFASWTLLLAIAAFALSLLGTFLVRSGVLTSVHSFAADPSRGLFILVFLLAVVGGSLLLYALRAPLLSVADDPRRAFAGSSRETLLLLNNLLLTCACAMVLLGTLYPLLADALGLGKLSVGPPYFGTLFVVLMAPLVALLPFGPLTRWQREQASRPVALLAPWAALALAAGVLAWFAAPQGQLKAAFGVAGAAWVLLGTARFLWTRRAAKGRKFTAEMLGMVLAHLGVAVFLSGAMLVEGLSLQREVALAPGQQVQIGRYALHFDGLEELRGPNYVSDRANLQVFKDDAPAGMLHAEKRRYASGGQTLTEAAIRPGPFGDLYVALGEPLGNQAWAVRVHLKPFVRWIWLGALLMALGGLVTAADRRFRRSPEIQDG

SEQ ID NO: 68006 - DNA, 1971 bp, Yersinia pestis KIM
  CDS (1)..(1971): transl_table=11
atgatccctgaaattggcagttttttattatgtttggcgttggcgatttcactgctgctgagtctgtatccacaatggggagccgcgcgtcaggatgcccgtatgatggcggttggcaggccactgacttatggcatgtttgccgcgatcacgttgtcatttatctgtctgatatatgcatttgtggtaaatgattttaccgtctcctatgtcgcggcgaattccaactcatatttgccgatttattaccgtattgccgcgagttggggagcgcacgaaggctccttattattatgggtattgctgctcagttgttggtcattggcggtagcgctgtttagccgttcgatgccagaggatgcggtggcgcgggtgttatccgtgctgggaatgattaccggcggttttctgctatttattattctgacgtctaacccgttctctcgcacattacctgattttcctattgatggccgcgatctgaacccgctactacaagatgttgggttgattttccatcccccgctgctctacatggggtatgtcggtttctccgtcgcgtttgcttttgcaattgcatcattaatggccggtaggctcgacagtgcctgggcgcgttggtcacgtccatggactcaggccgcatggattttcctaacgcttggcatcgtacttggctcagcgtgggcttattatgaattggggtggggcggctggtggttctgggacccggtcgaaaatgcctcctttatgccgtggctggcaggtaccgcactgattcactcactggctgtcacggagaagcgcggtactttcaaagcgtggacggtattgttggcgatcaccgcgttctccttgtgtttgatggggacattcttagtccgctcaggcgtgctggtttcggtgcactcctttgcctctgatccggcccgtggcatgtttattctggcctatctggtgattgtgattggcggttccctgctgctgtatgcggtaaaaggcgcgcaggtgcgcagccggactcagcatgaagtcttttcccgcgagactttcctgctcggcaacaatgtgttgcttattgccgcaatgctcgtggtgttgctgggaacattactgccactggttcacaaacagttgggattgggcagtatctccattggtgaaccgttctttaatacgatgttcacttggttaatggctccgatggcattgctcatggggatagggccgctcgtgcgttggcgtcgtgatgaaccgagcaaactgtggaagcggttgagtgtggctctggtggtcactctgctgttatcgatatccgtaccgtggctgctgcaagatagtgtcgccggtatgacggtcgtcgggttgatgatggccatttgggtgatcatcctgacattaatggaattgcacgaacgggccacccatcgttatggcttctggcgtgggttgactcacctttcccgtagccactggggcatggtgttggggcatctcggggtggcggttacggtaattgggattgcgtttagccagaattacagtgtcgaacgcgatgtgcgcatgaaggccggtgatagtatcgatatccatgattatcacttcacttttcgcgatgtccacgatatcaaagggcctaactataccggcggcgttggcattattgatgtcacccgtaatggtaaattggaggccacattacatgcagaaaaacgctattacagtgtcgcccgctcaatgatgactgaagcagccattgatggggggctgacccgcgatctttatgccgccttgggtgaagagctgggcgatggctcatgggcggtccgcttgtattacaaaccttttgtgcgttggatatggtttggcgggatctttatggccgtcggcggcatcttctgtatgctcgatccgcgctatcggatgagtaaaaagctaaaacgcggtgcgataccggaggcagagtcatga

SEQ ID NO: 68007 - protein, 656 aa, Yersinia pestis KIM
MIPEIGSFLLCLALAISLLLSLYPQWGAARQDARMMAVGRPLTYGMFAAITLSFICLIYAFVVNDFTVSYVAANSNSYLPIYYRIAASWGAHEGSLLLWVLLLSCWSLAVALFSRSMPEDAVARVLSVLGMITGGFLLFIILTSNPFSRTLPDFPIDGRDLNPLLQDVGLIFHPPLLYMGYVGFSVAFAFAIASLMAGRLDSAWARWSRPWTQAAWIFLTLGIVLGSAWAYYELGWGGWWFWDPVENASFMPWLAGTALIHSLAVTEKRGTFKAWTVLLAITAFSLCLMGTFLVRSGVLVSVHSFASDPARGMFILAYLVIVIGGSLLLYAVKGAQVRSRTQHEVFSRETFLLGNNVLLIAAMLVVLLGTLLPLVHKQLGLGSISIGEPFFNTMFTWLMAPMALLMGIGPLVRWRRDEPSKLWKRLSVALVVTLLLSISVPWLLQDSVAGMTVVGLMMAIWVIILTLMELHERATHRYGFWRGLTHLSRSHWGMVLGHLGVAVTVIGIAFSQNYSVERDVRMKAGDSIDIHDYHFTFRDVHDIKGPNYTGGVGIIDVTRNGKLEATLHAEKRYYSVARSMMTEAAIDGGLTRDLYAALGEELGDGSWAVRLYYKPFVRWIWFGGIFMAVGGIFCMLDPRYRMSKKLKRGAIPEAES

SEQ ID NO: 68008 - DNA, 1980 bp, Shewanella oneidensis MR-1
  CDS (1)..(1980): transl_table=11
atgatcccagaacttggacacttttcgctgataataggagtggcttttgccttcttattaaccagcgttccccttataggtgttgcccgtaaagaccaatatctagtgaggtatgcttggccgttagcctacggaatgttcttttttatcgctttatccgtagtatcacttggttacagcttcgccgttgatgatttctccgtggcctatgtggcacatcactctaattctcagttacctatcttctttaagattgcggccgtatggggcggtcatgaagggtcgctgctattctgggtgttcgcgctatccacttgggctgcctctgttgctttattcagtaaaggcttagaagaagtcttcaccgctcgcgtgttagcggtattggcattgattgtgattggcttcagcttgtttatgttactcacttctagcccatttgaacgtatattcccaatgcctgctgaaggccgcgacttaaatccaatgctgcaggatgtgggcttaatcttccaccctccgatgttatatttgggttatgtgggtttctcagtcagttttgcatttgcgattgcagctttgatgagtggtcaccttgattctgcttgggctcgttggtcgcgtccttggaccttagccgcttgggttttcctcactggtggtattgcattaggttcttggtgggcgtattacgaattaggctggggtggatggtggttctgggatccagtagaaaacgcttcatttatgccttggctagtgggtacggctttagtgcattcactgatcgtgacggaaaagcgcggtgcattccgtaactggacggtattgctgtctatcttcgcattctcgctaagtttactcggtacctttatcgtacgctctggtgtgttgacttcagtgcattcatttgcagccgatccaagccgcggtatgtttattctattattgcttggtctcgctatcggtggttcgctcactttgtttgccttccgtgcaagtgaaatgagcagccctgcacgcttcgagctgaaatcaaaagaaaccatgctgttagtttgtaacgtgttactgacggttgcagcgggtactgttctgttaggcactttatacccactgctgatcgatgcgttaggcatgggtaagatttctgttggacctccatactttaacgctgtgtttgtacccatagtacttgtactgtttgcctttatgggcgtcggtccaatcattcgttggaaaaaatcgaaagctggtgaattgaagcgacagttactcgtacctgcattagtatctctggtgattggtattgtcacgccgtttatcgtcgatggggcctttaacgcttgggttgcttgcggtatcgccgctgcagcttggattattttggcaaccgcaaaagcagcttacagcatcgttaagcctaaagatggtgaagtaagcatcgcacgtatgggccgtagccaactcggtatgatcatcgcgcacttaggtattgctgtgtctgttattggtgccactatggtgtctaactactcagtggagaaaagtgtgcgtatggggcctggcgtaagccaagagctagcgggttacacctttaaatatctcgaaactaaaaacgttgttggtcctaattacactgcgcagcaaggtcaaattgagatttacaaaggcgataagttactgacactgctcaaacccgatcgtcgccaatacaatgtgcgtactatggatatgaccgaagccggtatcgattggggtctgttccgcgatctgtatgtgacgatgggcgatccgattagtagtactgaatttgctgtgcgtttgaactacaagccgtttgtgcgttggttatggttcggagcaatattcatgatggtcggcggtttctttgccgcatcggataaacgctatcgctcaaaagtcgcggctaccgttaaaccgcaagctgaaaaagcgaaattagctaccgctcaataa

SEQ ID NO: 68009 - protein, 659 aa, Shewanella oneidensis MR-1
MIPELGHFSLIIGVAFAFLLTSVPLIGVARKDQYLVRYAWPLAYGMFFFIALSVVSLGYSFAVDDFSVAYVAHHSNSQLPIFFKIAAVWGGHEGSLLFWVFALSTWAASVALFSKGLEEVFTARVLAVLALIVIGFSLFMLLTSSPFERIFPMPAEGRDLNPMLQDVGLIFHPPMLYLGYVGFSVSFAFAIAALMSGHLDSAWARWSRPWTLAAWVFLTGGIALGSWWAYYELGWGGWWFWDPVENASFMPWLVGTALVHSLIVTEKRGAFRNWTVLLSIFAFSLSLLGTFIVRSGVLTSVHSFAADPSRGMFILLLLGLAIGGSLTLFAFRASEMSSPARFELKSKETMLLVCNVLLTVAAGTVLLGTLYPLLIDALGMGKISVGPPYFNAVFVPIVLVLFAFMGVGPIIRWKKSKAGELKRQLLVPALVSLVIGIVTPFIVDGAFNAWVACGIAAAAWIILATAKAAYSIVKPKDGEVSIARMGRSQLGMIIAHLGIAVSVIGATMVSNYSVEKSVRMGPGVSQELAGYTFKYLETKNVVGPNYTAQQGQIEIYKGDKLLTLLKPDRRQYNVRTMDMTEAGIDWGLFRDLYVTMGDPISSTEFAVRLNYKPFVRWLWFGAIFMMVGGFFAASDKRYRSKVAATVKPQAEKAKLATAQ

SEQ ID NO: 68010 - DNA, 2058 bp, Shewanella oneidensis MR-1
  CDS (1)..(2058): transl_table=11
atgattccagaaatcgggcacatattgctgatcatgagtactgtgtttgcattattgtcggcggccagtcatttaatcggtagttaccagcgcaacctttatttaattgcatttggcaatagattattttacgcgttatttttcaccttattaaccgcgttatgtagcttagtttttagctttattgccgatgacttttcagtcgcctatgttgccaatcattccaacagccaactcgccctcggttataaagtcgctgcggtgtggggcagccatgaaggctcaatgctgttttgggtatttgccattgccctatggggtgcagtgatcaattggcgccaagcaacccatagcgccaaactcgatctggaaaacttacaagcagataaggcttactttggtcgggtactcgctattttggccttagtgatcctcggttttaatttgtttttactctttacttccaatccctttgctcgcttgctaccgaacattccagtcgaagggcgcgaccttaaccccatattgcaggacattggcttaatactgcatccacctatgctgtttttgggttatgtcgggctaacggtttgctttgccgcagcgctggcatcactgattgggggcaagttacctgctcgccacctcgattatttacgtccttgggtgctactggcgtggattttcctcacaggtggtaatgcctttggctcttggtgggcctacaacgaactgggttggggtggttggtggttttgggaccccgttgaaaacgcctcttttattccttggttggttgcaacagcgctggtgcattccttagtactcacccgaaaaacccagggatttaccctcaccaccctgtttttatgtttattggccttctccctcagtctgttaggcagctttttagtgcgttcaggcatagtgcaatcggtgcatgcctttgccgcagatccaacccgcggtatgtctattctcagtttgctggtgatttttgttggcgctgcattattaatttttgcgctcaaggccaatctattaaggcgtgaaatcgactttggtctgtacagtaaggaaacgctattactgctcgggatagtgattttagtggttgccgccttttcagtgttgcttggcactttttacccgctgatttatgaactcctcaacctaggtacactttcagtcggggcgccgtacttcaacgccatatttgtaccattgacctttttagtcgtactactgatggggattgcccccctcgtcgaatggcaaaatacctctaaggctcaagctatgccgatattgctgttcggctttggggtattggctatcgccttttgggtaagtctacaggcggcgtctggcagcaacttattcttactgcttggcacggcggcagccttatggcttatcgtgtgcttattactgacgctgttagtgagtcttagtgttcgcaaacgcgccagtacaaaccaaattacagccaacgcgcccgtaaaatcccgcacctcaaaacaacgctttatcggcatgatgctcgcccacctcggggttgccatcaccattattggtgcctcagcggtatccaattttgaagaagaagcactgctcagaatgggcccaggccaaggtaagccgttagcgggttatatcttagtgtatgaaagcactgagaatgtcgaaaccaatagctttacggcaatccaagccaatatcagtatccgcgatggcgcgaatgatgaagagatcctcggttatgtaaggccgcaacgacaaacttttaaaagcaacgcgatggaaatgtcccacgcggggatcgaccacggtttttggcgggatatttatgtctcaatgggcgtgcaattaagtgacagcgaatatctgatccgtattagctataaaccactggccacttggatttggctgggggcacttttcatgatgctcggcggcgccattgccgcgtggcccgtaaggcaagctcgccgcgtcgaacaatcagaacagctcagtacaagctcatcatctgcaagggagacggtaacccaatga

SEQ ID NO: 68011 - protein, 685 aa, Shewanella oneidensis MR-1
MIPEIGHILLIMSTVFALLSAASHLIGSYQRNLYLIAFGNRLFYALFFTLLTALCSLVFSFIADDFSVAYVANHSNSQLALGYKVAAVWGSHEGSMLFWVFAIALWGAVINWRQATHSAKLDLENLQADKAYFGRVLAILALVILGFNLFLLFTSNPFARLLPNIPVEGRDLNPILQDIGLILHPPMLFLGYVGLTVCFAAALASLIGGKLPARHLDYLRPWVLLAWIFLTGGNAFGSWWAYNELGWGGWWFWDPVENASFIPWLVATALVHSLVLTRKTQGFTLTTLFLCLLAFSLSLLGSFLVRSGIVQSVHAFAADPTRGMSILSLLVIFVGAALLIFALKANLLRREIDFGLYSKETLLLLGIVILVVAAFSVLLGTFYPLIYELLNLGTLSVGAPYFNAIFVPLTFLVVLLMGIAPLVEWQNTSKAQAMPILLFGFGVLAIAFWVSLQAASGSNLFLLLGTAAALWLIVCLLLTLLVSLSVRKRASTNQITANAPVKSRTSKQRFIGMMLAHLGVAITIIGASAVSNFEEEALLRMGPGQGKPLAGYILVYESTENVETNSFTAIQANISIRDGANDEEILGYVRPQRQTFKSNAMEMSHAGIDHGFWRDIYVSMGVQLSDSEYLIRISYKPLATWIWLGALFMMLGGAIAAWPVRQARRVEQSEQLSTSSSSARETVTQ

SEQ ID NO: 68012 - DNA, 1989 bp, Pseudomonas putida KT2440
  CDS (1)..(1989): transl_table=11
atgaacgcagcactggtagtccccgaactgggccagttggcgatgattctggccatctgctttgccgtcgtacaggccagtgtgccgttgcttggcgcgtggcgtggcgacagcctgtggatgagcctggcgcggccggcagcctgggggcagttcgccttcctggcgtttgcctttgcctgcctgacccatgccttcatgacagacaatttctcggtcgcctatgtggccagcaactccaacagcgccttgccctggtactacaagttcagtgcggtgtggggcgcccatgagggttcgttgctgctttgggcgctgatccttggcggctggacctttgccgtgtcggtgttctcccggcagttgccgcaggtgatgctggcccgcgtgctggcggtaatgggcatgatcagcgtgggcttcctgagcttcctgatcattacttccaacccgttccagcgcctgctgccgcaggtgccgaccgatggccgtgacctcaacccgctgttgcaggactttggcctgatcgttcacccacccatgctctacatgggctatgtgggcttctcggtggctttcgcgttcgccattgccgccttgctcggcggccggctggacgctgcctgggcgcgctggtcgcggccgtggaccatcgtcgcctgggctttcctgggtgttggcatcaccttggggtcgtggtgggcctactacgaactgggctggggtggctggtggttctgggacccggtggaaaacgcctcgttcatgccttggctggtgggcaccgcactgatccactcgctggcggtgaccgagaaacgcggggtgttcaagagctggaccgtgctgctggcaattgccgcattctccctgagcctgctgggtaccttcctggtgcgttccggagtgctgacctcggtgcacgcgtttgccgccgacccgtcgcggggtattttcatcctgtttttcctgctgttcgtggtcggcggctcgctcaccctgttcgccctgcgcgcaccggtggtcaagagccaggtcggtttcgccctgtggtcgcgtgaaacgctgctgctggccaacaacctggtgctggtggtcgcggcttcgatgattctgctcggtaccctgtacccattggtgctcgatgccctgaccggggccaagctgtcggtcggcccgccctatttcgacgccttgttcctgccactgatggcgctgctgatggtggtgctgagcgtgggcgtggtggtgcgctggaaggacaccccgggcaaatggttggtcagcatgatgaccccggtattgatcggcagtgccatccttgcaccggttgccggctttatcgtcgacgacttcgactggccgacgctgacggccttcgccctggccgcctgggtagtgcttggcgggctgcgtgacattttcgacaagacccgccacaagggcctggtcaaaggcctgccgggcctgggccgcagctactggggcatgcaactggcgcacctgggcctggcggtgtgtgcgctgggcgtggtgctgtccagcaacaacagcgccgagcgcgacctgcgcatggcgccgggcgaaagcgtggagctgggtggctaccacttcctgttccagggcgccaagcacttcgaggggccgaacttcatctctgacaagggcaccatcgtggtcagccgcgagggccgtgaagtgaccacactgtacccagagaagcgcctgtacaccgtgcaacagtcgatgatgaccgaagcgggcatcgacgccggctttacccgcgacctgtacgtcgcgcttggcgagccactggagaatggcgcctgggctgtgcgcgtacatattaagccttacgtccgctggatctggctgggcggtctgctgaccggcctgggcgggttgctggcggccctcgaccggcgctaccgcgtcaaggtcaagacccgggtgcgtgatgtcctgggcgtgtctggagcagctgcatga

SEQ ID NO: 68013 - protein, 662 aa, Pseudomonas putida KT2440
MNAALVVPELGQLAMILAICFAVVQASVPLLGAWRGDSLWMSLARPAAWGQFAFLAFAFACLTHAFMTDNFSVAYVASNSNSALPWYYKFSAVWGAHEGSLLLWALILGGWTFAVSVFSRQLPQVMLARVLAVMGMISVGFLSFLIITSNPFQRLLPQVPTDGRDLNPLLQDFGLIVHPPMLYMGYVGFSVAFAFAIAALLGGRLDAAWARWSRPWTIVAWAFLGVGITLGSWWAYYELGWGGWWFWDPVENASFMPWLVGTALIHSLAVTEKRGVFKSWTVLLAIAAFSLSLLGTFLVRSGVLTSVHAFAADPSRGIFILFFLLFVVGGSLTLFALRAPVVKSQVGFALWSRETLLLANNLVLVVAASMILLGTLYPLVLDALTGAKLSVGPPYFDALFLPLMALLMVVLSVGVVVRWKDTPGKWLVSMMTPVLIGSAILAPVAGFIVDDFDWPTLTAFALAAWVVLGGLRDIFDKTRHKGLVKGLPGLGRSYWGMQLAHLGLAVCALGVVLSSNNSAERDLRMAPGESVELGGYHFLFQGAKHFEGPNFISDKGTIVVSREGREVTTLYPEKRLYTVQQSMMTEAGIDAGFTRDLYVALGEPLENGAWAVRVHIKPYVRWIWLGGLLTGLGGLLAALDRRYRVKVKTRVRDVLGVSGAAA

SEQ ID NO: 68014 - DNA, 1683 bp, Escherichia coli CFT073
  CDS (1)..(1683): transl_table=11
ttgttgttaagtctcggggtcaacgtgttgaccccgttgacggccttcgcgggagtgcggttgcgctggcctgccatgatgcgactcacttgcatcggcattctggcgcagttcgcgctcctgctgctcgcctttggcgtactgacgtattgttttctcatcagcgatttctcggtcatttatgtcgcccaacatagctatagcctgctgtcgtgggaactcaaactggcggcggtgtggggcggtcatgaaggttcgctgctgctttgggtgctgctgctttccgcctggagcgcgctgtttgcctggcattatcgacagcaaaccgatccgctatttccgctgacgctagccgttttatctctcatgctcgccacactgctactgtttgtggtgctgtggtccgatcccttcgtgcggatatttccaccagcaatcgaaggccgcgatctcaatccgatgctgcaacatcccggtcttatctttcatccaccgctgctttatctcggctacggcggtttgatggtggcggcgagcgtggcactggcgagtttactgcgcggcgagcttgatggtgccagcgcccgaatttgctggcgttgggcactacctggctggagcgcattaacggcggggatcatcctcggttcctggtgggcctattgcgaactgggctggggcggctggtggttctgggatccggtggaaaacgcgtcgttattaccctggctttctgccacagcgctgctgcacagtttatccctgacacgccagcgggggattttccgccactggtcgctgttgctggcgatagtaactctgatgctgtcgctgctgggcaccttaattgtccgttctggcattctggtttcggttcatgcgttcgcgctggataacgtccgcgccgtgccgttgttcagcctgtttgcactgattagccttgcgtctctggctctgtatggctggcgagcgcgggacggtggcccggcggtgcgtttttcggggttatcgcgggaaatgttaatcctcgctacgctgttgctgttttgcgcagtgctactgatcgtgctggtgggaacgctttatccgatgatttacggcctgctgggctggggacgcctctccgttggcgcgccgtattttaaccgcgcgacgttaccgtttgctctgttgatgctggtggtgattgtgctggcgacgtttgtctctggcaaacgtgctcagcttccggcgctgctggcgcatgcgggcgtgctgttatttgccgcggggatcgtggtttccagcgtcagccgtcaggagatcagcctgaatttacagccgggtcagcaggtgacgctggcaggatacaccttccgttttgagcgcctcgatctgcaagccaaaggcaattacaccagcgaaaaagcgatagtggcactgtttgaccatcagcaacgcattggtgaattaacgccggagcggcgtttttacgaagcacgtcgtcagcaaatgatggaaccgtcaattcgctggaatggcatccatgactggtatgcggtcatgggcgagaaaaccggagcggatcgttacgcttttcgtttgtatgtacaaagcggtgtgcgctggatctgggggggaggattgttgatgattgcgggcgcattgttaagcggatggcggggaaggaagcgcgatgaataa

SEQ ID NO: 68015 - protein, 560 aa, Escherichia coli CFT073
MLLSLGVNVLTPLTAFAGVRLRWPAMMRLTCIGILAQFALLLLAFGVLTYCFLISDFSVIYVAQHSYSLLSWELKLAAVWGGHEGSLLLWVLLLSAWSALFAWHYRQQTDPLFPLTLAVLSLMLATLLLFVVLWSDPFVRIFPPAIEGRDLNPMLQHPGLIFHPPLLYLGYGGLMVAASVALASLLRGELDGASARICWRWALPGWSALTAGIILGSWWAYCELGWGGWWFWDPVENASLLPWLSATALLHSLSLTRQRGIFRHWSLLLAIVTLMLSLLGTLIVRSGILVSVHAFALDNVRAVPLFSLFALISLASLALYGWRARDGGPAVRFSGLSREMLILATLLLFCAVLLIVLVGTLYPMIYGLLGWGRLSVGAPYFNRATLPFALLMLVVIVLATFVSGKRAQLPALLAHAGVLLFAAGIVVSSVSRQEISLNLQPGQQVTLAGYTFRFERLDLQAKGNYTSEKAIVALFDHQQRIGELTPERRFYEARRQQMMEPSIRWNGIHDWYAVMGEKTGADRYAFRLYVQSGVRWIWGGGLLMIAGALLSGWRGRKRDE

SEQ ID NO: 68016 - DNA, 2052 bp, Nitrosomonas europaea ATCC 19718
  CDS (1)..(2052): transl_table=11
atgattccggaacttggtaactttgccctcatcctcgcaatgctgctggccctggtccagggaacactacccatcattggcgcggcacgtggtataccctcgtggattgctttggcgcgtccggtcacacagggacattttgtatttatcgcgattgctttcgggtgccttgcctattcgttcgtaaataatgatttctctgtattgaacgtggcatccaactcgaattctgatcttcctgtgcattttcgttttgctgcaacatggggatctcatgagggttcattattgctatgggtgaccatgcttgccggctggtctgtggctgtaagtgttttcagtcgtcagttgccggacgatatggtagctcgtgtcttgggtgtgctggggctggtcagtgctggttttctgctgtttcttttgtttacctccaaccctttcgacaggttgttgccggcagcaatcgaagggaatgacctcaatccactactgcaggatccgggaatggttatgcatccacccatgttgtatatggggtatgtaggtttttcagtggcatttgcatttgcaattgcagcactgcttaacggccagctggatgcagcctgggcgagatggtcacgtccatggaccgttgttgcctggattttcctgactattggcatcatgggcggcagctggtgggcatattatgagctggggtggggtggctggtggttctgggatccggttgaaaatgcatcattcatgccttggctggtaggtaccgcactgatacattcactggccgtgactgaaaaacgcggaagtttcaagagctggacggtgttactggcaattactgctttttcactgagtctgttggggactttcctggttcgttctggggttctgacttccgtacatgcttttgcaacagatccggcacgcgggatatttattctggtctatctctcgctggtcgtagggtgttcactgacactgtttgcatggcgagcatcgaaagtaggtcttggtggtaattttgaaattgtctcacgtgaaactactttgcttgccaataatgtattgctgctggtggctgcaggtagcgtattgctgggtacactttaccctctcctgatcgatgcattggatctggggaaaatttctgtaggccctccttattttgaggctgtttttgtgcctctgatggcaccggcaatctttctgatcgggttggggccgattgctcgctggaagaaagccagcctgccagccctggcggtgctgatgagatgggcattcgttgtgagtctggtggctgcagggatcatgccgttcatcatgggcgagtggaaacctatggtcagttttggattgcttctggctttctgggtcatcgccagtatatttgtcagcatcagccatcgactccggaacggtggtgaaggtggattgtttaccagactggcaaaacagccaaggggttattacggtatgcactgtgcacatttgggtattgcagtgttcatcatcggtgtgacgctggtcaatggttatgaaaccgagaaagatgtgcgaatggaagtcggcagtaccgtgacactcaaggaatataccttccagttcaatggaaccaagtcggttaccggccctaattacaatgcatctcagggacaggtcgaggtattcagggaaggtaaaaaagtcagtgagttgcagcctgaaaaaagaacctataccgcatcaggtatgcctatgactgaggcggcggttgacatggggctgttgcgtgatttgtatgttgcactgggtgagccgttggaaaacggtgcctggatagttcgtgtctatcacaaaccttttgttaactggatatggctgggttgtatgttgatggctttaggaggagcgctggctgccagtgatcgacgttatcgtctcgcaattggcaagaaatcgaggaataaggcagcttcaggaccagtagcaccggaaactgcagatataccggccgggagcatggttaccaattcagttatcctctcggaggaaggtggtaaggtatga

SEQ ID NO: 68017 - protein, 683 aa, Nitrosomonas europaea ATCC 19718
MIPELGNFALILAMLLALVQGTLPIIGAARGIPSWIALARPVTQGHFVFIAIAFGCLAYSFVNNDFSVLNVASNSNSDLPVHFRFAATWGSHEGSLLLWVTMLAGWSVAVSVFSRQLPDDMVARVLGVLGLVSAGFLLFLLFTSNPFDRLLPAAIEGNDLNPLLQDPGMVMHPPMLYMGYVGFSVAFAFAIAALLNGQLDAAWARWSRPWTVVAWIFLTIGIMGGSWWAYYELGWGGWWFWDPVENASFMPWLVGTALIHSLAVTEKRGSFKSWTVLLAITAFSLSLLGTFLVRSGVLTSVHAFATDPARGIFILVYLSLVVGCSLTLFAWRASKVGLGGNFEIVSRETTLLANNVLLLVAAGSVLLGTLYPLLIDALDLGKISVGPPYFEAVFVPLMAPAIFLIGLGPIARWKKASLPALAVLMRWAFVVSLVAAGIMPFIMGEWKPMVSFGLLLAFWVIASIFVSISHRLRNGGEGGLFTRLAKQPRGYYGMHCAHLGIAVFIIGVTLVNGYETEKDVRMEVGSTVTLKEYTFQFNGTKSVTGPNYNASQGQVEVFREGKKVSELQPEKRTYTASGMPMTEAAVDMGLLRDLYVALGEPLENGAWIVRVYHKPFVNWIWLGCMLMALGGALAASDRRYRLAIGKKSRNKAASGPVAPETADIPAGSMVTNSVILSEEGGKV

SEQ ID NO: 68018 - DNA, 1995 bp, Bordetella parapertussis 12822
  CDS (1)..(1995): transl_table=11
atgatcccggaaatcggcctgttcagcctcatcctggcgttgctggttgccatcgtgcagggcgtgctgccgctggtgggcgcatcgaccggctggcaggccggcctgcgggtggcgcggccggccgccgtcacccaattctgcctggtcaccgtggccatgggctgcctggcgtggtcgttcctggacaacgatttctcggtgctgtatgtggcgggcaactcgcacgccgacctgcccgccgcctaccgcttcgcggcgctatggggcggccacgagggatcgctgctgctgtggctgtacctgctgaccgcctggacgctggcggtggcgctgcacagccgcgcgctgccgccggccttcgcggcgcgcgtgctggccgtcatggcctggatcagcatcggcttcctgctgttcctgctgttcctgtccaatccgttcgagcgcctgatgccgccggcgcaggccggacgcgacttgaaccccttgctgcaggatccgggcatgatcgtgcatccgcccatgctgtacatgggctatgtgggcttttcggtggcgttcgccttcgccatcgccgcgctgctgtcgggcgagctggacgccatctgggcgcgctgggtgcggccctggaccttgctggcctggatgttcctgaccatcggcatcctgctgggcagcgcctgggcctactacgtcctgggctggggcggctggtggttctgggatccggtcgagaacgcctcgttcatgccgtggctggccggcacggcgctgatccattccctgatcgtcacggagcggcgcggcgccttccgcagctggacggtgctgctggccatcgcggcgttctcgctgagcatactgggtactttcctggtgcgctccggcgtgctgacctcggtgcacgccttcgcggtcgatcccggccgcgggctgtacatcctgggcttcatgacgctgatcgtgggcggctcgctggccctgtacgcctggcgcgcgcccaccgtaggccttggcgggggcttcgccctgctgtcgcgcgaatcgctgctgctcagcaacaacgtggtgctggccgcggctaccggcgcggtgctgctgggcacgctgtacccggtggcgctggacgtgctggactggggcaagatctcgatcggcccgccctacttcgaggcggtgttcgtgccgctgatgacgccggcgatcttcctgatgggcgtgggaccgatggcgcgctggaagcacagcgccgtgccggacctggcgcagcgcctgcgcattgccttcggcgtgagcctggccaccgcgctgacggtgccgctggcctggcccggcgcgcgcgcctggccaggctcgccgctgatcgtattgggcctgtggctggcggcctggtcggtcgccagcgccgccgcgcatgcctggcagcgcctggccgacggcgaaggctcgtgggcgcggcgcctgcgccgccagccgcgcgcctggtacggcatgctgctggcgcacgccggcgtgggcgtgttcatcgccggcgtgacgctggccaatggctatgaggacaagcaggaattgcgcatggacatcggcgccacgcaggccgccggcggctaccagttcaccttcgccggtatcgcgccggccgccggccccaactaccaggccgaacgcgcccgcttcgtggtcacgcgcgacggccggccggtggtcacgctgcatcccgagaaacgccactacacggtgcagggcatgccgctcagccatgccgccatcgacacccgctttacccgtgacctgttcgtggcgctgggcgagccggtcggccagcgggcctggacggtgcggctgcaggtcaagcccttcatggcctggatctggtcgggttgcgtgctgatggcgctgggcggcctgatggcggcaaccgaccggcgctaccgccagtggcgcgccgccgaagcgcgccaagcggtgacggcggtggcgcgggaggccggctga

SEQ ID NO: 68019 - protein, 664 aa, Bordetella parapertussis 12822
MIPEIGLFSLILALLVAIVQGVLPLVGASTGWQAGLRVARPAAVTQFCLVTVAMGCLAWSFLDNDFSVLYVAGNSHADLPAAYRFAALWGGHEGSLLLWLYLLTAWTLAVALHSRALPPAFAARVLAVMAWISIGFLLFLLFLSNPFERLMPPAQAGRDLNPLLQDPGMIVHPPMLYMGYVGFSVAFAFAIAALLSGELDAIWARWVRPWTLLAWMFLTIGILLGSAWAYYVLGWGGWWFWDPVENASFMPWLAGTALIHSLIVTERRGAFRSWTVLLAIAAFSLSILGTFLVRSGVLTSVHAFAVDPGRGLYILGFMTLIVGGSLALYAWRAPTVGLGGGFALLSRESLLLSNNVVLAAATGAVLLGTLYPVALDVLDWGKISIGPPYFEAVFVPLMTPAIFLMGVGPMARWKHSAVPDLAQRLRIAFGVSLATALTVPLAWPGARAWPGSPLIVLGLWLAAWSVASAAAHAWQRLADGEGSWARRLRRQPRAWYGMLLAHAGVGVFIAGVTLANGYEDKQELRMDIGATQAAGGYQFTFAGIAPAAGPNYQAERARFVVTRDGRPVVTLHPEKRHYTVQGMPLSHAAIDTRFTRDLFVALGEPVGQRAWTVRLQVKPFMAWIWSGCVLMALGGLMAATDRRYRQWRAAEARQAVTAVAREAG

SEQ ID NO: 68020 - DNA, 2016 bp, Cupriavidus necator
  CDS (1)..(2016): transl_table=11
atgaatgccgaactcggccatttcgcgctgatcgtggccctgctggtcgcgatagtgcaggccgcattgccgctggccggcgccgcgcacggcaacatcgcgtggatggccgtggcccgtcccgccgcgcgcgtgcagtgcgtgctggtggcgctggccttcggctcgctgacatgggccttcgtcagcaatgacttcagcgtgcgctacgtggcggcgaatgccaacaccgccctgccgctgacctaccgcattgcggccgtatggggcgggcacgaaggttcgatgctgctgtggacgctgatgctcgggctgtggtcgacggcagtttccttctgcagccggcagcggccactcgccgtcgtggcgcgtgtgctgggtgtgatgggcaccatcagcgccggcttcctgctgttcctgctgttcgcgtccaatccgttcctccgcctgctgccgcccgcgatggaaggccgcgacctcaacccgctgctgcaggacccgggcatggtgtttcatccgccgctactctatatgggctatgtcggcttctcggtcaccttcgccttcgccgtggccgcgctgctggcaggccgggccgacgccgcttgggcacgctggtcgcgcccgtggaccacggtggcgtgggcactgctgacgctgggcatcatgctcggcagtgcctgggcgtactacgaactcggctggggcggctggtggttctgggatccggtcgagaacgcctccttcatgccctggctcgcgggcaccgcgctgatgcactcgctcgcggtcacagagaaacgcggcgcgttccgcgcctggacggtgctgctcgccatctttaccttctcgctgagcctgctcggcactttcctggtccgctccggcgtgctcacctcggtgcacgcgtttgcggtcgacccgaagcgcggcatcttcatcctggcgctgctgggactggtcaccggactgtcgctgacgctctatggatggcgcgcgccgcggcttgcacggcgcgtcgaattttccgtggcagcgcgggaatccctgctgctcgccaacaatgtgctgctggccgtcgccgctgccaccgtgttgctcggcacgctctacccattgctgctggacgtgctcgggctgggcaagatctcggtcggcccggcgtacttcgagcaggtattcgtgccgctgatggcgcccgccgtgctgctgatgggcgccgcgccgctggcgcgctggcggcacggcggcctgcccgacatggcgcgacggctgcgctgggcggcggcggccagcatcgtcgtcggactcggcctgttgctggttcagcgcaacgcgtcggcgctcgcagggctggggctggtgctggcggcctggtgcgggctcagcgccgtggccagcctgtctacgcgcctgcggaaccagcaaggccggcgcctggccgccttgcgccagctgcccgcgagctattggggcatgctgctgtcgcacgcgggcgtgggcgtcttcatcgccggcgtgacgctggtgtcgagccaggagagcctgcgcgaactgcccatgcgcgtgggccacaacatcagcgttggcggctatagcttccgcttcgacggcgtgacgcaggcggcgggccccaactacgatgcgctgcgcggaacgctgtccgtgtcccgccacggcaagatcgtcgccgtcctcgccccggaacgccgcatctaccgcagccaggacatgcccaccaccgaagccgccatcgacagcggcctgacccgcgatctctacgtcgcgctgggcgagggcgtgggcgatggcggctgggcggtgcgcatccacgtcaagccgttcgtcgactggatctgggccgggtgcatcctgatggcgctgggcggcttgcttgccgtctgcgacaaacgctaccgcctgcgtcggcgcgccccggctccacaggccgaaacagtcgatgcgccgaaggcaccggcactggcgctttccaccgccgaggagacgcgggcatga

SEQ ID NO: 68021 - protein, 671 aa, Cupriavidus necator
MNAELGHFALIVALLVAIVQAALPLAGAAHGNIAWMAVARPAARVQCVLVALAFGSLTWAFVSNDFSVRYVAANANTALPLTYRIAAVWGGHEGSMLLWTLMLGLWSTAVSFCSRQRPLAVVARVLGVMGTISAGFLLFLLFASNPFLRLLPPAMEGRDLNPLLQDPGMVFHPPLLYMGYVGFSVTFAFAVAALLAGRADAAWARWSRPWTTVAWALLTLGIMLGSAWAYYELGWGGWWFWDPVENASFMPWLAGTALMHSLAVTEKRGAFRAWTVLLAIFTFSLSLLGTFLVRSGVLTSVHAFAVDPKRGIFILALLGLVTGLSLTLYGWRAPRLARRVEFSVAARESLLLANNVLLAVAAATVLLGTLYPLLLDVLGLGKISVGPAYFEQVFVPLMAPAVLLMGAAPLARWRHGGLPDMARRLRWAAAASIVVGLGLLLVQRNASALAGLGLVLAAWCGLSAVASLSTRLRNQQGRRLAALRQLPASYWGMLLSHAGVGVFIAGVTLVSSQESLRELPMRVGHNISVGGYSFRFDGVTQAAGPNYDALRGTLSVSRHGKIVAVLAPERRIYRSQDMPTTEAAIDSGLTRDLYVALGEGVGDGGWAVRIHVKPFVDWIWAGCILMALGGLLAVCDKRYRLRRRAPAPQAETVDAPKAPALALSTAEETRA

SEQ ID NO: 68022 - DNA, 2001 bp, Chara vulgaris
  CDS (1)..(2001)
atgtatgttgaaataggtcattattttttcattcttagcatttttgttgcattagcctacaaaaaaaagaatctatctttttttttttcactttactttctcgttttaaccatctgtttttttagctttttgttttgttatgtttcttctgatttctctatttatagcgtttttacaaattcaaataatcaattaccattgttttataaagtttctggaacttggtcgaatcatgaaggtagtctcttattatggtgttggatcctgagtctttatggttttttcttttgttttcgaactcgcaacgaagttgccttgactggtgcccctcttatgattcacaaatggattgctttatttttctctgtttttttatgtttaacctccaatccttttcttcgaatttcctttttaagcactgattcgggaaaagaattcaaccctgtactacaagaccccgtattggctatacatcctccttgtatttatgcaggatacgttgccagtactattggtttttgtttatgtgtatccggaactcaacaaaaaaaacacactgcgcgtgaaatcaatgaaagtgggaagctgaaagatcactgtggaaaaagaaaggcagtgatcttacgttctgtgcttcgcaccataacgcgacctcttggaagtgcctattggaaactgatacgaatttggattttaacgtgctggtgttttttaactgtaggaatactactgggaagttggtgggcttatcatgagctaggttggggcggttggtggttttgggatcccgtagaaaatgcatctttgatgccttgggtattagctacagcttgtattcattcagtcatttcatttcggttgaattcttggaccttctttctaaacattgttacttttttattcagtcttttaggtactttttttgttcgttcgggattacttgcatctgttcatagctttgccacagattcgcaacgaggaatctttttattaagttttttttttatggcaagcctatctcttttaaaaaagaatagaacgactggcgcctacgatcacctatctgaaatcgaacagattctcaaactacagctaacgctcctttgtataatttgtttggttgttctctgtggtaccgcggcacctgtgctttttcatctattagctcaaagagaagtttccactggtgctcctttctttaatggtactataatacctatttttatttgtttactacttgttttagtttatatacattacagaagtgcacagcaagcgcacagcaatcacagtgtgtttttgtgtgttttatttattattcatgtaattttcatcaagttaattgcagatttgtcgtatctagagtctttctgctgtgctctttgtttttctctctttttcagtttctttttgttcaaaccttctgcaccaatgaatatgattttgtcacatggaggagtttgtattttgattacaggtgttatcttatccaatacaaaaaagatacaaattactcaaatcatgcactttggttttgaacaaaatataggcaacggaaggttgtgttgtttacgaagtattgatcaattacatggacctacttttcaatccatttgtggaaacatagcatgtgtttctaatcatgacaccaaggctgcgatagcagcgcatcattactttgaaaaagtgatctcttgcgtgcaaagcactgatttagcaagtgatttgacgcgtagtgttgatagctttgttatgtttccagaaaaaagattctgtttttcgaatccagaaaccagtactactaaagtggctatacataccaactttttcacagatctctatgctttgataggaactggaagttttgaaactggttggtatactaccataatgaagttacctttcattttttgtatttggataggttttgttttggcttcttttggaggtttccgaagtttaatacgtcagctttcaaaacaaaaactgaattggaattaa

SEQ ID NO: 68023 - protein, 666 aa, Chara vulgaris
MYVEIGHYFFILSIFVALAYKKKNLSFFFSLYFLVLTICFFSFLFCYVSSDFSIYSVFTNSNNQLPLFYKVSGTWSNHEGSLLLWCWILSLYGFFFCFRTRNEVALTGAPLMIHKWIALFFSVFLCLTSNPFLRISFLSTDSGKEFNPVLQDPVLAIHPPCIYAGYVASTIGFCLCVSGTQQKKHTAREINESGKLKDHCGKRKAVILRSVLRTITRPLGSAYWKLIRIWILTCWCFLTVGILLGSWWAYHELGWGGWWFWDPVENASLMPWVLATACIHSVISFRLNSWTFFLNIVTFLFSLLGTFFVRSGLLASVHSFATDSQRGIFLLSFFFMASLSLLKKNRTTGAYDHLSEIEQILKLQLTLLCIICLVVLCGTAAPVLFHLLAQREVSTGAPFFNGTIIPIFICLLLVLVYIHYRSAQQAHSNHSVFLCVLFIIHVIFIKLIADLSYLESFCCALCFSLFFSFFLFKPSAPMNMILSHGGVCILITGVILSNTKKIQITQIMHFGFEQNIGNGRLCCLRSIDQLHGPTFQSICGNIACVSNHDTKAAIAAHHYFEKVISCVQSTDLASDLTRSVDSFVMFPEKRFCFSNPETSTTKVAIHTNFFTDLYALIGTGSFETGWYTTIMKLPFIFCIWIGFVLASFGGFRSLIRQLSKQKLNWN

SEQ ID NO: 68024 - DNA, 1983 bp, Rhodopseudomonas palustris CGA009
  CDS (1)..(1983): transl_table=11
atgatcgccgaggccgggcactacgcactggttctggcgctggctctggcgctgatccagtccaccgttccgctgctcggcgcccggctcaatgacggcgcgctgatgaatgtggcgcgctcgaccgcgctggtgcagctgttgttcgccggcctgtcgttcaccgcgctggtgtggctgcacgtcacctccgacttctcggtggtgaacgtgtacgagaactcccactcgatgaagccgctgctctacaagatcaccggcgtgtgggggaaccacgaaggctcgatgctgctgtgggtcgcgatcctggcgctgttcggcggcctggtcgcggcgttcggcaacaatttgccgctgtcgctgcgcgcccacgtgttggctgttcagggctgggtcgcaaccgcgttctatctgttcatcctgatcacctcgaacccgttcgcgcggattgccaatgcgccggccgagggccgcgatctcaacccggtgctgcaggatatcggtctcgcggtgcatccgccgatgctgtacctcggctatgtcgggttctcgatttcgttctcgttcgccgccgctgcgctgatggaaggccggctcgacgccgcctgggctcgctgggtgcggccgtggacactggtcgcctggatcttcctcaccctcggcatcgcgatgggctcgtattgggcctactacgaactcggctggggtggctggtggttctgggacccggtcgagaacgcctcgctgatgccgtggctcgccggcaccgcgctcttgcactcggcgctggtgatggagaagcgcaacgcgctgaaggtctggaccatcctgctgtcgatcctgaccttctcgctgtcgctgctcggcaccttcctggtgcgctccggcgtgctcacctcggtgcacgccttcgccaccgatccgtcgcgcggcgtgttcatcctgatcatcctgtgcgtgttcatcggcggcagcctgacgctgtttgcctggcgggcctcgtcgctgaagcagggcggcctgttcgcgccgatctcgcgcgaaggctcgctggtgctgaacaatctgttcctcaccaccgcctgcgccaccgtgttcgtcggcacgctgtatccgctggcgctggaagtgctgaccggcgacaagatctcggtcggcgcgccgttcttcaatctcaccttcggcccgctgatggtgccgctgctggtcgcggtgccgttcggcccgctgttggcctggaagcgcggcgatctggtcggcgccgcgcagcggctgatcgccgccggcgtggtggcgctgctggcggtcgccttcgtatatgcctgggtccatggcggcgcggtgctggcaccgctggcgatcgggcttgcggtgttcgtcatcatcggcgcgctggttgacatcgccgagcgcattgcgctgttccgcggtccgctgtcgatctcgctgcgccgcgcctccggcctgccgcgctcggcctggggcacgatgttcgcccatgcggcgctcggcgtgacgctgatcggcatcgtctgcgagaccacctggaacagcgagtacatcgccgcgatgaagccgggcgacagcaccaagctcgccggctacgagttcaagttcgaaggcgccaatcagcgccagggaccgaactatcgcgagttgctgacgcagttcacggtgaccgagaacggccggctggtcggcggcatggcgccgtcgaagcgcagcttcatcacccgcggctcctccaccaccgaggcggcgctgctgacccgcggcttcagccagctctacatctcgctcggcgatctcaacgaccagggcgcggtgacggtgcggatctatcacaagccgatggtgctgctgatctggttcggcccgatcctgatggcgctcggcggcctgctgtcgctgtccgatcgccgcttgcgggtcggcgcgccgaagcccgccaaggcgccgcgcgtgctgcagccggccgagtag

SEQ ID NO: 68025 - protein, 660 aa, Rhodopseudomonas palustris CGA009
MIAEAGHYALVLALALALIQSTVPLLGARLNDGALMNVARSTALVQLLFAGLSFTALVWLHVTSDFSVVNVYENSHSMKPLLYKITGVWGNHEGSMLLWVAILALFGGLVAAFGNNLPLSLRAHVLAVQGWVATAFYLFILITSNPFARIANAPAEGRDLNPVLQDIGLAVHPPMLYLGYVGFSISFSFAAAALMEGRLDAAWARWVRPWTLVAWIFLTLGIAMGSYWAYYELGWGGWWFWDPVENASLMPWLAGTALLHSALVMEKRNALKVWTILLSILTFSLSLLGTFLVRSGVLTSVHAFATDPSRGVFILIILCVFIGGSLTLFAWRASSLKQGGLFAPISREGSLVLNNLFLTTACATVFVGTLYPLALEVLTGDKISVGAPFFNLTFGPLMVPLLVAVPFGPLLAWKRGDLVGAAQRLIAAGVVALLAVAFVYAWVHGGAVLAPLAIGLAVFVIIGALVDIAERIALFRGPLSISLRRASGLPRSAWGTMFAHAALGVTLIGIVCETTWNSEYIAAMKPGDSTKLAGYEFKFEGANQRQGPNYRELLTQFTVTENGRLVGGMAPSKRSFITRGSSTTEAALLTRGFSQLYISLGDLNDQGAVTVRIYHKPMVLLIWFGPILMALGGLLSLSDRRLRVGAPKPAKAPRVLQPAE

SEQ ID NO: 68026 - DNA, 2190 bp, Leptospira interrogans serovar Copenhageni str. Fiocruz L1-130
  CDS (1)..(2190): transl_table=11
atgaatgatttcggcgctctttgcatcataacgtcttttgcgatccttatattttcgatcgtacaaacttcttacggaatttggaaacaagacaaacaggtaatcgaactcggtagatatactttgatggcaaattccgccatcatccttttagcttttatcgtcttactcgttcaacttttcagaaccgatctttctaattactatgtggtaatgcattccaacgaacacttacctttattttatagacttaccggaatttggtccggttcctccggttccttacttttttggaatcttttactttcactttttacattcatcgttctttggcaaacaaaggatctaacccaagatagaattcctgtcttaaatttaacgttagccgtcatatctgcttttttttcttatcttgctgtattttatccggatgcccaaccatttcgagaatttcaaccggcggcagttgccggcagaggattaaatcctcttttacaacactgggccatggtcatccatcctccgattctttatgtgggttacgtaagttttgcgattccttttgcaattgcagcctcggctttaatcacaggacatctttccgaaaattggtttcgttttgttagaaggtggactatcttttcttggttttttttaggaaccggaattctactcggttccaaatgggcttacgaagaattaggttggggaggttactgggcctgggatcccgtagaaaacgcttctcttatgccctggcttttatccactgcatttcttcattctatgatcatccaagaaagaagaggtatgttaaagttttggaatatgcttttgatcatactcgcttttcatttttgtttattaggaacttggatcacccgaagtggagtactcgaaggtcctcatagtttttccaagtccacaatcggcaccccgttcatcatctacatcggaattagttttttcttctttttaggatttttaatctaccgcagaaattctctaaaacccgagcgcaatctggaggcaatgacctctaaagaaggcagttttctttttaataacttcctacttgtaatcgctactcttgcgattcttttaggagttttttctcctcttctttatggaagagaatttaaagctccttggttcaactcttggggagttccagtgggaatccttttgatccttttgatgggttcggcaccacttctcgcttggagaaaaagcgcggacaaaatttttttctcgaccctcctcaaaccgttgttagtcggaattgcaggagctggaatgtacattttattttatactaaaaactttacgattagcgaatacagtttaggcgacgtattaggggaaatttattcagtgatcgcggttggtctcggaatttttacgactgccggaattgtacaggaatatcatagagggatcatcgccagaaaaactgcgtatccaaacgagaattattttttttccggatttaggatgcttttaaaaaataaaagaagatacggaggttacctagttcacttggcgatggtgatactttttataggttatgcagggaacgcgtttaaacaaaacacatccattaagtttttctacttcttgaacgcacccgaaaaaaacgaaatcgtctattcgagtcaggatacgggagttctcggaaactatcagatctcggcaaacactctgaagatcaaacctctcgtcaacggagacgcaaagaacggactcaacattcaaaacgtgatcgtttctcacgaagcaacctttcaagtaaaacggaatctaaaagaattttctacaatggttacagaaagaagattttatccacaaatctctcacttaagcggagactttgaaactcatatccctacaagcgaacccgcaatttcttccactcctaaagaagacttatacattcaactcggggctatcgaacattccgatctttccgatgaaaatccagaccttcctatactttttatgaattatctttttacaaatgagaatcagccagttcgtaaattggaaaacttcaatcgatttccaagacaactcgtagccaacttagaagtctgggtaaaccctctggtaaaatttatttgggtgggttcattgttatttttcttttcggggctattaattcttctcccgatcggagaatccagatcatga

SEQ ID NO: 68027 - protein, 729 aa, Leptospira interrogans serovar Copenhageni str. Fiocruz L1-130
MNDFGALCIITSFAILIFSIVQTSYGIWKQDKQVIELGRYTLMANSAIILLAFIVLLVQLFRTDLSNYYVVMHSNEHLPLFYRLTGIWSGSSGSLLFWNLLLSLFTFIVLWQTKDLTQDRIPVLNLTLAVISAFFSYLAVFYPDAQPFREFQPAAVAGRGLNPLLQHWAMVIHPPILYVGYVSFAIPFAIAASALITGHLSENWFRFVRRWTIFSWFFLGTGILLGSKWAYEELGWGGYWAWDPVENASLMPWLLSTAFLHSMIIQERRGMLKFWNMLLIILAFHFCLLGTWITRSGVLEGPHSFSKSTIGTPFIIYIGISFFFFLGFLIYRRNSLKPERNLEAMTSKEGSFLFNNFLLVIATLAILLGVFSPLLYGREFKAPWFNSWGVPVGILLILLMGSAPLLAWRKSADKIFFSTLLKPLLVGIAGAGMYILFYTKNFTISEYSLGDVLGEIYSVIAVGLGIFTTAGIVQEYHRGIIARKTAYPNENYFFSGFRMLLKNKRRYGGYLVHLAMVILFIGYAGNAFKQNTSIKFFYFLNAPEKNEIVYSSQDTGVLGNYQISANTLKIKPLVNGDAKNGLNIQNVIVSHEATFQVKRNLKEFSTMVTERRFYPQISHLSGDFETHIPTSEPAISSTPKEDLYIQLGAIEHSDLSDENPDLPILFMNYLFTNENQPVRKLENFNRFPRQLVANLEVWVNPLVKFIWVGSLLFFFSGLLILLPIGESRS

SEQ ID NO: 68028 - DNA, 1932 bp, Thermus thermophilus HB27
  CDS (1)..(1932): transl_table=11
atgaccccggcccttctcggcaacctcggcgtgagcctggccctggcctttagcctcctgggcctgggcctcgccctcctcgcctacctccagggggacgggcgcttcctaaggggggcgcgggccctcgtgtttcctgccttcctcgctgcgcttgccgccttcctcgccttggagtgggccctcctcgtccacgacttcagcctggcctacgtggcgaggaaccactccaccaaggaccccctctgggtgaccctggtgaccccgtgggcggccctcgagggcagcatcctcctctggggcctcctccagaccctctacaccctgctcgcaagccgcaaacccttggacccctggcgggcctccctggtcctcgccgtgctcttcggcatccaggtcttcttcttcggagtcatggccaccatcgcgagcccctttgagaccctgcccgacccgcctcccgacggcgtgggcccgaaccccctcctccagaaccactggatgatggccgtccaccccgtcctcatgtacctgggtttcgtgggcctgagcgtgccctacgcctacgcggtggcggccatggccacccggcgctaccagacctgggtggaggagaccaggtggtggaccctcatcgcctggggcttcctcaccgcggggaaggtggcggggatgtggtggagctacgaggtcctgggctggggcgggtactgggcctgggaccctgtggaaaacgccagcttcatcccctggctcctcgccacggccttcctccacacggccttcgtccagcagacccggggggccttcaagacctggaacttcgccttcgtgaccctggccttcgccgccacccttctcggcaccttcctcacccgaagcgggatcatccagtcggtccacgccttcgccgagggccccgtggggcccgccttcctcggcttcttcctctttgccacgggccttggcctcggcctcctctcccgggtctcccgggaggtgcgggacgccgcccttttccaccctctctcccgggagggggcgcttctcctcggggccttcttcttcgcgggctgggccctcgtggtcgtcctcggcaccttctacccccttcttgtggaggccttcaccggggccaaggtgagcgtgggggcccccttcttcaaccaggtttccgcccccctgggggcggggatcctcctcctcatgggggtggggcccctcctcccctggcgcagggcccggggggaggtcttgcggaacctcctcgtccttctcctcgccctcgccttggggaccctattcggcctcctccggggctacaccttgggggcctccttcgccttggggctcttcctctacaacgccgccgccatctacctcctggcccgggagggggttttggcccgggtgcgggcggggctttccccctggggcttcttggcgaaccgcaggcgggtgggaagcctcgtggtccacttcgccgtggccctcatggggcttgccatcgccttcagccagacctaccgcctggagagcgagaagaccctctaccggggagaggcctgggaggtggggggcgtgcgcatgaccttccagggggtgcgggccttggacgaggggcggcgcttcgccgtggaggcccttctaaagaccgaccgcttcggggaggtcaggcccaggctccacttctacccccagatgaatagcccccttcccgcccccaaggtcatttacaccccggggaacgactactacttcctcctcatggactttgaccgggaaaagggggagtgggcctccctaaggctcatcgtcacccccttggtcttctggatgtgggtggcgggggggcttatggccctgggcaccctttacatcctctggcccgcggcgaggccggaggaagctaggggggtgagcccggcgtga

SEQ ID NO: 68029 - protein, 643 aa, Thermus thermophilus HB27
MTPALLGNLGVSLALAFSLLGLGLALLAYLQGDGRFLRGARALVFPAFLAALAAFLALEWALLVHDFSLAYVARNHSTKDPLWVTLVTPWAALEGSILLWGLLQTLYTLLASRKPLDPWRASLVLAVLFGIQVFFFGVMATIASPFETLPDPPPDGVGPNPLLQNHWMMAVHPVLMYLGFVGLSVPYAYAVAAMATRRYQTWVEETRWWTLIAWGFLTAGKVAGMWWSYEVLGWGGYWAWDPVENASFIPWLLATAFLHTAFVQQTRGAFKTWNFAFVTLAFAATLLGTFLTRSGIIQSVHAFAEGPVGPAFLGFFLFATGLGLGLLSRVSREVRDAALFHPLSREGALLLGAFFFAGWALVVVLGTFYPLLVEAFTGAKVSVGAPFFNQVSAPLGAGILLLMGVGPLLPWRRARGEVLRNLLVLLLALALGTLFGLLRGYTLGASFALGLFLYNAAAIYLLAREGVLARVRAGLSPWGFLANRRRVGSLVVHFAVALMGLAIAFSQTYRLESEKTLYRGEAWEVGGVRMTFQGVRALDEGRRFAVEALLKTDRFGEVRPRLHFYPQMNSPLPAPKVIYTPGNDYYFLLMDFDREKGEWASLRLIVTPLVFWMWVAGGLMALGTLYILWPAARPEEARGVSPA

SEQ ID NO: 68030 - DNA, 1896 bp, Desulfovibrio vulgaris subsp. vulgaris str. Hildenborough
  CDS (1)..(1896): transl_table=11
atgcacctttccgcctacctgcttctcgtagcctcgctgctgttcgcgctcttctttgcgggcacggcggccatacagatatggcagggcagaaccacggcgctgccgtggatggagaaggggcacctcatgctcaccgcgttcatgtcggtggcatcagccgtgcttcttcatgcccttgcgaacttcgacttctcgctggtgtacgtcgccagctacaccgacagggcattgcccctgttctaccgtctcaccgcattctgggctgggcaggccgggtccatgctcttctggggctggtcggtcgcgctgttcggtgtgttcttcctcttctcccccgtctatcggcgtgtgagcgaaccgacccgcatgtggttctggttgctctttctcgccatgatgggcttcttcctgctggttctcacctgctggagcaaccccttcaccgtggtcgaccccgccccggcggacggcaacggcctgaacccgctgctgcagaaccccggcatgatcttccacccgccgctgctcttcctcggctacggcggcttcgccattcccggctgtcttgcgctggcacagtcgctgagcggcatgcgtctctccgaaggcgcatgggcggaccatgcacgtcccttcacccttgttgcgtggctcttcctcaccgccggcatcgtgcttggcggctggtgggcctacatggaactcggctggggcggctactgggcatgggacccggtcgagaacgcatcgctcatcccgtggctcatcgcctccgcgtacctgcatacggccgtcatcgaggcccgacgcaacaagctgcaccgtgtgaacaccttcctgatggccctgacgaccatctccgccttcttcgcgacctatctggtcagaagcggcgtggtcgaatcgctgcacgccttcggcgacggcggcgtgggcactcccctgctcatcttcatcatcgtcttcaccgcggtcgccctcggtggctccatcctgtggaaacacccggatgccaagcccctttcgggtgtcgaaagccgcgagggctttctcgtgatggtcgcgtgggtgctgcttgccctcggtgccatcatcctcgtcgccaccatgtggcccgtgttcagcaagttctgggtcgacaagcccgtggggctggaaccggcgttctacaaccgtgtgtgcctcccgctcttcgccgtgctggtcgtcatgctcgccatatgcccttggcttggctggaagggcggcctgcgcaacaaggtgggtgccgtcacggcactgggtctcttcgtcggggccgctggcggcatatgggccgctggctacaccatccccaccgcagtcctcggtgcagccggtgccatcgcggcccttggcggcattgtcatgctgctggcgaccgaaccgcacctgaggcgctcgccgcagtctctggccgcctacggcgtccacatcggccttgcgctcaccgcccttggcgtggccttctccggcccgtacaagaccgagcatgaggtcatcatgcagcagggcgacaccgtgcaggtggccggatacgacgtgaccttcaaggcgttgtacgagggcgaaggccccggctacatcttcatcgaggccgaactcgacgtgaagaagaacggctccgatgtgggcatggcccagccgcaacgccgcatctactccaagttcggcaagcaggcgttcgccgaggcgtcgaccattccgggtctcggcaacgaattctatgccgtactgcttggcgtcgaccgcgaaggcaaggccaccctgcacctcaacgtcaccccgctgatcaactgggtctggataggcagcatcatcatgtgcctgttccccttcatcgggatgcgtcgccggaagacagcggaggcgtga

SEQ ID NO: 68031 - protein, 631 aa, Desulfovibrio vulgaris subsp. vulgaris str. Hildenborough
MHLSAYLLLVASLLFALFFAGTAAIQIWQGRTTALPWMEKGHLMLTAFMSVASAVLLHALANFDFSLVYVASYTDRALPLFYRLTAFWAGQAGSMLFWGWSVALFGVFFLFSPVYRRVSEPTRMWFWLLFLAMMGFFLLVLTCWSNPFTVVDPAPADGNGLNPLLQNPGMIFHPPLLFLGYGGFAIPGCLALAQSLSGMRLSEGAWADHARPFTLVAWLFLTAGIVLGGWWAYMELGWGGYWAWDPVENASLIPWLIASAYLHTAVIEARRNKLHRVNTFLMALTTISAFFATYLVRSGVVESLHAFGDGGVGTPLLIFIIVFTAVALGGSILWKHPDAKPLSGVESREGFLVMVAWVLLALGAIILVATMWPVFSKFWVDKPVGLEPAFYNRVCLPLFAVLVVMLAICPWLGWKGGLRNKVGAVTALGLFVGAAGGIWAAGYTIPTAVLGAAGAIAALGGIVMLLATEPHLRRSPQSLAAYGVHIGLALTALGVAFSGPYKTEHEVIMQQGDTVQVAGYDVTFKALYEGEGPGYIFIEAELDVKKNGSDVGMAQPQRRIYSKFGKQAFAEASTIPGLGNEFYAVLLGVDREGKATLHLNVTPLINWVWIGSIIMCLFPFIGMRRRKTAEA

SEQ ID NO: 68032 - DNA, 1989 bp, Bartonella quintana str. Toulouse
  CDS (1)..(1989): transl_table=11
gtgcttgttgaactgggtcatatttttttagccgcagcgtttgcagtgagtttaatgcaggcatttttacctgctttgggtgtttggtgggaggatcattcattgatgcgaacagcagttcccttcacctatattacttttacattattgctcttatcttttttgattattgttcatgcccatatggtatctgatttttctgttttaaatgttgttgagaatagccattctgaaaaaccaatgctttataagatcactggtgtttggggaaatcacgaaggatccatgttgttatgggttttaagtcttgcttttttcagtacattgatggcattatttagccaacatttaccagaacagtttaagacattaattttggtttgccaaagttggattataagtgcctttcttgtatttgttctttttttatcgaatccatttttacgtattaatccaccggcattgcagggaaatgatctcaatcctcttttgcaagatatcgctttagcaattcatccaccacttctttatttaggctctgtcggtttttctctttgtttttcttttgcagtagctgcattggttatgggacatgtcgatgggcgttgggcgcattgggttcgtccttggcttcttcttgcttggtgttttttgacactaggcattatggttgggtcctattgggcttattatgagttaggatggggtggttattggttttgggatccagttgaaaatgcttcgtttatgccctggctttcaggaacagcttttttgcattctgctcttgttctggaaaagcgggaaacattaaaaagttggactttatttttggcacttcttactttttctctttctcttatgggaacttttcttgttcgttcaggtcttttagtatctgttcacagttttgccattgatccagcacgtgggcgggcaattcttgcacttttattctttttcaccggaggagctttttttctctttgctttgcgcgtacccgttttaaaagcaggtagattatttcggccaatttcacgtgaaggttttattgttttaaataatctcttgcttacaacaataacagcgacagtattgattggtacgctctatccttattttattgaggcattgactggaaaaaaaatttctgtaggtgccgctttttttaacattacctgtggtcctttaatgatattattgttgttgttggttccgtttggatcaatgatggtatggaaaagcggtgattttcttgcggtttttgaacggttgtggtttgtttgcgtattagcctgtgtagcctgttttataacgttttatgcaacatctttgcgtgatatttttgcagctttaggagtaggactttcagtttttgtttttttaggcagtttagctgatctttggaagaaaagtggacatcacaagttagctttgtcggtgcggtttaagagatttattggattgccatggtcagtttttggtgcagcaatggcacatatgggattagctgttacattgtttggtattgtctgtgttgcgacttttgctcaagagcgtattttaaccatgcacataggagatagggttacaatagcgggtaaaactatttgctttgacaaagtgcatgaaagcgccggtccgaattattctgcaatggagtttaattttacagtctatgaaaacaaacatgcagtccgcaacgtaatagcatcaaaacgtttctattcaagccagaacatatcaacaacagaagttggtattcaaaatcatggcttattatcccaattatatattgcaccgggccatatagatgatcaagggcttgttgtgcatctatggtggaagccttacgtgatttgtgtatggttaggggcaataatgatggctatgggggggtgtttttctctttttggttattggtttcgcattgggttgcatcgacggatagcttcccgcttcaagttttctgaaaaggctttgagatga

SEQ ID NO: 68033 - protein, 662 aa, Bartonella quintana str. Toulouse
MLVELGHIFLAAAFAVSLMQAFLPALGVWWEDHSLMRTAVPFTYITFTLLLLSFLIIVHAHMVSDFSVLNVVENSHSEKPMLYKITGVWGNHEGSMLLWVLSLAFFSTLMALFSQHLPEQFKTLILVCQSWIISAFLVFVLFLSNPFLRINPPALQGNDLNPLLQDIALAIHPPLLYLGSVGFSLCFSFAVAALVMGHVDGRWAHWVRPWLLLAWCFLTLGIMVGSYWAYYELGWGGYWFWDPVENASFMPWLSGTAFLHSALVLEKRETLKSWTLFLALLTFSLSLMGTFLVRSGLLVSVHSFAIDPARGRAILALLFFFTGGAFFLFALRVPVLKAGRLFRPISREGFIVLNNLLLTTITATVLIGTLYPYFIEALTGKKISVGAAFFNITCGPLMILLLLLVPFGSMMVWKSGDFLAVFERLWFVCVLACVACFITFYATSLRDIFAALGVGLSVFVFLGSLADLWKKSGHHKLALSVRFKRFIGLPWSVFGAAMAHMGLAVTLFGIVCVATFAQERILTMHIGDRVTIAGKTICFDKVHESAGPNYSAMEFNFTVYENKHAVRNVIASKRFYSSQNISTTEVGIQNHGLLSQLYIAPGHIDDQGLVVHLWWKPYVICVWLGAIMMAMGGCFSLFGYWFRIGLHRRIASRFKFSEKALR

SEQ ID NO: 68034 - DNA, 1986 bp, Bartonella henselae str. Houston-1
  CDS (1)..(1986): transl_table=11
gtgcttatcgaactggggcatctttttttatccgcagcttttgcagtgagtttattaggggcttttttacccgttttagtttttttgtggggagagcgttcattaatgcaaacagctgttcccctaacatatattacttttacattattattcttatcttttttgattattgttcatgcccatattgtttctgatttttctgttttgaatgtggttgagaactctcattcagaaaagccaatgctgtataaaattattggtgtttggggaaatcacgaaggatctatgttgttatgggttttaagtctcgctttttttagtacattggtggcgttgtttagccagcatttgccagaacagcttaaggcacttattttagtatgccaaagttggatgacaagcgcttttcttttatttattctttttatgtccaatccatttttacgtgttaatccacccgccttgcaaggaaaagatctcaatcctcttttacaggatatcgcgttagcaatacatccaccacttctttatttaggttatgttggtttttcactttgtttttcttttgcagtagctgcattgattatgggatatgtcgatagactttgggcgcgttgggttcgtccttggcttctacttgcttggtgttttttgacattgggtattatggttgggtcctattgggcttattatgagttaggatggggtggttattggttttgggatccagtagaaaatgtttcgtttatgccttggctttcaggaacagctcttttacattccgctctcgctcttgaaaaacggggaatattgaaaagttggactttatttttgtccattcttactttttccctttctcttatgggaacttttcttgttcgttctggtcttttaatatcagttcatagttttgctcttgatccagcacgaggacgagcaattcttgcacttttattgtttttcacgggaggggctttgtctctttttgctttgcgggtacctgctttgacaccgggaagattttttcagccaatttctcgtgaaggttttattattttaaataatttattgctcacaacaataacagcgacagtcttgattggtacgctctacccttattttattgagctgttaacagggcaaaaaatttctgtaggagcagatttttttaaccttacctgtgggcctttaatgatgttattgttattattggttccatttggatcaatgatagcgtggaaacgcggtgattttctcgcagtttttgaacggctgtgggttgtttttgcattagtcgctatagtttgttttatcacattttatgtagtttctttgcgtgatatttttgccattttaggaattggactttcaacttttgttttcttaggtagtttagctggtctttgggcgaagagcggacatcgcaaaatagctttattagcacggtttaaaagatttattggattaccatggtccgtttttggtgcagcaatagcgcatatgggattaggtgttacattgtttggtattatctatgtcgcaacttttgggcaagagcgtattctcatcatgcataaaggagatatggtaacgatagcagataaaactcttcatttgaatgaagtgcatgatgaaactggcccgaattattcagcaatagagtttcattttacaatatatgaaaataaaaatacggtgggtaatgtaacagcatcaaagcggttttatccaagtcaaaatacatcaacaacggaagttggtattcaaaatcatggtttatctcagctctatattgttccaggacggatagatgaacgagggcttgttttacatatatggtggaagccttacataatatgtgtttggttaggggcattgatgatggctatgggcggatgtttctctctttttagttattggtttcgcattagagtgcatcaacggagagtctcccgctttaaattttctgaaaaggcattgagatga

SEQ ID NO: 68035 - protein, 661 aa, Bartonella henselae str. Houston-1
MLIELGHLFLSAAFAVSLLGAFLPVLVFLWGERSLMQTAVPLTYITFTLLFLSFLIIVHAHIVSDFSVLNVVENSHSEKPMLYKIIGVWGNHEGSMLLWVLSLAFFSTLVALFSQHLPEQLKALILVCQSWMTSAFLLFILFMSNPFLRVNPPALQGKDLNPLLQDIALAIHPPLLYLGYVGFSLCFSFAVAALIMGYVDRLWARWVRPWLLLAWCFLTLGIMVGSYWAYYELGWGGYWFWDPVENVSFMPWLSGTALLHSALALEKRGILKSWTLFLSILTFSLSLMGTFLVRSGLLISVHSFALDPARGRAILALLLFFTGGALSLFALRVPALTPGRFFQPISREGFIILNNLLLTTITATVLIGTLYPYFIELLTGQKISVGADFFNLTCGPLMMLLLLLVPFGSMIAWKRGDFLAVFERLWVVFALVAIVCFITFYVVSLRDIFAILGIGLSTFVFLGSLAGLWAKSGHRKIALLARFKRFIGLPWSVFGAAIAHMGLGVTLFGIIYVATFGQERILIMHKGDMVTIADKTLHLNEVHDETGPNYSAIEFHFTIYENKNTVGNVTASKRFYPSQNTSTTEVGIQNHGLSQLYIVPGRIDERGLVLHIWWKPYIICVWLGALMMAMGGCFSLFSYWFRIRVHQRRVSRFKFSEKALR

SEQ ID NO: 68036 - DNA, 1878 bp, Erwinia carotovora subsp. atroseptica SCRI1043
  CDS (1)..(1878)
ttgatgttgttattgccagagtttgggtatgtgtcgctgttactggcggtttgcgtcggtgtggcaacagcattgctgacattttcaggctacaccctgcgctggtcgggcacttaccgactggcgcggtgctggacgctggtgctgtttggtctcgtgctgttcgcgtttgtcgcgctgacgttgagcgtggtgcaggatgatttttctgttaattacgtcgctcagcatagccaccgtgatttaccgctggggctcaaaattgcggcggtctggggcgggcatgaaggttcgctgctgctgtggctcttgtgtttatccggctggagcgccacatttgcctgccgctatcgcaaggcgatgagcgatctgttcccgctgacgctggcgatgctcgcggtgattgcgaccgcattgctggtattcattgtgtttttttccgatccttttgtgcgcctcttcccgcctgcggtggcggggagggatctcaacccgatgttgcaacatattggcctcattctccatccaccgttgctctatctaggctatggcggcttaaccgtgagtgcggcactggcgttagctgccctgattcacggcgagtttactgcaccagccgcctggatttgctggcgttggacgctgcccgcctggagcctgttgacgctgggaatcattttgggatcgtggtgggcttataacgagctgggctggggaggatggtggttctgggatccggtagagaacgcctcgttgcttccgtggttaacggctagcgcattgcttcacagtctgtctgtcactcgaatgcgcggtatcttccgccattggtcgctgatattggcgctgttgacgttcattttatgcctgctggggacgctgattgttcgttccggaatactggtttctgtccatgcctttgccctcgaacatgatcgcgcggtacctttatttatcttgtttgcctgcttaagcatggctgcgctggctgtttatggctggcgtgctcagcttgtccattccgcagcccgcttctctggctggtcacgggaaatggcaatactgctggttttgttgctattcagtgccgtcgcgctggtggtactactcggtacgctttatccgatgatttatggactagcgggctgggggaaaatctcagtaggcgcaccctattttaaccgcgtgctcttgccctttgctggcttgatgctgttgctcattggcgttgcggcgggaggctactggaaacgcagtacgcggtggcctgtctggcacttaggcgtgacgctggcagtcggtgtcgtcaccgctctggtcttatggccgtatggatacgatgtggcgctggcttccggtctgatcggctgggtgatggctgcgcagtggctacagccgctgttggcgctacgccagcagcttccagcgctgttagcacatacgggcgtggtgctgtttgccttggggattgcgttctctgcggggagcaagcaggaaattagcgccaatgtgggtcagggagaacaggtcacgctgggtgactatcaatttcattttttacagctggatttagtggcggcgcagaattacaccgcagagcaggccgtgattgcgatttatcgtggcgactcgccgatcgcccgcgtcatcccagaacggcgttattacaatgcacgcaaacagcagatgattgaaccgggtattgcctggggaccaatcagagaatggtatgccgtgatgggagaaaaaaccggcgaaaaccgctatgcgatgcgtttctatgtgcaaaccggtgttcgctgggtgtggggcggcggcatgctaatggttgcgggcgcactgctgggatggttccgagggagaagggtctatgactaa

SEQ ID NO: 68037 - protein, 625 aa, Erwinia carotovora subsp. atroseptica SCRI1043
MMLLLPEFGYVSLLLAVCVGVATALLTFSGYTLRWSGTYRLARCWTLVLFGLVLFAFVALTLSVVQDDFSVNYVAQHSHRDLPLGLKIAAVWGGHEGSLLLWLLCLSGWSATFACRYRKAMSDLFPLTLAMLAVIATALLVFIVFFSDPFVRLFPPAVAGRDLNPMLQHIGLILHPPLLYLGYGGLTVSAALALAALIHGEFTAPAAWICWRWTLPAWSLLTLGIILGSWWAYNELGWGGWWFWDPVENASLLPWLTASALLHSLSVTRMRGIFRHWSLILALLTFILCLLGTLIVRSGILVSVHAFALEHDRAVPLFILFACLSMAALAVYGWRAQLVHSAARFSGWSREMAILLVLLLFSAVALVVLLGTLYPMIYGLAGWGKISVGAPYFNRVLLPFAGLMLLLIGVAAGGYWKRSTRWPVWHLGVTLAVGVVTALVLWPYGYDVALASGLIGWVMAAQWLQPLLALRQQLPALLAHTGVVLFALGIAFSAGSKQEISANVGQGEQVTLGDYQFHFLQLDLVAAQNYTAEQAVIAIYRGDSPIARVIPERRYYNARKQQMIEPGIAWGPIREWYAVMGEKTGENRYAMRFYVQTGVRWVWGGGMLMVAGALLGWFRGRRVYD

SEQ ID NO: 68038 - DNA, 1956 bp, Erwinia carotovora subsp. atroseptica SCRI1043
  CDS (1)..(1956)
atgatgcctgaagtgggcaattatctgctctgtctggcgctgggcgttgcactgctgctcagcgtgtatccgctgtggggagcatcgcgtcaggatgaacgcctaatggcgctggcgcgtccacttgcctgggcgctgtttgcatgcattttggcttccttcctcgtgttggtacacgcgctggtgatcaatgatttcaccgtcctctatgtagcaaataactcgaaccgtgcgctgccagtctggtatcgcgtggcggcggcgtggggcgcacatgaaggatcgctgctgctctgggttctgctgatgagcggttggaccttcgccgtggcggtcttcagccgagggatgtcgctggatgcagtagcccgggtattagccgtcatgggaatgattaatgtcggcttcttattgttcattattctgacgtcgaatccctttacgcgcacgctgccggactacccaattgacgggcgcgatctcaatccgctgctgcaggatgtcgggttaatcttccaccctccgctgctttacatgggttatgtcggtttttccgtggcgtttgcgtttgcggttgcctcgctgctggctgaacggctggacagcgcgtgggcacgttggtctcgaccgtggacgcaggcggcctggtcgttcctgacgttgggtatcgtgctcggctctggttgggcgtattacgaactcggctggggcggttggtggttctgggatccggtagaaaatgcctcactgatgccgtggctggtgggcacggcgctgctgcattcgctgtcggtcaccgaaaaacgcggcagctttaaagcctggacggtgttgttggctatcggcgcgttctcgctctgcctgttgggtacctttctggtgcgttctggcgtactggtgtcggtgcatgcatttgcctccgatccggcgcgtgggatgtttattctcgcatttctggtcattgtcatcggcggttcattgctgctgttcgccatcaaaggcaacagagtacgggcacgggtgacgaattcgctctggtcgcgtgagacgttcctgctcggcaataacctgatcctgatggctgccacgctcgtggtgctgctgggaacgctgctgccgttggtgcataagcaattgggtttgggcagcatttccattggcgcaccgttcttcaacaccatgtttaccctgttaatgtcgccttttgctctgctgttgggcgtggggccactggttcgttggcggcgcgatgagccgcaaaagctgcgtaagctgctgctggttgcgctggctgtgaccgccgcgctgtcgctgctgcttccgtggttgttgcaggactcgctggttgccatgacggtagtcggcttgtcgatggcgctgtgggtatttttcttaacggtgtacgacctgcatgccaattctactcgacgtcatggcctgctgcgcggtttgaccacactctcactgagccagtggggcatggtgtgcggtcatattgggctggcggtgacggtggtgggcatcgccttcagtcagaattatagcgtcgagcgtgatgtgcggatgcgggcaggcgacagcatccagatccatgattatcggtttacgtttcaaggtgtgcagaatgttgtggggcctaactggcacagcggtaaagggacgattgaggtcacgcgtaacggcaagccggaggcgatcctgaaagcggaaaaacgcttctataacaccagcggcgcggtcatgacggaagctgctattgatgcgggtgtgacgcgcgatctctatgcggccttgggcgaacaattagatgacgatagctgggcggtacggctgtattacaaaccctttattcgctggatttggtatggcggggggctgatggcgttaggtggcattctgtgcatgtttgaccctcgctatcgcctgcgtcgggccgttagggagacatcagcatga

SEQ ID NO: 68039 - protein, 651 aa, Erwinia carotovora subsp. atroseptica SCRI1043
MMPEVGNYLLCLALGVALLLSVYPLWGASRQDERLMALARPLAWALFACILASFLVLVHALVINDFTVLYVANNSNRALPVWYRVAAAWGAHEGSLLLWVLLMSGWTFAVAVFSRGMSLDAVARVLAVMGMINVGFLLFIILTSNPFTRTLPDYPIDGRDLNPLLQDVGLIFHPPLLYMGYVGFSVAFAFAVASLLAERLDSAWARWSRPWTQAAWSFLTLGIVLGSGWAYYELGWGGWWFWDPVENASLMPWLVGTALLHSLSVTEKRGSFKAWTVLLAIGAFSLCLLGTFLVRSGVLVSVHAFASDPARGMFILAFLVIVIGGSLLLFAIKGNRVRARVTNSLWSRETFLLGNNLILMAATLVVLLGTLLPLVHKQLGLGSISIGAPFFNTMFTLLMSPFALLLGVGPLVRWRRDEPQKLRKLLLVALAVTAALSLLLPWLLQDSLVAMTVVGLSMALWVFFLTVYDLHANSTRRHGLLRGLTTLSLSQWGMVCGHIGLAVTVVGIAFSQNYSVERDVRMRAGDSIQIHDYRFTFQGVQNVVGPNWHSGKGTIEVTRNGKPEAILKAEKRFYNTSGAVMTEAAIDAGVTRDLYAALGEQLDDDSWAVRLYYKPFIRWIWYGGGLMALGGILCMFDPRYRLRRAVRETSA

SEQ ID NO: 68040 - DNA, 1947 bp, Mannheimia succiniciproducens MBEL55E
  CDS (1)..(1947): transl_table=11
atgattgcggaattaggtaattttgcgttagccctcggcttagctatttctgttttattagcggtttttccgttatggggagccgaaaaagggaataaacaattgatgtcattggcacgcccaatgacttatgggttatttatttgtttaacttttgcattcggcgctttgttttatgcctttgcggtcaatgatttttctattcagtatgtcgtaaataactctaatagccgcttgccgttgcaatatcggttatccgcagtgtggggggctcacgagggttcgttattactatggatttggttgttatcggtctggagtgtcgctgtttcattatttagccgacaactgccacaagaagcggtagcgcgggttcttggcattatggggttagtgactattgggtttttaatctttattttgttcacgtctaacccttttgcgcgtacattccctaatttgccgattgacggtaaagagcttaatccaatgttgcaggatgtaggtttgatttttcatccgccgctgctttacatgggttatgtaggattctccgtcgcgtttgctttttcaatcgcctcattaatgacaggaaaattagacaccgcatgggcgcgttggtctcgtccctggacaatggcggcttgggtgtttttaaccgtaggtatcgtacttggttcctggtgggcttattacgaacttggctggggcggctggtggttctgggatccggtagaaaattcatccttaatgccttggcttgccggcaccgcgttattgcattctttagcagtgaccgagaaacggggagcgttcaaagcctggacggtactgcttgccattcttgccttttcgctttgcttattaggtacttttttagtgcgttcgggcgtgttggtttctgtacatgcttttgcttccgatcctacgcgcggtttatatattttggcctatttgattgttgtgattggcggttcattaactctgtatgcttacaaaggggggcaaattcgttcccgtgataatgccgagcgctattcgcgcgagtctatgttgctgttaaataatattttattaatggcggcattggttgtagtgctgttgggtacattattgccgttagttcataagcagttgggattaggttcgatttccatcggtgcaccgttttttaatcaaatgtttttggttttaatgacgccgttcgctttgttattaggcatcgggcctttagttaaatggcgtcgggataaattttccgctatccgtaagccggttattatcagtttgtttttgatgattattctaggttttgcgttgccttactttatcggcaataaattatccctaagtgcggtacttggtacgatgatggtggtgattattactctgctaagcttgtatgaactgaaacaacgcgccgcccatcgggacaacttcttaataggcattactaaattatcacgttctcattggggaatgtttttagctcatttaggcgttgccatgactgtttggggcgtgactttcagccaaaactttagtgttgagcgtgacgtaagaatgtcagtcggcgattccgtgaacattgccggttatgaatataaattccaaggcatacgggatgcaaacggaccgaactatttaggcggcacggcacaagtggatattttaaaagagggtaaacttgaaggttctttatttgccgaaaaacggttctatacggtaagccgcatgacaatgacggaagccgccatcgattggggatttacccgtgatctgtatgtggcgttaggcgagcagttagaggataaatcctgggcaatgcgtctatattacaaaccttttatccgttggatttggtttggcggcgtctttatggctctagggggggtactctgtatgttcgatcgtcgttaccgtttttctaaaattttaaataaatag

SEQ ID NO: 68041 - protein, 648 aa, Mannheimia succiniciproducens MBEL55E
MIAELGNFALALGLAISVLLAVFPLWGAEKGNKQLMSLARPMTYGLFICLTFAFGALFYAFAVNDFSIQYVVNNSNSRLPLQYRLSAVWGAHEGSLLLWIWLLSVWSVAVSLFSRQLPQEAVARVLGIMGLVTIGFLIFILFTSNPFARTFPNLPIDGKELNPMLQDVGLIFHPPLLYMGYVGFSVAFAFSIASLMTGKLDTAWARWSRPWTMAAWVFLTVGIVLGSWWAYYELGWGGWWFWDPVENSSLMPWLAGTALLHSLAVTEKRGAFKAWTVLLAILAFSLCLLGTFLVRSGVLVSVHAFASDPTRGLYILAYLIVVIGGSLTLYAYKGGQIRSRDNAERYSRESMLLLNNILLMAALVVVLLGTLLPLVHKQLGLGSISIGAPFFNQMFLVLMTPFALLLGIGPLVKWRRDKFSAIRKPVIISLFLMIILGFALPYFIGNKLSLSAVLGTMMVVIITLLSLYELKQRAAHRDNFLIGITKLSRSHWGMFLAHLGVAMTVWGVTFSQNFSVERDVRMSVGDSVNIAGYEYKFQGIRDANGPNYLGGTAQVDILKEGKLEGSLFAEKRFYTVSRMTMTEAAIDWGFTRDLYVALGEQLEDKSWAMRLYYKPFIRWIWFGGVFMALGGVLCMFDRRYRFSKILNK

SEQ ID NO: 68042 - DNA, 1935 bp, Mannheimia succiniciproducens MBEL55E
  CDS (1)..(1935): transl_table=11
atgatcccagaactcggctttattgcattgcttattgcattactttcttctttcttgcttacgttaattccgcttgtaggtatgataaaacgcaatacgaatttactgagttatgcctggaatttcagttatctgtttgccattttcagcacgatttccattgcctgtttagcctattctttttcggttaatgatttttcggtggaatatgtcgccgcccattcgaattcacagcttcctctgttttttaaaattgccgcgacctggggcgggcatgaaggctccatgttattctggctgttttcattaagtttatggactgccgcttttgcttttttcagtcgaaaaattgatcctgttttttcagcgcggaccctttctattctcggttttatttgtttgagttttgctatttttattctgtttttttccaaccctttcattcgtcagttccctttaccgccggaagggcgggatcttaatccgatgttgcaagatatcggtctgattattcatccgccgctgctttatttgggttatgtggggttcgcggtaaattttgctatgactttatccgtcatgctaagcggacatgttgatgccgctatcgcacgctggacaagaatttgggtattgttatcatggttcttcttaactttaggcattatgctcggtgcatggtgggcatattacgaactcggctggggcggctggtggttctgggatccggtggaaaacgcctcgttgatgccttggttaatcggtctggcgttattgcacagcctgatagttaccgaacaacgcgggattttcagctattggacgatacttttttcattatttgcctttgctttcagcctgcttggcacctttatcgtgcgttccggcgtattaacttcggttcacgcttttgccgtggacggcgaacgggggactgcattattacttattttcttcctgttaacggcgttggcattaaccgttttcgcccttaaagtcaatttgcgtcaaagtgcggtccgtttttccgttttttcgaaagaaagctttttgttgttggctaatgtagttctcactattgccactgtcagcgtgtttttaggaactttttatccaatggtattttcggcgatgggctggggttctatttccgtcggtgcgccgtattttaatagcatttttgtgcctttgttgctgattatgcttattgcgatggttttcgtattagctacaaaatggcaaaaaatgaaccgcactttattgcggcaaaaatcaatattgcttatccccgcccttctgattgcatatttgattattcatttcaccgttcggcaggatgaaagtctgcgctttcatttttccgcatttgtgctgcttagtttggcaatttggctgttgcttgcaactttatggataaattggcgaaaaatagggttgcggcggtcaggcatgatccttgctcattgcggtgttgcttttgcggtgattggtgcggtgatgtccggttatttcggcagtgaaatcggcgtacgtttagcgccgcaacagagccaaatgttaaacggttatgagttccgctatataggctttactaatgagctaggtcctaactttacttcggaaaaagcgcattttgaaatttataaaaataaccaaaaactgaccgcactttatccggaacgccgttattatgaggtacgaactatgaatatgtcggaagtgggtattcaatggggcgttttaggcgatatttatattgtcatgggagataagctggcgccgaatgagttcagttttcgcctgcattacaaaccttttgtccgctggttatggctgggtggaattttaatggcattaggcgctttagtagccgccgttagcctggttcaacggaaaaacgccatggcgttttcatcggcaattaaaaaagaataa

SEQ ID NO: 68043 - protein, 644 aa, Mannheimia succiniciproducens MBEL55E
MIPELGFIALLIALLSSFLLTLIPLVGMIKRNTNLLSYAWNFSYLFAIFSTISIACLAYSFSVNDFSVEYVAAHSNSQLPLFFKIAATWGGHEGSMLFWLFSLSLWTAAFAFFSRKIDPVFSARTLSILGFICLSFAIFILFFSNPFIRQFPLPPEGRDLNPMLQDIGLIIHPPLLYLGYVGFAVNFAMTLSVMLSGHVDAAIARWTRIWVLLSWFFLTLGIMLGAWWAYYELGWGGWWFWDPVENASLMPWLIGLALLHSLIVTEQRGIFSYWTILFSLFAFAFSLLGTFIVRSGVLTSVHAFAVDGERGTALLLIFFLLTALALTVFALKVNLRQSAVRFSVFSKESFLLLANVVLTIATVSVFLGTFYPMVFSAMGWGSISVGAPYFNSIFVPLLLIMLIAMVFVLATKWQKMNRTLLRQKSILLIPALLIAYLIIHFTVRQDESLRFHFSAFVLLSLAIWLLLATLWINWRKIGLRRSGMILAHCGVAFAVIGAVMSGYFGSEIGVRLAPQQSQMLNGYEFRYIGFTNELGPNFTSEKAHFEIYKNNQKLTALYPERRYYEVRTMNMSEVGIQWGVLGDIYIVMGDKLAPNEFSFRLHYKPFVRWLWLGGILMALGALVAAVSLVQRKNAMAFSSAIKKE

SEQ ID NO: 68044 - DNA, 1953 bp, Legionella pneumophila subsp. pneumophila str. Philadelphia 1
  CDS (1)..(1953): transl_table=11
atgatagcggaattagggctgttttttttggttttggctttagtggcttctttgatgttagctttgatcccattggcgggtttgcaattcaatcggaaagactggattgattcctccaggaattatgtcgtgctgcaatttttatttgtggcatgtgcttacctatgtctcacggcctgttttttgatggatgatttttcggtgatctatgtgctgaataattccagcttattgctcccatggttttataaattttgtgctgtgtggggtgggcatgaaggttccatgctgttatgggtcgctatccttagtttttggatgatcctggtttgtttttttagctcaagccttgatacggaaatgcgcgctcgggtattagttattttaggttggctaagtattggttttattctttttttgttaatgacttccaatcctttcttgcgccaatttcaagtattgaatacacagggccgtgatctgaatccattgctgcaagatcctggctttttattccatcctcctatgttgtacatgggatatgtagggttttgtgtcgcttttgcttttgctattgccgctttatgggcagggaaagtagaaaccagttggtctaaatggaccagaccctggactctggctgcctggtgttgtttaaccgcgggaattactttaggcagttggtgggcttatagagaattaggctggggtggttggtggttttgggatcctgtagaaaacgcttcttttatgccctggctggttggtacggcactattgcattctttggcagttacagagcaacgccagcaatttaaagcgtggaccatgttgcttgcaatcgctgctttttctttaagtttaattggtacttttcttgttcgctctggagttttaacttcagttcatgcctttgcggttgatcctcagcggggattatatattctgggatttttgttattcgtcattgggggttctttaacattgtttcttttcagagcccaaaccttgcaagtcaataaacatcctggcttattatcccgagaaagtgcgttgttgttaaacaatgtgtttttagtggttattatgctgacggtattaatgggcacggtttatccattgctggtggaagggttagggttaggtaaattatccgttggagcgccctattttaatgcagtatttgttccattaatgattcctttattgttgctaatggggttaggtgtccgtttgaaatggcagaatgattgttggagggatgtcttcagaaagctaaatcgtatttttttgcttagtctgatattgcctgtcattttactattctgtacctcaactgaaatacaccttacagcccttttgggattaattttggcattctgggttttgttgagtactgctaatgcggcgtatcacaaagtcagggatagaggggtggcaggagttggacaggcttattgggggatggttttggctcattgtggtgtcgcagcaacagtgattggcattgctgtttcttcagcttatggcgtacaagatgatgtacgtatgtctcctggcaagcaagtgaatctgctggattatcagattggattcattaatcagactccgttgaatggcccaaattacaaagggacaagggctgagttttcaatacaatatcagaataaaaccaggaaaatttttcctgaaaaaagagtgtataccattggacaaatgccaatgactgagtctgcgattgatgttactcctttccgagatatttacattgctttgggggaaccactgtctgaggatgcctggtcggtacgtatttattataaaccgttggtccgctggatttgggctggcggatttatgattttagccggaggcgttttggcattaacagatagaaggtattacagaaaaaggcaagtaacggtaatgtcagtgcgggagatcaagatatga

SEQ ID NO: 68045 - protein, 650 aa, Legionella pneumophila subsp. pneumophila str. Philadelphia 1
MIAELGLFFLVLALVASLMLALIPLAGLQFNRKDWIDSSRNYVVLQFLFVACAYLCLTACFLMDDFSVIYVLNNSSLLLPWFYKFCAVWGGHEGSMLLWVAILSFWMILVCFFSSSLDTEMRARVLVILGWLSIGFILFLLMTSNPFLRQFQVLNTQGRDLNPLLQDPGFLFHPPMLYMGYVGFCVAFAFAIAALWAGKVETSWSKWTRPWTLAAWCCLTAGITLGSWWAYRELGWGGWWFWDPVENASFMPWLVGTALLHSLAVTEQRQQFKAWTMLLAIAAFSLSLIGTFLVRSGVLTSVHAFAVDPQRGLYILGFLLFVIGGSLTLFLFRAQTLQVNKHPGLLSRESALLLNNVFLVVIMLTVLMGTVYPLLVEGLGLGKLSVGAPYFNAVFVPLMIPLLLLMGLGVRLKWQNDCWRDVFRKLNRIFLLSLILPVILLFCTSTEIHLTALLGLILAFWVLLSTANAAYHKVRDRGVAGVGQAYWGMVLAHCGVAATVIGIAVSSAYGVQDDVRMSPGKQVNLLDYQIGFINQTPLNGPNYKGTRAEFSIQYQNKTRKIFPEKRVYTIGQMPMTESAIDVTPFRDIYIALGEPLSEDAWSVRIYYKPLVRWIWAGGFMILAGGVLALTDRRYYRKRQVTVMSVREIKI

SEQ ID NO: 68046 - DNA, 1974 bp, Methylococcus capsulatus str. Bath
  CDS (1)..(1974): transl_table=11
atgatcgccgaactcggccacatcgccctgatcatggccctcctgatggccctcctgcagggcgccttcccgctgatgggcgcctcccagggcgtggacatctggatgagcgtcgccaagccggccggccgcgcgcagttcctgtttctgctggtatccttcggcgccctcaccgcctgcttcgtcaacaacgatttttcggtggaatacgtcgcccgcaactcgaactcggccctgccgctctactatcgcatcgccgcggtatggggctcacatgaggggtcgatgctgctgtgggccacgatcctgggtctctggacagcggcggtgacggtgttcagccgcagcctgtcggaagactttctggcccgggtgctgggcatcatggggctggtgagcgtcggcatcctgctgttcatcctgttcacctcgaacccgttcgagcggctgacaccggtgccgcccgacggcaacgacctgaatccgctgctgcaggatttcggcatgacggtgcatccgcccatgctgtacatgggctatgtgggactgagcgtagccttcgccttcgccatcgccgccctgctgggcggctcgctggactcggcatgggcgcgctggtcacggccctggaccctggtggcctggctgttcctgaccggcggcatcaccctcggctcatggtgggcctattacgaactgggctggggcggctggtggttctgggacccggtggaaaacgcctccttcatgccctggctggtcgccaccgcacttatccactcgctggccgtcaccgagaagcgcggcgccttcaaggcctggaccgtgctgctggcgatcttcgccttttcgctgagcctgctgggcaccttcctggtacgttccggcgtgctgacctccgtgcatgccttcgcttccgaccccacccgcggcctgttcatcctgatcctgctggccatcgtggtgggcggttcgctgctggtttacaccgtgaaggcgccggccgtgcgcgatgtggcgcgctatagcctggtgtccaaggaaaacctgctgctgctcaacaacatcctgctggtgaccgcctccggcagtatcctgctcggcaccctttatccgctgatcctggacgcgctgaagctgggcaagatttcggtcggcccgccgtatttcggcacggtgttcgctccgctgatggcgccgatcttcctgctcgccggtatcgggccgatgttcgcctggcgggagagcccgatcggccgcatcctgcaccgggtccgctatctgttcccggcgagcttcgcggccggcatcgcgctcgccgccctggcctgggacgagaccgacttcaagatgatggccgggctgggctgcgcgttctggctggcggcgagcgcctgcctcagcctgtggagccggatccggctgcgcgacggctggctcgaaggactgcgcgcccagtcgcccagcgtctacgggatgaccgccgcgcatctcggcgtcgcggtgttcctggtgggcgccgtgctgtccgaccgcctgagtcaggaaaagctggtacgcatggcgcctggcgacagcgtgatgctggccggctacgccttccacttcctcggcacggagaccgtgcaggggccgaacttctcggcccagcaggccaccttccgggtggagcgggacggcgaaagcctggaacttcggccccagaagcggaactacaaggtgcagcgcaacatgatgaccgaagctgcgatagaccccggtctgtcccgcgatctctatgtcgccctcggcgagccactggacgggaacgcctggagcgtgcggctctacgtcaaaccgttcatccgctggatctgggccggcggcctgttcatgatcgccgggggcatcctgtccgtcagcgaccgacgctaccgcctgccgctgcctgaaacccgcgcagttgccggacgcgccgcgtcccgtgcaatttga

SEQ ID NO: 68047 - protein, 657 aa, Methylococcus capsulatus str. Bath
MIAELGHIALIMALLMALLQGAFPLMGASQGVDIWMSVAKPAGRAQFLFLLVSFGALTACFVNNDFSVEYVARNSNSALPLYYRIAAVWGSHEGSMLLWATILGLWTAAVTVFSRSLSEDFLARVLGIMGLVSVGILLFILFTSNPFERLTPVPPDGNDLNPLLQDFGMTVHPPMLYMGYVGLSVAFAFAIAALLGGSLDSAWARWSRPWTLVAWLFLTGGITLGSWWAYYELGWGGWWFWDPVENASFMPWLVATALIHSLAVTEKRGAFKAWTVLLAIFAFSLSLLGTFLVRSGVLTSVHAFASDPTRGLFILILLAIVVGGSLLVYTVKAPAVRDVARYSLVSKENLLLLNNILLVTASGSILLGTLYPLILDALKLGKISVGPPYFGTVFAPLMAPIFLLAGIGPMFAWRESPIGRILHRVRYLFPASFAAGIALAALAWDETDFKMMAGLGCAFWLAASACLSLWSRIRLRDGWLEGLRAQSPSVYGMTAAHLGVAVFLVGAVLSDRLSQEKLVRMAPGDSVMLAGYAFHFLGTETVQGPNFSAQQATFRVERDGESLELRPQKRNYKVQRNMMTEAAIDPGLSRDLYVALGEPLDGNAWSVRLYVKPFIRWIWAGGLFMIAGGILSVSDRRYRLPLPETRAVAGRAASRAI

SEQ ID NO: 68048 - DNA, 2049 bp, Photobacterium profundum SS9
  CDS (1)..(2049): transl_table=11
atgatcccagaagttggacattatgcattaatacttgggtgtgtattcgctgtattaggcggaacaatcccgttgtatggtcttataaaaaaagacccatatcttatccgctatgcgtggccgttaagctatggtgcttttttcgctatctcatcttcaatcgtattacttggctatagctttgctgttgatgatttttcggtggtgtatatcgcgcagcattctaattctcagcttcctcaagtgtttaaaattgccgctgtatggggcgggcatgaagggtcatttttattttggttattttcacttgcaggctggagcgctgctgttgcatttgtctatcagtacaaagccccttcaggcgttaatcaaccagaaaaacaagtgcagcatgaagcttttatcgggcgggtgttggttgttctttctctgttaattgccgcatttagtttatttacgttattcacctcgaatccttttttacgcttattgccaataccgatggaagggagagatttaaacccaatgttgcaagatgtggggctaatttttcatcctcctatgttgtatctcggttatgtcggttttgcggtgagcttcgcattcgccattgctgcgttaacaacgtctgcatcgtctgaactgccttgggcggggtggagtcgtccttgggcattgagtgcatgggtgtttctaactggtggtatctcactgggttcttggtgggcatattatgaactgggttggggaggctggtggttttgggatcctgtcgaaaatgcttctctaatgccttggttaacgggtaccgctttactgcattctttgataatgactgaaaagcgaaatgcattaaccagttggacgatactgctgtcgatctttaccttctcgttaagcttactcggcacatttatcgttcgttcaggcgtactaacttctgtgcacgcgtttgctgttgatccaacccgtggtgttgcattgctaagtattcttggcgtggtgctactgagttctttgacgttgtttgctttaaggggcggtcaatatattaaacccgtccggtttggattcttatcgcgtgaagctgcgttattggcgggtaacagtttatttgccgttgcgacgcttactattttacttggcacgttttatccaatgatattccaagcatttgggttgggaaatatttcagtaggagccccgtattttaatagcttgttcgtgccattaagtttcgtgatttttgcagttatgggcttagcaccattgataaaatggaaaaatgcgacatcagataatttcatcatgcgtattattgccccactgtctgcttctgtggtcattggtgttgcactatccgtgatgtttgaacgagggattaacctcgtagtttgcgtcgcctttattatggcattatgggttacgctaacgtcattacaagtgttttatattgttcaaaaatcgcgtaagcattggaaatttgatagccaatgttgccgccagttcgcgatggtgaccgcgcatattggtgtggctgttgcgcttgtgggggcaacgctagtcagttattacgttgaagaaactaataatagaatggggccgggtagccaattagttctgggtgattaccagtttgattaccaagaaacggagttattaattggccctaattacactgcagaacaagccaatattgcagtaacacgaattaatggcgttgataaaaatgcggaacgtattggtgttattaagccacagcgtcggcattacacggtgcgaacaatgaatatgagtgagccgggtattcattggttttggaaaggtgatatttacataacgctgggcgacaaaatcaataagacagattacgcggtacgtattcaatataagccttatgttcgttggttatggatcggtagcttgttgatgatgttgggcggtattatggcagtgcttgcccgtattagaatcatggtgatgaccaagaagcagcagcgccaatgtcaaaaggcaaaactcacatcaacaattatcatgtggaagtag

SEQ ID NO: 68049 - protein, 682 aa, Photobacterium profundum SS9
MIPEVGHYALILGCVFAVLGGTIPLYGLIKKDPYLIRYAWPLSYGAFFAISSSIVLLGYSFAVDDFSVVYIAQHSNSQLPQVFKIAAVWGGHEGSFLFWLFSLAGWSAAVAFVYQYKAPSGVNQPEKQVQHEAFIGRVLVVLSLLIAAFSLFTLFTSNPFLRLLPIPMEGRDLNPMLQDVGLIFHPPMLYLGYVGFAVSFAFAIAALTTSASSELPWAGWSRPWALSAWVFLTGGISLGSWWAYYELGWGGWWFWDPVENASLMPWLTGTALLHSLIMTEKRNALTSWTILLSIFTFSLSLLGTFIVRSGVLTSVHAFAVDPTRGVALLSILGVVLLSSLTLFALRGGQYIKPVRFGFLSREAALLAGNSLFAVATLTILLGTFYPMIFQAFGLGNISVGAPYFNSLFVPLSFVIFAVMGLAPLIKWKNATSDNFIMRIIAPLSASVVIGVALSVMFERGINLVVCVAFIMALWVTLTSLQVFYIVQKSRKHWKFDSQCCRQFAMVTAHIGVAVALVGATLVSYYVEETNNRMGPGSQLVLGDYQFDYQETELLIGPNYTAEQANIAVTRINGVDKNAERIGVIKPQRRHYTVRTMNMSEPGIHWFWKGDIYITLGDKINKTDYAVRIQYKPYVRWLWIGSLLMMLGGIMAVLARIRIMVMTKKQQRQCQKAKLTSTIIMWK

SEQ ID NO: 68050 - DNA, 2367 bp, Haloarcula marismortui ATCC 43049
  CDS (1)..(2367): transl_table=11
atgacaacagtcgtattcgggctagcagtcgggacctggctgctggcaatcggcctgttcggaagcgtgcttgccacggcgctactcggctacgagtacgtgaccggcgacgagtcgttccttcgcgtcagcaaggctgccgcgggcgtcgcgacggggtcgttcgttatcgcactgctatacctgacttcgcagtttctcagtggggattacaccaacgcgtatgtctgggacaacactgcaaattacctcccgacgctgtacaaagtcacaggagtgtacgcgtccaacgcgggatcgatactgctgtgggcgatgctcacggctgttgtcgtcacgacgaccttgcttctgggccggtacagcacacgcggcgcacgtctctcgcaatcccttgggatgggcgttgtcaccgtgttcgcctggatgctagtcaacgacagcccgtttactcccctgtcggcagagtacccgtcggtcgcggctaacgggattccacaggacggcagcgggctgaacccgctactggtcgacccgttcatggcaatccacccgccgataacgttctcggcgtacgcgctcatggtggttcccttcaccgttggcgtgacccacttcgtcgccaaactccgggggacggagagcatgttcgacgactggctgggcagcatgacgcgctggctccgggggtcgtggctcctgctgactgccgcgatcacgctcggcggcatctgggcgtatcgagtcctcggctggggtggcttctggtcgtgggacccagtcgaaacgtcagtgctcatcccgtggctcggactgaccgccgtgttgcatacgctcaaccagtaccggcgctccggccggtacgcagtactcgcgccggccgccacggcggcgttgctcccgctcgtcatctacgcgacgaccgtggtccggagcggcgtcttccggagcgtccactcgttcgccggcgggggcatcgggagcggcgtcctgttcctcctcggaacgacgagcacgctggcggtcggtcccgcgttcatccactggttcaggactgagcaaagcgacgccgaagaagcgagcctgctcgaccgggcgacaatctaccacgctgccgtgctcgggttcatcctgcttgcgttcgtctcgctctggggcctcacgttccccgtggttcgcagcctcgcttcaggtgtcgaagtcagcgtcgacgcgcggtactacaacctctggagcttcccggtcgtcgtcgggatgctccttgccggagggatgtacgcacaacaagagcgcttcagtacgcgagcgacagtcgtgaccgccgctacagtgctcatcgccgccctcgccgttggtttcgtgctggcacgacctgagtggcagctggcgtcgactgagccgttcgacccggtgtattaccgcgccatcgggagcctcagtgtggtcaccgtgctgccgccggccgtgtacttcgcaggcgcgtgggtcgtccgctacgcgggccgtctccgccgactgaccggacggcaggcgaagctaaacgagaccggcatcgccctcattcacgtcggcgcggcgctgctcatcgtctccgtctccttcgtctatgtcttctcgacgacagcgtccgtcggtatcgtgggcgcgacagaactggacgataccggcgagcgaatcgtccgcgacgtcgaggggtcgccgtacacggtcgaggtaaccaactactcgccggagaacacgccgacgatgaccgaggcggcgatgacgccggccgaagtcggctccgttgacccctcgtcatcggtgattctcgtaaaaggagaggtgaccgcagtgcaacgcttcgaggacacgaccatcgcacagctcaacgggtcccgcgtgtgggtcggtgccgacagcgggacagtgcagttcgaagaggggtcggtgatcgtcgcccgcgggacactctctgaccctcgttccgagaacatcgacgcgctcgtctacaccaacggggaaaacgtcggaccggcgtcggccccgccgacagacgtgtactcgccgcgggtcgtcgaccatcggttcgacgttcaactgtaccggggcgacacgctggtcgccgatggcactgtggccgaacagtcatatcgcggtcgcgatatgcagacgaacgacccgctcatcgaacgcggtatcaccggcgacacgtacgtcgtggggactcgaaccgcgggcgggctctcgatcgaaatcagtcgctacccgcttgccaaccagatctggttcggcgtcgcagtgatgctcgtcggcatggggctggtcttcctgttcgatccagcgtcgggtgccgccggtggccgtcgctccggaaatcgcgattga

SEQ ID NO: 68051 - protein, 788 aa, Haloarcula marismortui ATCC 43049
MTTVVFGLAVGTWLLAIGLFGSVLATALLGYEYVTGDESFLRVSKAAAGVATGSFVIALLYLTSQFLSGDYTNAYVWDNTANYLPTLYKVTGVYASNAGSILLWAMLTAVVVTTTLLLGRYSTRGARLSQSLGMGVVTVFAWMLVNDSPFTPLSAEYPSVAANGIPQDGSGLNPLLVDPFMAIHPPITFSAYALMVVPFTVGVTHFVAKLRGTESMFDDWLGSMTRWLRGSWLLLTAAITLGGIWAYRVLGWGGFWSWDPVETSVLIPWLGLTAVLHTLNQYRRSGRYAVLAPAATAALLPLVIYATTVVRSGVFRSVHSFAGGGIGSGVLFLLGTTSTLAVGPAFIHWFRTEQSDAEEASLLDRATIYHAAVLGFILLAFVSLWGLTFPVVRSLASGVEVSVDARYYNLWSFPVVVGMLLAGGMYAQQERFSTRATVVTAATVLIAALAVGFVLARPEWQLASTEPFDPVYYRAIGSLSVVTVLPPAVYFAGAWVVRYAGRLRRLTGRQAKLNETGIALIHVGAALLIVSVSFVYVFSTTASVGIVGATELDDTGERIVRDVEGSPYTVEVTNYSPENTPTMTEAAMTPAEVGSVDPSSSVILVKGEVTAVQRFEDTTIAQLNGSRVWVGADSGTVQFEEGSVIVARGTLSDPRSENIDALVYTNGENVGPASAPPTDVYSPRVVDHRFDVQLYRGDTLVADGTVAEQSYRGRDMQTNDPLIERGITGDTYVVGTRTAGGLSIEISRYPLANQIWFGVAVMLVGMGLVFLFDPASGAAGGRRSGNRD

SEQ ID NO: 68052 - DNA, 1923 bp, Anaplasma marginale str. St. Maries
  CDS (1)..(1923): transl_table=11
atgcaatattcgatgggcggcttgggcgcgtttttaatgtgcgcgtgcgcgctgtctctgctatgttccgtggttgcgcgcttatcaaccgcgtggggggcaacactgacgcacgtggcattctcgttatacagcgcagctgcagccctgctcacctacctgcgggttacggaccacttcaactacgcacacgtatatcagaattcgcatactactcaaccactcctgtacaaggtgtgcgggatatggggaaactatgagggctcaaacctgctgtttgtatggatgctgagtgcatatggaacgcttattgcgcttctggtcaagcgagacgatctgaaaggagctgcgctcgtcgtacaaaacttgctcagctttggctttgcgctgtttggcgtcatatttgcaaatccattcctgaaagttataaccctggacgcagacgggctgggttttaacccaatgttgcaggatgtcgggcttgcacttcaccccccagtattgtttgggggttatacgggttttggcgcagtattttccataacgattgctgcacttgttttgcgcatagaccccaaagaatgggtcgcggttatacgtggttgggtgttaggcgcgtggactttactcacgctgggtgtagcacttggcggatggtgggcatatagggaattaggttggggaggattttggtcttgggatccggttgagaatgtttccttgatgccgtggtttttgggggtggcgctcattcacatgatgccggtggtgaaaaagtttggcatatattgcaattttacgtttttgctcgctttgctggcgtttatttccagtttgtgcggcacatttttagtgcgctctgggtttttagtttctgtccatgctttcgcgaatgatcaaggatgcggcatttttctactggctttggttacgacaataacggtgggcgggctgctaacatttgttattaagtacagaaatttgccggagacctgctgccacttcggctgcatatcaaaactcaccgcgattttggccaatagcgtaataatgttgaccgcgtttttggtggttttggcagggactgtgtatcccataattctagagctgcttgagggggataccatatctgtaggcgcgccatattacaataacgtgttcagcgtgctatccgtagcgttgttttcggttatgatattgctctctggcctaagttgggacggctcggagaaatttaaaatgaccttcaaaatttcttccgtaatcgcaacacttcttgtaccttttgcagcgccccttgggctcaccggagtgttaattttgctggctgcgctgttgtttttttcgatactggaagattacatttatcgagtgcgtagctcacaaatgcggctgagtgctgcggtcaggcgtgtgagccttgggcgatatgcaatgatgatgacacacgccggtgttgcggtttgcatgtttggcatcatctgctctactgcatttcaggaagatgtaacacaatacatgaaagagcgcgaatccgcagaaattcacgggtttagcgtgacattatctggtgtgtcactggtaaagcggccgcataacgaggccataagggcgaagttttccgtggctagatcaggcaaagtagtgtgtctattgttccccgaaagtaggttctactatgtcgaaggtattagaaattctgaaagtagcatctgtcacggattacttgcggacatatacatagtagtaggtgaagtggataaaaatcgcgggatagcggtgcagatgcactacaaaccactaatcaatctggtatgggcagggtttgccctgatggcggccgggggagtgctgtcggtagttaaagtatggctgcgccgcaggcaaaacaatcctgctataggtgcaaatagtactgcctga

SEQ ID NO: 68053 - protein, 640 aa, Anaplasma marginale str. St. Maries
MQYSMGGLGAFLMCACALSLLCSVVARLSTAWGATLTHVAFSLYSAAAALLTYLRVTDHFNYAHVYQNSHTTQPLLYKVCGIWGNYEGSNLLFVWMLSAYGTLIALLVKRDDLKGAALVVQNLLSFGFALFGVIFANPFLKVITLDADGLGFNPMLQDVGLALHPPVLFGGYTGFGAVFSITIAALVLRIDPKEWVAVIRGWVLGAWTLLTLGVALGGWWAYRELGWGGFWSWDPVENVSLMPWFLGVALIHMMPVVKKFGIYCNFTFLLALLAFISSLCGTFLVRSGFLVSVHAFANDQGCGIFLLALVTTITVGGLLTFVIKYRNLPETCCHFGCISKLTAILANSVIMLTAFLVVLAGTVYPIILELLEGDTISVGAPYYNNVFSVLSVALFSVMILLSGLSWDGSEKFKMTFKISSVIATLLVPFAAPLGLTGVLILLAALLFFSILEDYIYRVRSSQMRLSAAVRRVSLGRYAMMMTHAGVAVCMFGIICSTAFQEDVTQYMKERESAEIHGFSVTLSGVSLVKRPHNEAIRAKFSVARSGKVVCLLFPESRFYYVEGIRNSESSICHGLLADIYIVVGEVDKNRGIAVQMHYKPLINLVWAGFALMAAGGVLSVVKVWLRRRQNNPAIGANSTA

SEQ ID NO: 68054 - DNA, 1956 bp, Idiomarina loihiensis L2TR
  CDS (1)..(1956): transl_table=11
atgattgctgaagcaggacatcttgccatagcgattgcgctggccttttctgtattactggcggtttatcctttatggggagcggcgaaaggaaacggcggcatgatggctttagcccggccgtttgcctatggccagtttttctttaccgctatcgcttttgctttattagtctggggctttgtcagtaacgactttagtattgcttatgttgcggcaaactcgaatagtcagctaccggttgcgtatcgggttaccgcggtgtgggggtcacatgagggctcttttcttctctggatgctaatgcaggcaggctggatagccgcagttgcgatattttcccgctctatgccattgccgatgatagcccgggtgcttgccattctggggctggtcagcattggcttctatttgtttatgctaacggtttcgaacccctttgatcccagtttgcctctcattcctgttgacggtcgcgatctcaatccgctgctgcaagacccgggaatgatcattcatccgccattgctgtatatgggctacgtcggtttctctgttgcttttgcttttgctattgccgctttaatgtcaggcaagcttgatgcagcctgggctcgttggtctcgtccctggactctcgcagcatggatttttctgacactgggtattgccattggtagctggtgggcatattacgaacttggctggggtggctggtggttctgggacccagttgaaaatgcgagctttatgccatggctggtaggaacggcattactgcactcacttgccgtaactgaaaaacgtggcagctttaagtcctggacggtattgctggctatatccgctttcagtttgagcttattaggcacctttttggtacgttccggcgttttagtgtcagtgcatgcgtttgcaaccgaccccgcccgaggcttgtttattctgatactgctggggctggttgtcggcggttcgcttattctttacggcctgcgcgccggaaagatgcaaagttacagccgttatgaactgctttcacgagaagtgatgctgctgggtaacaatgtcttgttaatggcggctatgatagttgtgtttctgggcaccatgctacctctggttcataaagaaattggtctgggtaccatttctattggggcacctttctttaatgagctgtatagctggctggttattccatttgcattaatgctgggtcttggacccttaatgcgctggcgcagacaagctatgcaaccacttctgaaaccgctggccttagcactttctttggcgctgattctggcctacacgctgccgaagatttgggccgacgaattacccgcgttggtggttattgcgctgtttctggcgttctgggtggctctggctacactgaccgaagtccagcaaacggtaaaacaacgcaagcagggttgggccgggctgaccaaaatttcaggtagtcattggggaatggttctggggcatttaggttttgccgtaacgcttatcggcatcaccctggtttcaaactatgagcaggagcgcgatattgcgcttgcgccggggcaatcggttgatgttatcggttataacgttgtgttcgaaagcctgcagcatagggaaggacctaactacgatgccgatcagggagtatttactgtctacaaagacgggcaggaagtaacgcagttaaccagcgagaaacgtttttaccgggtacaacgcaccagtatgaccgaagttgggctcgatgcgagtttgttacgcgatatctatattgctatgggcgagccgctggatgatgaaacctgggccattcgtttctatatcaagccctttgtccgctgggtttggctgggcgctattatcatggcaataggcggcgctatggcatttgctgataaacgttatcgtaagcgtggcaaaaaggagatggccaatgactaa

SEQ ID NO: 68055 - protein, 651 aa, Idiomarina loihiensis L2TR
MIAEAGHLAIAIALAFSVLLAVYPLWGAAKGNGGMMALARPFAYGQFFFTAIAFALLVWGFVSNDFSIAYVAANSNSQLPVAYRVTAVWGSHEGSFLLWMLMQAGWIAAVAIFSRSMPLPMIARVLAILGLVSIGFYLFMLTVSNPFDPSLPLIPVDGRDLNPLLQDPGMIIHPPLLYMGYVGFSVAFAFAIAALMSGKLDAAWARWSRPWTLAAWIFLTLGIAIGSWWAYYELGWGGWWFWDPVENASFMPWLVGTALLHSLAVTEKRGSFKSWTVLLAISAFSLSLLGTFLVRSGVLVSVHAFATDPARGLFILILLGLVVGGSLILYGLRAGKMQSYSRYELLSREVMLLGNNVLLMAAMIVVFLGTMLPLVHKEIGLGTISIGAPFFNELYSWLVIPFALMLGLGPLMRWRRQAMQPLLKPLALALSLALILAYTLPKIWADELPALVVIALFLAFWVALATLTEVQQTVKQRKQGWAGLTKISGSHWGMVLGHLGFAVTLIGITLVSNYEQERDIALAPGQSVDVIGYNVVFESLQHREGPNYDADQGVFTVYKDGQEVTQLTSEKRFYRVQRTSMTEVGLDASLLRDIYIAMGEPLDDETWAIRFYIKPFVRWVWLGAIIMAIGGAMAFADKRYRKRGKKEMAND

SEQ ID NO: 68056 - DNA, 2142 bp, Azoarcus sp. EbN1
  CDS (1)..(2142): transl_table=11
atgcctgagcgcacgagctgggtcgccgtcatcctggcagccttggcgggcgtgctgttttcagggcttggcgatgtcgtgatcggcctcgcggccctatccgtgcttgtcgccggtgcttcggcacgataccggctgcgcctgtgccgggtcggcgctgcggcgctttgggggtcgatcctgacacttgcggtgctgatgctcgccgaccgcttcgatgtccgctatgtatggctctacagcggagccgaactgccgattttcctgaagctctccaacctgtggggaggcgacgagggcactacgctgctgctggcagccttcggtgcaagcctcgctgcccgttcttcgtcggccccgctgcgttttgacgtcaccgcgtttcttgccggggcgctcgcgctcgctgcggcgaccttgtcgccgtttgcagcgaccccgccggagtggctggagcgagcggcttaccagggcatgaatgcgcacctgatgaaagtgtggatgcttgcccacgctccgttggtgctggcggcctatgcctggacactgtctctcgcgtcgccggcgctggcagcgcttgcgggagaccttgcacgctggcccgacgacgcgttgatacgtgcgcgccgcgcttgggcactgctgacggccggcatcggattcggcatggtgtgggcgttcgaggatgcgatgtatggccaggtgtggcattgggatccggtgcagaccgccgtgttcgcagtctggtgtctcctcggcgcccacttgcatggtctctccggctggcgcgcgggccgcccgatgtggcgctggacgccgctcgcggccgcactcgcggcggcgctgaccttggtggcgatgggagtcacgcgacacgatgcgctcgccagttcgcatcgctacgtcggcgcaacgtcgtctttcgtgtacttctcgctcgccggccttctcgtgctgacgatcggcgcaacctgggtgcgcggattgcgccgtgcagcggccgtcgggtcgcagtcgccgctcggcctgtcgacaggggcactgcgtgccacgcaggttgcgttcgtcatcgtgggagtattcgcggccgcacaccttgcgtgggccttcgctgcaagtgcgaaggagttgccgcggccggacgagctgagaccctttttctcgacgctgacgaactgggcgcgcggctccgagttgccatacctgcgctcagccttcgcccagtgggatgtcgatggctatgcgctggcccaggctttgctgtttccgctcatcgtcgtcgggcttctcggcgggtggttcttcctgcggcgtgtgtctgcccggctcgcgtggatgtcgttggcgctcgcgtccgttgcctgcgccggcatatggttcgaaggcggcgtgctcgtccgcgaatactccgggaagggcgttctttcgcagcagatcatcgccgttttgccgcgcatcgacgccagccttgccgcaggcgcgtatctggctctgggcaccgccgtctggagtatccgcactgcgtgcaagacctcggcgaaaggctatgtactgtcgctgggcatggtgcatcttggcgcaatgatgagcctgtggggcgcgctgctttcgaccgccctcaatggctactcgcaacacgtcatcgacgtcgccgaaacctggcagcgcgaccaccacggctatgcgtttcgcgtgacgtcgcttgccgtcgatcattccgccgacggaggacggacgaacggcgaggccggtttccgggcccttgcgcaggtcgagctccggaccccctcgcaccaggtgctgaacggggagacgctgtatcgcgacgggcgccgcgccgtcgaaggctacgccgggccggtgcgccagatctgcgagatcctcgactaccgctacgcgcgctatgcgaacacgccgggctatgtcctcgatccattcatcgatcgcggctgggagcgcgatgtccagctctgggtctccccttcggccgcggtggccgcgctcgaaggcgggccgcaggcctcgcaggtggtcgtggtcctgcgcgtattccctttcgcatcccttctctggatggggctcctgctgacctcggcgggagctctctggctcgcgctgcgccggcccaaggagcattcatga

SEQ ID NO: 68057 - protein, 713 aa, Azoarcus sp. EbN1
MPERTSWVAVILAALAGVLFSGLGDVVIGLAALSVLVAGASARYRLRLCRVGAAALWGSILTLAVLMLADRFDVRYVWLYSGAELPIFLKLSNLWGGDEGTTLLLAAFGASLAARSSSAPLRFDVTAFLAGALALAAATLSPFAATPPEWLERAAYQGMNAHLMKVWMLAHAPLVLAAYAWTLSLASPALAALAGDLARWPDDALIRARRAWALLTAGIGFGMVWAFEDAMYGQVWHWDPVQTAVFAVWCLLGAHLHGLSGWRAGRPMWRWTPLAAALAAALTLVAMGVTRHDALASSHRYVGATSSFVYFSLAGLLVLTIGATWVRGLRRAAAVGSQSPLGLSTGALRATQVAFVIVGVFAAAHLAWAFAASAKELPRPDELRPFFSTLTNWARGSELPYLRSAFAQWDVDGYALAQALLFPLIVVGLLGGWFFLRRVSARLAWMSLALASVACAGIWFEGGVLVREYSGKGVLSQQIIAVLPRIDASLAAGAYLALGTAVWSIRTACKTSAKGYVLSLGMVHLGAMMSLWGALLSTALNGYSQHVIDVAETWQRDHHGYAFRVTSLAVDHSADGGRTNGEAGFRALAQVELRTPSHQVLNGETLYRDGRRAVEGYAGPVRQICEILDYRYARYANTPGYVLDPFIDRGWERDVQLWVSPSAAVAALEGGPQASQVVVVLRVFPFASLLWMGLLLTSAGALWLALRRPKEHS

SEQ ID NO: 68058 - DNA, 1974 bp, Azoarcus sp. EbN1
  CDS (1)..(1974): transl_table=11
atgattcccgaactcggccatttctcgctgatcctggcgctggtgctcgcgctcgtccaggcggtcgtcccgatgatcggcgccaaccgcaaccgcatcgcgctgatggcagtcggacggccggcggcgcaggggcagttccttgccatcgcgttcgccttcggctgcctgacctgggcgttcgtcacgagcgatttctcgttgcagctcgcggcagtcaactcgcataccgacacgccgctgatctacaagatcaccggcgtgtggggcaaccacgaagggtcgctgctgctgtgggcgctgtcgctgtcgctgtggacggtcgcagtgacggtgttcagccgcaatttgccggacgccttcatggcgcgcgtcctcggcgtgctcggctggatcagcgcgggattcctgtcgttcacgctggtcacgtccaaccctttcgaccgcctgctgccggcggtcgcgcagggacgcgacctcaacccgctgctccaggacgccggcatgatcatccacccgccgctgctgtacatgggctacgtgggcttttcggtcgcgttcgcgttcgcgatcgcggcgctgctcagcggccgcatggatgccgcatgggcgcgctggtcgcgaccatggacgacggtcgcgtgggtgttcctcactgccggcatcgcggtcgggtcgggctgggcctactatgagctcggttggggcggctggtggttctgggatccggtcgaaaacgcgtccttcatgccgtggctgctcggcaccgcgctgatccattcgctcgcggtcacggaaaaacgcggcgcgttccgcagctggacgatcctgctcgcgatcagtgcgttctcgctgtcgctgctcggcactttcctggtccgctcgggcgtcatcacgtcggtgcatgcgtttgcgaccgacccgcgccgcggtctgttcatcctcgcgctgctggtcgtcgtgatcggcgtttcgctgacgctgttcgcatggcgcgcgccgaagctcgccggcggcggcagcttcggcctcgtgtcgcgcgacgcgacgctgctcggcaacaacgtcctgctcgcagtggcgacgggttcggtgctgctcggaacgctctacccgctgttcctcgacgcgctgaacctcggcaagatctcggtcgggccgccgtacttcgaagcggtgttcgtgccgctgatgacgccggtcgtggtgctgatggtgctcgggccgttcgtccgctggaaaggggacggcctcgggcgcgtgctgcggccgctgctgccggtgatggtggcgagcatcgcgatcggtctcggtgtcgcgttcgcggtcgggcacgtcacggtgcgcacggtgctcggcctggtgctggcgtcgtgggtgctgctcggcagcgcccggctgctggcgagccgcttcgcggagcgtcgcggcgcgagtactgcggcagtgctgcggggcatcccgttggcgtggtggggaatgtggctcgcgcacgccggcatcggcatcttcatcatcggcgcgacgatggcgggcagtctcaacgagcgcctcgacgtcaagatgcagcccggccagaccgcacaactcgccggctacacgttcacgttccgcggtgtcgccgacgcaccggggccgaactacgacgccgcgcgggcgacgatcgacgtgacgcgcagcggcattccggtcgcgacgctgcacccggaaaagcgcttctacgtcgcgcagcagatgccgatgaccgaggcgtcgatcgacatcggcccgtttcgcgatgtctacgtcaacctcggcgaccgcctcgacgacggcagctgggttgtcggcctgttctacaaacccttcatcagctgggtatggctcggctgcgtgctgatggcaatcgggggcgttttcgcggcctcggatcgtcgctaccgccgcctcgccgagcgtgaagtccctgccggcgcggcgcgccggacgacatga

SEQ ID NO: 68059 - protein, 657 aa, Azoarcus sp. EbN1
MIPELGHFSLILALVLALVQAVVPMIGANRNRIALMAVGRPAAQGQFLAIAFAFGCLTWAFVTSDFSLQLAAVNSHTDTPLIYKITGVWGNHEGSLLLWALSLSLWTVAVTVFSRNLPDAFMARVLGVLGWISAGFLSFTLVTSNPFDRLLPAVAQGRDLNPLLQDAGMIIHPPLLYMGYVGFSVAFAFAIAALLSGRMDAAWARWSRPWTTVAWVFLTAGIAVGSGWAYYELGWGGWWFWDPVENASFMPWLLGTALIHSLAVTEKRGAFRSWTILLAISAFSLSLLGTFLVRSGVITSVHAFATDPRRGLFILALLVVVIGVSLTLFAWRAPKLAGGGSFGLVSRDATLLGNNVLLAVATGSVLLGTLYPLFLDALNLGKISVGPPYFEAVFVPLMTPVVVLMVLGPFVRWKGDGLGRVLRPLLPVMVASIAIGLGVAFAVGHVTVRTVLGLVLASWVLLGSARLLASRFAERRGASTAAVLRGIPLAWWGMWLAHAGIGIFIIGATMAGSLNERLDVKMQPGQTAQLAGYTFTFRGVADAPGPNYDAARATIDVTRSGIPVATLHPEKRFYVAQQMPMTEASIDIGPFRDVYVNLGDRLDDGSWVVGLFYKPFISWVWLGCVLMAIGGVFAASDRRYRRLAEREVPAGAARRTT

SEQ ID NO: 68060 - DNA, 1947 bp, Zymomonas mobilis subsp. mobilis ZM4
  CDS (1)..(1947): transl_table=11
gtgattgccgaatccggtcttatctttttgtggctcgccgccatgatggccttgttgcaaggcctctttggcctgtctgttctgaataatcgccttgatgacgtcttctccggtgccgtcaaaataacagcccttatccaagccgccttggcgctatccgcttttgcaatgctgctttggttgtttatgcgggtggatttatcggtaaccttggtcgctgaaaacgatcattgggcaaaaccgatgctttatcgtgtggccgccagttggggcaatcacgaaggttcaatgctgctttgggtcactattctcagcttttgcggggctttgcttgcgctttttggcgggaagatcgaccagaaattattatctttggctttgggatcgcaagcctttctagccttaggcttttttgcctttttgctctttgtttccaatcctttcgctcgcctcaatccacctgcgacagaaggccttggcttaaatccgctgttacaagacccaggattggcctttcatcctccaacgctttatcttggctatgtcggcctatcggtcgctttttcttttgcggtcgccgctttactgacagggaaagcagatcgtgcctttgcgaaagccatgcgcatttgggttctaggcgcttgggtttttctgactatcggcattaccgcaggcagctattgggcatattacgaattgggctggggcggcttctggttctgggaccctgttgaaaatgccgctttgatgccgtggctcgccgctaccgccttattccattccgtttccgtcctcgccaaaagggattctttacgggtctggacattggtcttggctgttaccgctttttcaatgagcatgatcggcacttttctggtgcgttccggtattctagtcagtgttcatgcctttgcggttgatccatggcggggcagttttatccttggcttgcttgggctttatatcggtggtgccttagccctgtttgcgcttcggatcgctaaaatccaccaaggcaatcattttattctacccagccgtgaagccggtttggtgctgaataatcttttcctcggcgtcattctggcaatcgtgctgattggcacgctctatccgcttctggcggaaatgatgaacggagaaaaactatccgtcggcgcgccttattttaatatgattatcacgccgctagccttgcttctctgccttttgatgcctttcggtacattactccgctggaaacaagaccgttgggcaagtctcaaatggccgcttctggtcggggcagggctattcatcctgacagaagtcattcttgccttaaaaggcctgttctcaaccgcacctcttgcctcaatttctttgggcgttgcggtaatggtagggcttctttgcctctggccactcctccggcaaaagaccatccatctcaatttatggggcatggtgctggcgcatcttggcattgcgataactttaggcggtattgcatcagatacacttttttctcaagaattgctcaccgccctcaaaccgcaacaaacggcgcgtttgggtgattggcaactgcatttcgacagggtaatgcccgatcttggttcggattggacagcgattgtcgccgatatccgcctcgaaagaaacggacaatcttttacccttcatccagctttgcggcattttaccaatcctgtcacggataccagtgaaaccgcccttaaaacaacaaaggccggtcaactctatctggtattgggacaacaggccgaagatggtcgctggcaaattcgtgcttggtggaaacctttggtaacgcttatctgggatggcggtttcctaaccgctttcggcggcatactgatcctgctggataggcttttgcgctatctccagaaacgccgttatcaaaatcgccccgatgaaagacaaaggctgtctttatga

SEQ ID NO: 68061 - protein, 648 aa, Zymomonas mobilis subsp. mobilis ZM4
MIAESGLIFLWLAAMMALLQGLFGLSVLNNRLDDVFSGAVKITALIQAALALSAFAMLLWLFMRVDLSVTLVAENDHWAKPMLYRVAASWGNHEGSMLLWVTILSFCGALLALFGGKIDQKLLSLALGSQAFLALGFFAFLLFVSNPFARLNPPATEGLGLNPLLQDPGLAFHPPTLYLGYVGLSVAFSFAVAALLTGKADRAFAKAMRIWVLGAWVFLTIGITAGSYWAYYELGWGGFWFWDPVENAALMPWLAATALFHSVSVLAKRDSLRVWTLVLAVTAFSMSMIGTFLVRSGILVSVHAFAVDPWRGSFILGLLGLYIGGALALFALRIAKIHQGNHFILPSREAGLVLNNLFLGVILAIVLIGTLYPLLAEMMNGEKLSVGAPYFNMIITPLALLLCLLMPFGTLLRWKQDRWASLKWPLLVGAGLFILTEVILALKGLFSTAPLASISLGVAVMVGLLCLWPLLRQKTIHLNLWGMVLAHLGIAITLGGIASDTLFSQELLTALKPQQTARLGDWQLHFDRVMPDLGSDWTAIVADIRLERNGQSFTLHPALRHFTNPVTDTSETALKTTKAGQLYLVLGQQAEDGRWQIRAWWKPLVTLIWDGGFLTAFGGILILLDRLLRYLQKRRYQNRPDERQRLSL

SEQ ID NO: 68062 - DNA, 2001 bp, Silicibacter pomeroyi DSS-3
  CDS (1)..(2001): transl_table=11
atgatcgaaacgtcgatagagcttggtcagttcgcggtcagccttgccctgatcctgagcgtatttggctgctttcaggctgtgctggcggcccggtcgggggcagcgtcacggctggtatcggcccgaaacgcaatcttcgcaaacttcgtgcttgcgacgattggctgcgccgttctgatccaggcgttcgtgacctcggatttctcggtcgcctatgtggcgcagaacagcaaccgggatctgccgatgctctacaaggtgacggcaatgtggggcgcgcatgagggcagcctgcttctgtggctgtggtatctgacgctgttttcggccgccgcagtctggctgcactggcgggactacccgaaatccatgccctgggtgatcgccacgctggcggcgattcagctggggttcctggcctttgtcgttttcctgtcaaacccgttcctgacgctcacgccgatgcccggaaacgggcgtgatctgaaccctcttctgcaggatccgggcctcgcctttcatccgccggttctctatctcggctatgtcggctttgccgtgccctttgcctttgccatcgcttcgctgatccggggtcagaccggggtggaatgggtcaccgtggtgcgccgctgggtgctgtttgcgtggacggcgctgacctcgggcatcatttgcggcggttactgggcctattacgagctgggctggggcgggtactgggcctgggacccggtcgagaacgcctcgttgatgccctggctcaccggcaccgcgttgctgcattcgatgatggtgcaggacaagcgcgggatgttccgggcctggaacgtgtttctggtggtcaccaccttcctgctgaccctgctgggaacattcctggtgcgttcgggcgtgctgacatcggtccatgcctttgccgtcgatcccgggcgcggagcctatatgctgggcttcatgactgtcgcgatggtggtcggttacgggctgatcattctgcgggcggaccggctgcaggatgacggcggcatctcgtcacttctgtcgcgcgaggctgcgatccttggcaacacggtgctgctgctggtggtgacggccacggtcatggccggtacgcttttcccgctggtggtcgaggtcttctcggacgccaagatcagcatcggcgcgccctactataacaaggtcatcgtccccatcatggtggcgctggtctttctgctggggctggggccatcggtgccctggcggcagatgagtgcgaaacgcttcgtgggccggtttcgcctgccgctggcttttgccgggctgacggctgttgccgcggtgctggtcagcgaggccgggatcatcactcttgccgcgatctttgcggtaggtttcgcgggctttgcatcactggcggatattgccagtgcgattgccgctcggcgccgggtgatggagcagggggtgctgcgcgccacgggcgacgtgctgacacattcccgacagcgtatcggcgcgctgatcattcatttcggggtcgtcatgatcggggctggcatgattgcatcgggcctgttccagaccacccagaccgtggccatgcgcatcggcgacagggcagaggcgggcggctacacgctgacgctgcgcgagcttcaggataccggcagcgccaattacaacgcgcgggtcgcacggttcagtatcagccgcgacggggagttgctgttcgagatggcgcccgaaaagcgattctatccggtccgcgaaatggcaacgaccgagattgccatccggtcatcgctggccggggatctctacatggtcatgggcgatgaggatgggcagggaacggttgtcgtccgcatcttctggaacccgctggtcaactggatctggctgggatggctggttctgctgctgggcgcgttgctgtccttgtcaaaaccgtcgcgccgggcggcgcggagccgcacgcccgaaccgatcgaaggagtgcccgcagaatga

SEQ ID NO: 68063 - protein, 666 aa, Silicibacter pomeroyi DSS-3
MIETSIELGQFAVSLALILSVFGCFQAVLAARSGAASRLVSARNAIFANFVLATIGCAVLIQAFVTSDFSVAYVAQNSNRDLPMLYKVTAMWGAHEGSLLLWLWYLTLFSAAAVWLHWRDYPKSMPWVIATLAAIQLGFLAFVVFLSNPFLTLTPMPGNGRDLNPLLQDPGLAFHPPVLYLGYVGFAVPFAFAIASLIRGQTGVEWVTVVRRWVLFAWTALTSGIICGGYWAYYELGWGGYWAWDPVENASLMPWLTGTALLHSMMVQDKRGMFRAWNVFLVVTTFLLTLLGTFLVRSGVLTSVHAFAVDPGRGAYMLGFMTVAMVVGYGLIILRADRLQDDGGISSLLSREAAILGNTVLLLVVTATVMAGTLFPLVVEVFSDAKISIGAPYYNKVIVPIMVALVFLLGLGPSVPWRQMSAKRFVGRFRLPLAFAGLTAVAAVLVSEAGIITLAAIFAVGFAGFASLADIASAIAARRRVMEQGVLRATGDVLTHSRQRIGALIIHFGVVMIGAGMIASGLFQTTQTVAMRIGDRAEAGGYTLTLRELQDTGSANYNARVARFSISRDGELLFEMAPEKRFYPVREMATTEIAIRSSLAGDLYMVMGDEDGQGTVVVRIFWNPLVNWIWLGWLVLLLGALLSLSKPSRRAARSRTPEPIEGVPAE

SEQ ID NO: 68064 - DNA, 1965 bp, Silicibacter pomeroyi DSS-3
  CDS (1)..(1965): transl_table=11
atgattacggaactcggtcacttcgccctcatcctcgccttcatggtcgccatcgtgcaaatggtcgtgcccttgatcggagcccataaacgctggcccggctggatggccctggccgaaccggcggcaggggcgcaattcctgctcaccgcctttgcctttgccgcgctggtctgggcctttgtgacctcggatttctcgctgcggctggtggtgttgaacagccattcggccaagccgatgctgtacaagatcagcggcacatggggcaatcacgaggggtccatgctgctctgggtgctgatcgtcaccctgtttggcgccatggcggcctggtttggcggcggtctgccgccgacgctcaaggcccgcgtgctggcggtgcaatcggcgattgcggtggcgttcttcgccttcatcctgtttacctcgaacccgttcctgcggctggcggtgccgccctttgacgggcaggacctgaacccgctgttgcaggatccgggcctcgcgttccatccgccgttcctctatctcggctatgtgggcctgagcatggcgttttcctttgccgtggctgccctgatcgaggggcgcgtcgatgccgcctggggccgctgggtgcggccctggacgcttgcggcctggattttcctgaccatcgggatcgcgctgggctcgtggtgggcctattacgagctgggttggggcgggttctggttctgggatccggtggaaaatgccagtttcatgccctggctgctggccgccgccttgctgcattcggccatcgtggtggaaaagcgcgaggcgttgaaaagctggaccatcctgctggcgatccttgccttcggcttctcgcttatcgggacgttcatcgtgcgctcgggcttgctgaccagcgtgcatgcctttgccaatgaccctgagcgcggcgtgttcatcctgattatcctcggcctttttaccggcggcgcgctgacactgttcgccgcgcgcgcgcaggcgatggaggccaagggcgtcttttccatggtcagccgggaaagcgcgctggtgctcaacaatatcctgctggcggtgtcggcctttgtggtgttcttcggaacgctctggccgatcctggccgagatgttctttgaccgcaaactctcggtcggggcgccgttcttcaacgcggccttcacaccgttcatggtggcgctgggggtggtgttgccgctgggcgccatgctgccgtggaaacgcggcaagctgggccgggtggcgcacagcctgcgctatgcctttgtgctggcgctggcgctggcgatcctggtctgggtcatgcagaccgggcgcagcgcgctgggtccggtgggtctgttcctgggggcctggatcacctttggcgctattgtcgatctgtggtcgcgcaccgggcgcagtggcagcgtggcgcggctgttccgtctgccgcgcgccgactggggcaaggcggtggcccattccggtctgggtgtcaccatgttcgcgattgccgggctgatggcctgggaggtcgaggatatccgcgtcgcccgtctcggcgaacctttcgaggtgggcgggttcaccctgacgctcgacggggtcgagcgcgtgcaggggcccaactatatctcgaccatgggcagtgtccgcctggaacaggcgggtcgggccatcgacacgctgcaccccgaaaagcgcgactatccggttgcgcgcatgcccaccacagaggcggcgatcgactatcgcattctgcgcgatgtctatgttgtgatcggcgaccagcaggacgacggcggctggaccatacggacctatatcaagccctttgccaactggatctggggcggctgtatcctgatggcgcttggcggcgcgctcagcctcagcgaccggcgcttccgggtggcggcgggtgcgcgcaaggcaccggccggcggggtgcccgcggaatga

SEQ ID NO: 68065 - protein, 654 aa, Silicibacter pomeroyi DSS-3
MITELGHFALILAFMVAIVQMVVPLIGAHKRWPGWMALAEPAAGAQFLLTAFAFAALVWAFVTSDFSLRLVVLNSHSAKPMLYKISGTWGNHEGSMLLWVLIVTLFGAMAAWFGGGLPPTLKARVLAVQSAIAVAFFAFILFTSNPFLRLAVPPFDGQDLNPLLQDPGLAFHPPFLYLGYVGLSMAFSFAVAALIEGRVDAAWGRWVRPWTLAAWIFLTIGIALGSWWAYYELGWGGFWFWDPVENASFMPWLLAAALLHSAIVVEKREALKSWTILLAILAFGFSLIGTFIVRSGLLTSVHAFANDPERGVFILIILGLFTGGALTLFAARAQAMEAKGVFSMVSRESALVLNNILLAVSAFVVFFGTLWPILAEMFFDRKLSVGAPFFNAAFTPFMVALGVVLPLGAMLPWKRGKLGRVAHSLRYAFVLALALAILVWVMQTGRSALGPVGLFLGAWITFGAIVDLWSRTGRSGSVARLFRLPRADWGKAVAHSGLGVTMFAIAGLMAWEVEDIRVARLGEPFEVGGFTLTLDGVERVQGPNYISTMGSVRLEQAGRAIDTLHPEKRDYPVARMPTTEAAIDYRILRDVYVVIGDQQDDGGWTIRTYIKPFANWIWGGCILMALGGALSLSDRRFRVAAGARKAPAGGVPAE

SEQ ID NO: 68066 - DNA, 1971 bp, Rhodobacter sphaeroides 2.4.1
  CDS (1)..(1971)
atgattgtcgaactcggccatttcgcgctggtgctgtcgctggctgtggcccttgtgcagtccgtggtgccgctcgtcggcgcggatcggcgctggtctggctggatggcggtggccgaacccgcggcggtcacccagcttctgctgatcggcttctccttcgccgcgctgacctgggccttcgtgacctcggatttctcggtgcgcctcgtggtgctgaactcgcacacgctgaagcccatgctctacaagatcagcggcgtctgggggaaccacgagggctcgctgctcctgtgggtgctgatcctcgcgctgttcggagcctgcgccgcggtcttcgggcagaacctgccgcccacgctcaaggcgcgcgtgctggcggtgcaggggatgatcggcgcggccttcctggcctttctcctcttcacctcgaacccgttcctgcgcatgggcgaggtgcccttcgacggcgaggatctgaacccgctcctgcaggatccgggcctcgccttccacccgcccttcctttacctcggctatgtcggcctctcgatggccttctccttcgcggtggcggccctgatcgagggccgcgtcgatgccgcctggggccgctgggtccggccctggacgctcgccgcctgggtgtttctcaccatcggcatcgcgctcggctcctggtgggcctattacgagctcggctggggcggcttctggttctgggacccggtcgagaacgcctccttcatgccctggctgatcgcggcggcgctgctccactctgccatcgtggtcgagaagcgcgaagcgctgaagagctggacgatcctgctggccatcctcgccttcggcttctcgctcattggcaccttcatcgtgcgctcgggcgtcatcacctccgtccatgccttcgccaacgatcccgagcgcgggatcttcatcctgatgatcctcgcggtcttcatgggcggggcgctcacgctcttcgccgcgcgggcgagcgccatggaggccaagggggtcttcggcatcgtcagccgcgagtcgggcctcgtgctgaacaacgtgctgctgacggtggcctgtttcgtggtcttcatcggcacgatctggccgctcctggccgaactcctctggggccgcaagctgtcggtgggtgctccgttcttcaacgcggccttcacccccttcatggtggtgatcgccctcgtcctgcctctgggcgccgtcctgccctggaagcgggccgagctcggccgcgggatgcggccgctctggggggcgctcgcgctctcggcggccctgggtgcgctggtcttcgcgctgcagacgggccggtcggcgctcgggcccgtcggcctcgcgctcggcgcctggctcgtcttcggcacgctcctcgacctctggggccgcaccgggcgcggcgcgctcggcgggcggctcgcgcgcctccggcgactgccgcgcgcggactggggcaaggccactgcccatgcgggcctcggcgtcacgatcttcgccgtggcggccatcaccgcctggcaggtcgagtcgatccgcgtgatgaagccgggcgagaccttcgccctcggccgctacgacgtcctgctcgagggcgtgcgcgagatcgaggggccgaactaccgctcgaccgtggccgacttccgcgtgacccgcgacggggccgaagtggcgacactccatcccgagaagcgcgtctatccggtggccgccatgcccacgacggaagccgccatcgactacggcttcacccgcgacctctacctcgtgatcggcgacccgcaggagggcggcggctatgcggtgcgcagctacatcaagcccttcgccaactggatctggggcggcgcgctgctgatggcgctcggcgggctgctgagcctctcggaccgccgctaccgcatcgccgccggggcgcgccggatgccggccgcggtggctgcagaatga

SEQ ID NO: 68067 - protein, 656 aa, Rhodobacter sphaeroides 2.4.1
MIVELGHFALVLSLAVALVQSVVPLVGADRRWSGWMAVAEPAAVTQLLLIGFSFAALTWAFVTSDFSVRLVVLNSHTLKPMLYKISGVWGNHEGSLLLWVLILALFGACAAVFGQNLPPTLKARVLAVQGMIGAAFLAFLLFTSNPFLRMGEVPFDGEDLNPLLQDPGLAFHPPFLYLGYVGLSMAFSFAVAALIEGRVDAAWGRWVRPWTLAAWVFLTIGIALGSWWAYYELGWGGFWFWDPVENASFMPWLIAAALLHSAIVVEKREALKSWTILLAILAFGFSLIGTFIVRSGVITSVHAFANDPERGIFILMILAVFMGGALTLFAARASAMEAKGVFGIVSRESGLVLNNVLLTVACFVVFIGTIWPLLAELLWGRKLSVGAPFFNAAFTPFMVVIALVLPLGAVLPWKRAELGRGMRPLWGALALSAALGALVFALQTGRSALGPVGLALGAWLVFGTLLDLWGRTGRGALGGRLARLRRLPRADWGKATAHAGLGVTIFAVAAITAWQVESIRVMKPGETFALGRYDVLLEGVREIEGPNYRSTVADFRVTRDGAEVATLHPEKRVYPVAAMPTTEAAIDYGFTRDLYLVIGDPQEGGGYAVRSYIKPFANWIWGGALLMALGGLLSLSDRRYRIAAGARRMPAAVAAE

SEQ ID NO: 68068 - DNA, 1941 bp, Xylella fastidiosa Dixon
  CDS (1)..(1941)
atgctgcctgagtttggccagatcctcctgatcctcgccctgctgacagcactgctgcagggactgcttcccctgattggcgcccagcgccgccgcactgcttggatggccgttgcacgcccagccgcctatgtgcaactgagcctgctcgctagcgcattcgcactgctcacctatgccttcctcggcaacgacttctccgtccagtacgtcgccgaaaattcccattcactgctacccaccctctaccgctctaccgccgtatggggtgcccacgaaggatccctcctactctgggtattactcctggcaggatggaccgccaacgtcgccttacgttcccacacccttccagccaccctgagcgcacgcatccttggcgtcctgggcctgattgcactcggcttcctcgcactgatcctcttcacctccaacccattcgcacgtctcctgcctgccgccccagaagggaacgacctcaacccgttgctgcaagatcctgggatgattctgcatccccccctgttatatgccggctacatcggtttggcagtgccattcgcctttgccgtcgcggtcctgctggaaggacggatagagccagcctggctacgctggagccgaccttggaccaacatcgcctgggcactgctgaccttgggcattgccctgggcagctggtgggcctattacgaactcggctggggcggctggtggttctgggacccagtggaaaacgccagcttcatgccttggctcatcggtgtcgcactgattcattcccaagcgatcaccgacaaacgcggcagcttcacccactggacactcttgctcgcaatcaccgcctttgcactagcactgcttggcacattcctcgtccgctcaagcgtactgacctcagtccatgcctttgctgctgatccggtacgcggcgcgtttattctgctgctcatcttcacgttgattggcggcgcactgctgctgtatgcacggcgtgcaccgcaactcacccccgtcacaatggacatgcaacaacgctttacacccgtctcacgcgaaaccctattactgctcaacaacctattgctgacctgcgcctgtgcgatggtactgctaggcaccctatatcccctgctggccgatgcactggcactgggtcaactttcagtcggcccaccctacttcggccccctattcaccctgctgatgacaccactaatcgtcttactgccattgggtccattcacccgatggcaacgcgaacacccctcaacacccctcgtattgctggccccttgggccgcactgagcctggctgtcgccgcactggctggcatcaccacaccacaacaccattggaaaaccatgctcagcgtggccgcggcagcatgggtactcctaggaaccctccgcttcctctggtggcactggcgcaccaccggatcccgtcccacccccagcaccctgggcatggtcctggcacacgccggaattggcgtcttcctcactggtgcgctgttagttgaaacactcagcctacaacgtgaaattgcactcaccccgggccagacactcacccttggccccatcaccctacactttgatgccctcctcgaacaccacggccccaactacgtggctgatcgcgcccaattcagcctattacgcaacacgcatcccctgggcaccctgacgacagaaaaacgccgctatgtcagcggcggccaagtcaccaccgaagttggcatccatcctggagcgctcggtgacatttacgtcgccttaggagaatcgctcggcaatgggtcatgggcaattcaggcacactacaaaccattcgtccgttggatctggctgggcgcagcactgatggccctgggtgggctgatcgctgctgctgatcgccggttccgccaccacccggagtcatcgcatgtctga

SEQ ID NO: 68069 - protein, 646 aa, Xylella fastidiosa Dixon
MLPEFGQILLILALLTALLQGLLPLIGAQRRRTAWMAVARPAAYVQLSLLASAFALLTYAFLGNDFSVQYVAENSHSLLPTLYRSTAVWGAHEGSLLLWVLLLAGWTANVALRSHTLPATLSARILGVLGLIALGFLALILFTSNPFARLLPAAPEGNDLNPLLQDPGMILHPPLLYAGYIGLAVPFAFAVAVLLEGRIEPAWLRWSRPWTNIAWALLTLGIALGSWWAYYELGWGGWWFWDPVENASFMPWLIGVALIHSQAITDKRGSFTHWTLLLAITAFALALLGTFLVRSSVLTSVHAFAADPVRGAFILLLIFTLIGGALLLYARRAPQLTPVTMDMQQRFTPVSRETLLLLNNLLLTCACAMVLLGTLYPLLADALALGQLSVGPPYFGPLFTLLMTPLIVLLPLGPFTRWQREHPSTPLVLLAPWAALSLAVAALAGITTPQHHWKTMLSVAAAAWVLLGTLRFLWWHWRTTGSRPTPSTLGMVLAHAGIGVFLTGALLVETLSLQREIALTPGQTLTLGPITLHFDALLEHHGPNYVADRAQFSLLRNTHPLGTLTTEKRRYVSGGQVTTEVGIHPGALGDIYVALGESLGNGSWAIQAHYKPFVRWIWLGAALMALGGLIAAADRRFRHHPESSHV

SEQ ID NO: 68070 - DNA, 1917 bp, Actinobacillus pleuropneumoniae serovar 1 str. 4074
  CDS (1)..(1917)
atgcttcctgagttgggttattttacgttaatttttgcagcggttgccgctgtttgccaagtggggctgacattgtggggagagatcactaagaaaacggattttcttcgatacaatgcgttgttgagcagcctgcaaacggtaggttgtttgtcgtcgttcgggatattggcttacgcttttttgagtgatgatttttcggtgatttatgtcgcccaacattccaacagccaattaccggatttctttaaatttgcggcgacttggggcggacacgaaggctcaatgctgttttggctgaccgctctgacactatggaccagcgttttttgcattttttcggataaatctgaccgcttgtttaatcagcgaaccttggcggtattaggtttaatcagccttggatttatgctctttattttattggtttccaatccgtttgagcgtagttttccgcctccgccggagggcagagatcttaacccgatgttgcaagacgtagggcttatcttccatccgcctttactttatttaggttatgtcggttttgcggtaagctttgcaatggtcgtggcggcattaatggaaggtatgctggatgccgcagtagtgcgttggattcgaccttggacaatgatctcttggggctttcttaccgcagggattattctcggtgcatggtgggcgtattatgaactgggctggggcggctggtggttctgggatccggttgaaaacgcttcgttaatgccgtggctattgggaaccgcattagtgcatagcttggttgtgagcgagcagcgcggtatttttaactattggacgattttactggcgatttttgcttttgcattgagcttactcgggacttttatcgtgcgttccggcgtactcacttcggtacatgcgtttgcagttgatccggatagaggaatggcactgcttattctgtttttcagtttaagttttattgcgttagccttgttcgcttttagagtgaatttgtggcagggcgaagtgcgtttccaaccgctatccaaagaaaccgctttattattagtaaacggcttattgagcgtagcgacttcggttgtcctactcgggactttttacccgatgatttttacggcgatgaattggggctcgatttcggtcggcgcaccttatttcaataatgtttttgcaccgttggcattattattaatgacggtaatgggatttgccgtcgtattgcgttggaagcaaattccgtcaaaacaaattctgatgaaattatggctgttaccggtagcggtaggattgagtttcctattgattcaacaaacgatttcgcaaacaaagttgtatcaatttggcgtcttgccgacggtattcgtcagccttgccgtttggattattctgacgcatttgccttattcggcgaaatttctgaaaatccgaccgcttgctatgcgtttggcgcatatcggttttgcgatttgtgttattggtgccatgatgaacagttattacggcgatgaaatcggcgtacgtttaaaaccgcagcaacaggcggatcttgccggatttacctttaaatatgaagattatcaggatgggatcggtgcgaactatacgtccgaaaatgcgttatttagcataagcaaagcgggaaaaacgcttgcgacggtagtggcggagcgccgctattacgatattcgtaccatgacgatgtcggaagtcgggctttatcatcacggcttggacgatatttatattgtgatgggcgataaattcggcaatttggaatatgctttccgtttgcattataagccttatgtcggcgcattatggcttggcggtattattatggtgatagcttccatacttgccttattcggttatcgtcgaaaatcggatcttacagcggataaataa

SEQ ID NO: 68071 - protein, 638 aa, Actinobacillus pleuropneumoniae serovar 1 str. 4074
MLPELGYFTLIFAAVAAVCQVGLTLWGEITKKTDFLRYNALLSSLQTVGCLSSFGILAYAFLSDDFSVIYVAQHSNSQLPDFFKFAATWGGHEGSMLFWLTALTLWTSVFCIFSDKSDRLFNQRTLAVLGLISLGFMLFILLVSNPFERSFPPPPEGRDLNPMLQDVGLIFHPPLLYLGYVGFAVSFAMVVAALMEGMLDAAVVRWIRPWTMISWGFLTAGIILGAWWAYYELGWGGWWFWDPVENASLMPWLLGTALVHSLVVSEQRGIFNYWTILLAIFAFALSLLGTFIVRSGVLTSVHAFAVDPDRGMALLILFFSLSFIALALFAFRVNLWQGEVRFQPLSKETALLLVNGLLSVATSVVLLGTFYPMIFTAMNWGSISVGAPYFNNVFAPLALLLMTVMGFAVVLRWKQIPSKQILMKLWLLPVAVGLSFLLIQQTISQTKLYQFGVLPTVFVSLAVWIILTHLPYSAKFLKIRPLAMRLAHIGFAICVIGAMMNSYYGDEIGVRLKPQQQADLAGFTFKYEDYQDGIGANYTSENALFSISKAGKTLATVVAERRYYDIRTMTMSEVGLYHHGLDDIYIVMGDKFGNLEYAFRLHYKPYVGALWLGGIIMVIASILALFGYRRKSDLTADK

SEQ ID NO: 68072 - DNA, 1974 bp, Pseudomonas aeruginosa UCBPP-PA14
  CDS (1)..(1974)
atgatccccgaactcggccacctggccctgatcctcgccctttgcctggccctggtgcagtcgagcctgccgctggtcggcgcctggcgcggcgaccgccagtggatgagcctggcgcgcccagcggcctgggggcagttcgccttcctcgccttcgccttcggctgcctgacctgggccttcctgcgcgacgacttctcggtggcctacgtggccggcaactccaacagcgcgctgccctggtactacaagttcagcgccgtctggggcgcccacgaaggttcgctgctgctctgggcgttgatcctcggcggctggaccttcgccgtgtcgatcttctcccggcaactgccggaggtcatgctggcccgcgtgctggcggtgatgggcatgatcagcaccggcttcctgctgttcctgatcatcacctccaacccgttcagccgcctgctgccgcagaccccgatggacggcaacgacctcaacccgctgctgcaggacgtcggcctgatcgtccacccgccgatgctctacatggggtacgtcggattctcggtggccttcgccttcgccatcgccgcactgctcggcggccgcctggacgccgcctgggcgcgctggtcgcggccctggaccctggtggcctgggccttcctcggtatcggcatcgtgcttggctcctggtgggcctactacgagctgggctggggtggctggtggttctgggacccggtggaaaacgcctccttcatgccctggctggtcggcactgcactgatccactcgctggcggtgaccgagaagcgcggcgtgttcaagagctggaccgtgctgctggcgatcgccgctttctccctgagcctgctgggcaccttcctggtccgctccggcgtgctcacctcggtgcacgccttcgcctccgacccggagcgcggggtgttcatcctcgccttcctgctgctggtggtcggcggctcgctgaccctgttcgccctgcgcgcgccggtggtcaagagccaggtcggcttcgccctgtggtcgcgcgagaccctgctgctgctgaacaacctggtgctggtggtggcggcctcgatgatcctcctcgggactctctacccgctgctgctcgatgccctcagcggcgccaagctgtcggtcggcccgccgtacttcaacgccatgttcctgccgctgatggcggcgctgatggcggccctggcggtcggcgtgctggtgcgctggaaggacaccccgagccgctggctgctcggcatgctgaccccggtgctggtggccagcgcggtcctggcggcggccggttcgatgtacttcggcgatttcaactgggcggtgctggcggtgttcctgctgtccgcctgggtggtcctggccggtttccgcgacttcctcgacaagacccggcacaagggcgtgctggccggcgcccgcagcctgacgcgcagctactggggcatgcaactggcgcacctgggcatcgccgtgtgcgccatcggcatcgtcctcagcagccagtacagcgcccagcgtgacctgcgcatgtcgcccggcgacaccgtcgaactgggcggctaccacttcctcttcgacggcgcgaagcaccacgaagggccgaactacacctcggacaagggcagcatccacgtcagccgcgacggcaaggagatcgccaccctgcatccggagaagcgcctgtacaccgtgcagagttcgatgatgaccgaggccgggatcgatgccggctttacccgcgacctctacgtggcgctcggcgagccgctggagaacggtgcctgggcggtgcgcgtgcacgtcaagccgttcgtccgctggatctggttcggtggcctgctgatgggcctcggcggcgccctggcggcgctcgaccggcgctaccgggtgaaggtgaaaacacgtgtgcgcgaggccctgggcctcgccggtcagggagcctga

SEQ ID NO: 68073 - protein, 657 aa, Pseudomonas aeruginosa UCBPP-PA14
MIPELGHLALILALCLALVQSSLPLVGAWRGDRQWMSLARPAAWGQFAFLAFAFGCLTWAFLRDDFSVAYVAGNSNSALPWYYKFSAVWGAHEGSLLLWALILGGWTFAVSIFSRQLPEVMLARVLAVMGMISTGFLLFLIITSNPFSRLLPQTPMDGNDLNPLLQDVGLIVHPPMLYMGYVGFSVAFAFAIAALLGGRLDAAWARWSRPWTLVAWAFLGIGIVLGSWWAYYELGWGGWWFWDPVENASFMPWLVGTALIHSLAVTEKRGVFKSWTVLLAIAAFSLSLLGTFLVRSGVLTSVHAFASDPERGVFILAFLLLVVGGSLTLFALRAPVVKSQVGFALWSRETLLLLNNLVLVVAASMILLGTLYPLLLDALSGAKLSVGPPYFNAMFLPLMAALMAALAVGVLVRWKDTPSRWLLGMLTPVLVASAVLAAAGSMYFGDFNWAVLAVFLLSAWVVLAGFRDFLDKTRHKGVLAGARSLTRSYWGMQLAHLGIAVCAIGIVLSSQYSAQRDLRMSPGDTVELGGYHFLFDGAKHHEGPNYTSDKGSIHVSRDGKEIATLHPEKRLYTVQSSMMTEAGIDAGFTRDLYVALGEPLENGAWAVRVHVKPFVRWIWFGGLLMGLGGALAALDRRYRVKVKTRVREALGLAGQGA

SEQ ID NO: 68074 - DNA, 1659 bp, Rickettsia sibirica 246
  CDS (1)..(1659): transl_table=11
atgttattatggttttgtttattacaaatcgttagttgctgttatatatttttacttgaagataaccgtcttaaatttttatctattattattctatcagccatacaattattttttagcagctttatttactttacctccaatccttttaacgtgttttctttcgttcctaaagaagggttaggcttaaacccgatgctacaagatattgctttgagcatccatcctcctctgctttatttaggctatgttagctatgtagtaccgtttactattgtttgtgcctctatgtcattctcatacccacttatgtcattcccgcgaaagcgggaatccattaatgacataagactgctcaaaacattttccaatatcggtatcttatttactaccataggaattagccttggttcttggtgggcatatagagaactcggctggggcggattttggttttttgatccggtagaaaatatttcactatttccttggttatccggaattatgctccatcattctataattgtaacaacaaaaaccagacgtatgcaaaactggacagtaattttatccatcattacttttttattagtaatatttagtgcttttttagtacgttccggttttattacctcaattcactcttttgcattctcacctgagagaggaatatacttgcttggaatatttttgattatggggattggtagtattgggtggtatactaccacatcattgcgaggaaatgcattaacattgacgaagcaatctcaggaagctaaccgagattgccacagccactttcgtggcttcgcaatgacgcattgtggaaactccatactcctcggtaatatattcctccttcttagccttattgtgctaatagctgccacactttatccaccaatttactctttattcgacgataaatctattattattagtgaaacattttttattaataattttattatattcgttatccctattcttggtaccataggattatttactaccagaagctctattaaaaaacatattataattctaatattatctctaataattacttatttaatatcattaaaagtaacatttagtgttatatcgattttaactataatcgcatctatatttcttatgcttcataatattcattatcttttggttaaaactaattattgtagaaatagacttaaagcaagtaacgctagtatgatccttgggcatttcggttttgcactaattagttttagtattactatgaatacattattacaaagtgaaatggattttaccggcagagtaggaacaagtaaaacatttaacgaatttaaagtaacattgcaaaatattaagtttgctcaaggtaaaaattattatagacaaatcgctgaattttggcttgaggataatagccgtaatataactatattaaagccggaaaatagactttatatagttgaaaagagtttatcgcaagaaagtgatatatactcttacttattatatgatctttacgcagttttaagtaatatagacggcgatataatccatgctaaaatatattacaagccaacgataagctttatttggcttggaattattcttaccgcgtccggtttttttattgcactaatcagaaaaaattctagctaa

SEQ ID NO: 68075 - protein, 552 aa, Rickettsia sibirica 246
MLLWFCLLQIVSCCYIFLLEDNRLKFLSIIILSAIQLFFSSFIYFTSNPFNVFSFVPKEGLGLNPMLQDIALSIHPPLLYLGYVSYVVPFTIVCASMSFSYPLMSFPRKRESINDIRLLKTFSNIGILFTTIGISLGSWWAYRELGWGGFWFFDPVENISLFPWLSGIMLHHSIIVTTKTRRMQNWTVILSIITFLLVIFSAFLVRSGFITSIHSFAFSPERGIYLLGIFLIMGIGSIGWYTTTSLRGNALTLTKQSQEANRDCHSHFRGFAMTHCGNSILLGNIFLLLSLIVLIAATLYPPIYSLFDDKSIIISETFFINNFIIFVIPILGTIGLFTTRSSIKKHIIILILSLIITYLISLKVTFSVISILTIIASIFLMLHNIHYLLVKTNYCRNRLKASNASMILGHFGFALISFSITMNTLLQSEMDFTGRVGTSKTFNEFKVTLQNIKFAQGKNYYRQIAEFWLEDNSRNITILKPENRLYIVEKSLSQESDIYSYLLYDLYAVLSNIDGDIIHAKIYYKPTISFIWLGIILTASGFFIALIRKNSS

SEQ ID NO: 68076 - DNA, 2046 bp, Psychrobacter sp. 273-4
  CDS (1)..(2046)
atgttaatcacagaattgggttattttgccgtgctagccgcctttatgttggcgattttgcaggtagtattaccaacaataggcgttatgcgtgaccatgttgcttggcagcgtttggcaccgagcttggcgtgggcgcagtttgcagccatgattacctcgtttggcgcactaatggcaggcttttattttaatgactttagccttgtctatgtgtcgcagcactcgaatactttgctgccttggtattataagctatcagcgacgtggggcgggcatgaaggctcgctcctgctatggatgactatcatggcaacgtggtgtgccttggtctcatactttagtcgtggtttaccattgtcgatgcgcgcgcgcgtattggtgatattagccggtgtacagatgatgatgctggcaatgctcatctttacctcgtcaccgtttgaccgcactttaccaaacctgccagtggatggtgctgacctaaatcctgtcttacaagactttggtctaattatccatccaccgatgctgtatatgggctatgttggtatggtggtgccgtttgcattttgtatggcagcattgtgggaaggtcgcttggatgcggtatggacacgctggtcacgtccatgggcattggctgcttgggggtttttaaccatcggtattgcactaggttcgtggtgggcatattacgagcttggttggggtgggtggtggttttgggatccagtagaaaacgcttcattgctgccttggctggcaggtttggcattgctacattcgcttgcagtcactgaaaagcgtggtgtctttaaagcgtggacgattatgctggcaatttttgcctttgcattaagcttactcgggacatttttggtacgctctggggtaattacctctgtgcattcatttgccgcagatcccacgcgtggtttagtggttttagcgattcttgggattattattggtggtggtttattgatgtttgctgtacgtggctggcgtcttacgatcgagagtcagtatcagctgatttcacgtgagtcgtttttagtcattaacaacgtcattattttgattgcgaccttagtggtattacttggtacgctatatcccatcattgccgatgcctttaatttaggtcaggtatccgtaggtcctccgtattttaatgcgctgtttgtaccgttgacttggctattgatggtagcaatgggcatgggctctaatatccgctggaaacaagacagccgtccgttattgggcgttggcatggtcattgcggcaagtagccttgttttagccgcagttattgcctattttgttagcccatctgccatgctcaatattggcgtgacgctagcggtgagtttttgggtattgttatggatggtagttgattttaaagacaagaccaaaaatgccccaagcttctttaaaggcttagctaagctgcgtttaagctactggggtcagcagacagctcacattggcgttattatagcggtcattggtattgcctttaccagtaccttaagtattgagcgcgatgtggcattgggtgaaacggatactgttcatgtgcaagggtacgactttgaaataaaagacttccatgaagtcagaggcagtaactttgatggtatgcaagcagaagttgaagtgaccaaagacggtcgcccagtcgttactttatatccagaaaaacgtacctatgttatcagtggtatgccactgactgaggcagcgattgatgccagccttatgcgtgatgtgtacgtagcactcggtgagcctatcgctgaagacggcaaccaatgggcgatacgtatttacgtgaagccattgattcgctggatatggcttggcgctattattatggcattgggtggtctgctgagtatgcttgataggcgctatcgtctcaaaacaactaagacgcccgctcaaatcgcagcgagtaagtcaggttttgcgaccgttgctgacttagatattaacaatgcgacagatgccacggcaccaatgggggagaagtaa

SEQ ID NO: 68077 - protein, 681 aa, Psychrobacter sp. 273-4
MLITELGYFAVLAAFMLAILQVVLPTIGVMRDHVAWQRLAPSLAWAQFAAMITSFGALMAGFYFNDFSLVYVSQHSNTLLPWYYKLSATWGGHEGSLLLWMTIMATWCALVSYFSRGLPLSMRARVLVILAGVQMMMLAMLIFTSSPFDRTLPNLPVDGADLNPVLQDFGLIIHPPMLYMGYVGMVVPFAFCMAALWEGRLDAVWTRWSRPWALAAWGFLTIGIALGSWWAYYELGWGGWWFWDPVENASLLPWLAGLALLHSLAVTEKRGVFKAWTIMLAIFAFALSLLGTFLVRSGVITSVHSFAADPTRGLVVLAILGIIIGGGLLMFAVRGWRLTIESQYQLISRESFLVINNVIILIATLVVLLGTLYPIIADAFNLGQVSVGPPYFNALFVPLTWLLMVAMGMGSNIRWKQDSRPLLGVGMVIAASSLVLAAVIAYFVSPSAMLNIGVTLAVSFWVLLWMVVDFKDKTKNAPSFFKGLAKLRLSYWGQQTAHIGVIIAVIGIAFTSTLSIERDVALGETDTVHVQGYDFEIKDFHEVRGSNFDGMQAEVEVTKDGRPVVTLYPEKRTYVISGMPLTEAAIDASLMRDVYVALGEPIAEDGNQWAIRIYVKPLIRWIWLGAIIMALGGLLSMLDRRYRLKTTKTPAQIAASKSGFATVADLDINNATDATAPMGEK

SEQ ID NO: 68078 - DNA, 1995 bp, Dechloromonas aromatica RCB
  CDS (1)..(1995)
atgattcctgaactcggccatttcgccctgatccttgccgcactggttgccctgatcctcggcaccctgccgctagtcggcgcccaccagaaccgcctggcctgggttgccatcgcccgccccgccgcttcggcgatggcgctgctgctcaccttctcttttgcctgcctggtgcaggctttcgtgaccaacgatttctccgtggtttatgtcgcgcaacactccaattcgttgctgcccattcagtaccgcgttgccgccgtctggggcggccatgagggctcgctgctactttggatgctgttcctgacctggtgggccttcagcgtcgccatgctgtccaagcaactgccggaaacgatggttgcccgcgtgctcggaacccttgggctggtcgccttcggcttcatgctcttcatcctgatcacctccaatccatttgagcgcctgcttccagccgccgccgaagggcgcgacttgaacccgctgctacaggacccgggactcgtcatccatccgcccatgctctacatgggttacgtcggtttctcggtcgccttcgcctttgccattgcagccctgctttctggccagttggatgccgcctgggcacgctggtcgcggccatggaccatggctgcctggtgcttcctgaccatgggcatcgccctcggctcgtggtgggcctattacgaactgggctggggcggctggtggttctgggatccggttgaaaacgcctcgttcatgccctggctggtcggcacggcgctgatccactcattggcggtcaccgaaaagcgcggcagtttcaagaactggacggttctgctggccatctctgccttctcgctgtcgctgctcggcaccttcctggtccgttccggcgtactgacctcggttcatgccttcgccaccgatccacggcgcggtatcttcatcctgattttcctggtcgccgtcatcggtagctcgctggcactgttcgcctggcgggcgccgaaggttggcctgggtggccgttttgggctgatttctcgcgagtcgctgctgctaaccaataacgtactgctcgtcgtcgcctgcgccaccgtgctcctcggcacgctctacccactgctgatcgacgccctcggcatcggcaagatttcggtcgggccaccgtacttcaacgcggttttcgttcccgtcatggctccggttctgtttctgatgggcattgctcccttcgcccgctggaaggaagcgtcgattccggacatcacccgaatcgtgcgctgggcgatggtcgccgctgcggtagtcgctatcgccctgccgctgatttacggccactggagcacgctgatcgcactgggcatcctgctcgccgcctgggtcgcgatcacgacggtgattaccttcgtcgagcgtgtccagcacacgcgtgccggccagtccttcctgagtaccgccgtcaagcagccgcgcagcttcgtcggcatgtgcctggcgcactttggcatcgccgttttcgtggttggcgtgaccatggtcaatagcttccaggacgaaaaggacatcaagatggcgccgggtgaaacaaccacggttgccggctacagtttcactttcaacggcgtcaaatccgtgcaggggccaaactacacggccgctcagggtgatttcgaccttgcggtcgacggcaaattcatgcgcaaaatgaacccggaaaagcgcaactacgcgtcctccggcatgccgatgaccgaagccgccatcgacgctggtttcctgcgcgatgtctatgtctcgctcggtgagccaatcgaccgtgacaagccggaagccgagtgggcggtgcgcgtctattacaagcccttcgttgactggatctggggtggctgcttcctgatggcactgggcggcctgctcgctctgctcgaccgccgctatcgcgtcaaatcccgcgtctcagccactgtcaaaatccctgccggaacacaacaagcatga

SEQ ID NO: 68079 - protein, 664 aa, Dechloromonas aromatica RCB
MIPELGHFALILAALVALILGTLPLVGAHQNRLAWVAIARPAASAMALLLTFSFACLVQAFVTNDFSVVYVAQHSNSLLPIQYRVAAVWGGHEGSLLLWMLFLTWWAFSVAMLSKQLPETMVARVLGTLGLVAFGFMLFILITSNPFERLLPAAAEGRDLNPLLQDPGLVIHPPMLYMGYVGFSVAFAFAIAALLSGQLDAAWARWSRPWTMAAWCFLTMGIALGSWWAYYELGWGGWWFWDPVENASFMPWLVGTALIHSLAVTEKRGSFKNWTVLLAISAFSLSLLGTFLVRSGVLTSVHAFATDPRRGIFILIFLVAVIGSSLALFAWRAPKVGLGGRFGLISRESLLLTNNVLLVVACATVLLGTLYPLLIDALGIGKISVGPPYFNAVFVPVMAPVLFLMGIAPFARWKEASIPDITRIVRWAMVAAAVVAIALPLIYGHWSTLIALGILLAAWVAITTVITFVERVQHTRAGQSFLSTAVKQPRSFVGMCLAHFGIAVFVVGVTMVNSFQDEKDIKMAPGETTTVAGYSFTFNGVKSVQGPNYTAAQGDFDLAVDGKFMRKMNPEKRNYASSGMPMTEAAIDAGFLRDVYVSLGEPIDRDKPEAEWAVRVYYKPFVDWIWGGCFLMALGGLLALLDRRYRVKSRVSATVKIPAGTQQA

SEQ ID NO: 68080 - DNA, 1989 bp, Mesorhizobium sp. BNC1
  CDS (1)..(1989)
atgagcgtcgaacttggccatttcgcactcgtgctggcgctggcgctggccttggtgcaggcgctggtgccgctcctcggcgcgcgcttgggcagcgctccgctgatgcggatgggcgaaccggtggccattaccgggtttgcgctgatcgcgttcgccttcgcggcgctggtgcttgcctatgtccaatcggatttctcggtgctgaatgtgtgggagaactcacactcggccaagccgcttctgttcaagattaccgggacttggggcaatcatgaaggctcgatgctcctttgggtgctgatcctagcctttttcggggctcttgtggcagccttcggccagaatctgccgccaacgctcagggccaatgtgctggccatacagggcctgattgccagcgccttcctcctgttcatcctctttacctccaatcccttcatccgccttgagcgggcgccgattgaaggccgtgacctcaatccgatcctgcaggacatcgggctcgcgatccatccgccgctgctctatctcggctatgtggggttctcgatctccttttcgttcgcggtggcggcgctgatcgacgggcgcctggacgcggcttgggcacggtgggtgcgtccgtggacgctcgttgcctgggccttcctcaccggcggcatcgcgatgggctcctactgggcctattatgaattgggatggggcggcttctggttctgggacccggtggagaacgcttccctgatgccctggctggcgggtacggcgttgctgcactcggccattgtcatggaaaagcgctcggcactgaaaatctggacggtgctgctggccattctcactttttcgctgtcgctgcttggcacatttctggtccgctcgggcgttttgacctctgttcactcctttgcgacagatcccacacgcggcgtcttcattcttgcgatactggtgttctttatcggcggcgctctggctttgtttgcagtaaggggcgcgtcgctcgcgccgggtggactgttccatcccatttccagggagggggcgcttgtcttcaacaatctgatgcttacgaccgcggcggcgacggtgctcatcggcactctctaccccctgctgatcgaggccatcagcgaagacaagatttccgtcggcgcgccgttctttaatctgaccttcgtgccgctgttcctgccgctcctgctggccgtgccttttgggccgcttctcgcctggaagcgcggcgatctgccaggagctctccagcgcctgcaattcgcgttctgggcagccggggcggccgcaatcgcgagctatttcctgattgaccgcgccaacgccgcagctgcgctcggcatcggcctggggctgtggcttgtcttcggcgcgctgacagatctcgctttcaaatccggcatcggcaaggtcgggccagcacttgcccttcgccggctctccggcttgcccctttcgatgttcggcacctgtttcgcacatgccgggctgggccttaccgtgctcggcattgtctccgtcaccgcgcttcaggccgagaaaatcctgacaatgcagccaggccagagcaccgaaatcagcggctacactcttcgcttcgtggatctgcggcccttcaccggcccaaattacacggaagaccgcgccgagttcgcgctcgggaccacccgcggtgcgtcgctgggggaactcgtttcgtccaagcgtctttatacggcccggggtatgccgacgaccgaagccggcatcagaacgatgggcctgagccagctctatgtttcgatcggtgaccgtacaccggctgggctcgtcgtgcggatctggtggaagcctttcgtcacgctgatctgggccggtgcgctggtgatgatgggcggcggcttcatctctctcatggaccgcaggctgcgcgtcggtgcgccggcaaggcgcaaagcagcgctcgcggcggacggtgggggaacgcgatga

SEQ ID NO: 68081 - protein, 662 aa, Mesorhizobium sp. BNC1
MSVELGHFALVLALALALVQALVPLLGARLGSAPLMRMGEPVAITGFALIAFAFAALVLAYVQSDFSVLNVWENSHSAKPLLFKITGTWGNHEGSMLLWVLILAFFGALVAAFGQNLPPTLRANVLAIQGLIASAFLLFILFTSNPFIRLERAPIEGRDLNPILQDIGLAIHPPLLYLGYVGFSISFSFAVAALIDGRLDAAWARWVRPWTLVAWAFLTGGIAMGSYWAYYELGWGGFWFWDPVENASLMPWLAGTALLHSAIVMEKRSALKIWTVLLAILTFSLSLLGTFLVRSGVLTSVHSFATDPTRGVFILAILVFFIGGALALFAVRGASLAPGGLFHPISREGALVFNNLMLTTAAATVLIGTLYPLLIEAISEDKISVGAPFFNLTFVPLFLPLLLAVPFGPLLAWKRGDLPGALQRLQFAFWAAGAAAIASYFLIDRANAAAALGIGLGLWLVFGALTDLAFKSGIGKVGPALALRRLSGLPLSMFGTCFAHAGLGLTVLGIVSVTALQAEKILTMQPGQSTEISGYTLRFVDLRPFTGPNYTEDRAEFALGTTRGASLGELVSSKRLYTARGMPTTEAGIRTMGLSQLYVSIGDRTPAGLVVRIWWKPFVTLIWAGALVMMGGGFISLMDRRLRVGAPARRKAALAADGGGTR

SEQ ID NO: 68082 - DNA, 1908 bp, Haemophilus influenzae R2866
  CDS (1)..(1908)
atgctcccagaacttggctttttccttcttttactcgcaacagctagcgcgttttttcttgcgttagtgcctcaatttgggttattcaaaaaaaattcgactttaattaatgctgcttggccgcttagttatatttttacccttgcgacgacgttctcaattggtttgcttgcttattcttttgcggtggatgatttcacccttgaatatgtagcggcacattctaattcccaattacctacattttttaaaatggctgccacttggggaggacatgaaggttcaatgttgttttggttattttcattgagtttatggcttgctgcttttgctttttttaatcgaaaaaatgaccgcactttttccgctcaatctttatctttattgggattgatttgctttggttttgcggtgtttattttattttattccaatccatttggacgcattttccctgctcccgcagaagggcgcgatctcaatccaatgttgcaagatgtgggattaattttccatccgcctttattatatgttggctatgtgggctttgcggtaaattttgcaatgagtttgagtgcgttgatttataaccaatctgcacgacaaattgcccgctcaatgcgtggatgggtgttggtttcttggttgtttttaaccattggtattgtgctcggtgcttggtgggcatattacgagctcggctggggcggttggtggttctgggatcccgtagaaaatgcgtctttaatgccttggttacttgggttagcgttattacacagtttaatggcgacggaaaaacaaggcgtatttagttattggacaacgcttttttctctgcttgcttttgcctttagcgtattaggcacgtttattgttcgttctggtgcgctcacttctgtgcacgcctttgcattggataacacgcgcggttatgtgttgttattaattttctttgttttgacagcgttagcctttggtttattcgctttacgagcgggaagttcatcagaaagtgcggtgaaatttcagttcatttctaaatcaggtggcattttattactgaatattttgctgaccattgcgacggtttctacctttttaggtaccttttacccgatgttattccaagcgatgaattggggctcaatttcggtgggaagtccttattttaatagtattttcttccccattattacggcgattttaatcttaatggtaattgtgcttagcatacgtaaggggcaatttgatcgcacattattgatacgttatgggtggttgcttattccgtctttgattcttgcaggcctaatgatttggcaacagctacgccataattctgcgttgaattttcacgctttcgcctttgtgttattaactcttgcgatttggcttttattcgtcacgttatggcaaaattggcgacaaattcgcttgtctcaatttgggatgattttagcacactgtggcgtggcgattgtgactattggtgcggtgatgactgggtattttggcagtgaaattggtgtgcgtttagcaccgcaacaaagtcaaacgctggggcaatatgaatttcattatcgccaattttctaatgaaattgggccaaattttacggcagaagtcgccttttttgacgtaactaaaaatggtaaaccttatgcaaaaattatcccagaacgccgttattacgatgtacgaacaatgacaatgagtgaagtggggcttgatggtggtttttggggagatttatatattgtgatgggcgattctctcggcaaaggggaatttactttccgcttacattataaaccactgattcgttggctctgggcgggcggtattttaatggcctttggcgcactttttagcgttttcggattacgcagaaaacaggaaaaataa

SEQ ID NO: 68083 - protein, 635 aa, Haemophilus influenzae R2866
MLPELGFFLLLLATASAFFLALVPQFGLFKKNSTLINAAWPLSYIFTLATTFSIGLLAYSFAVDDFTLEYVAAHSNSQLPTFFKMAATWGGHEGSMLFWLFSLSLWLAAFAFFNRKNDRTFSAQSLSLLGLICFGFAVFILFYSNPFGRIFPAPAEGRDLNPMLQDVGLIFHPPLLYVGYVGFAVNFAMSLSALIYNQSARQIARSMRGWVLVSWLFLTIGIVLGAWWAYYELGWGGWWFWDPVENASLMPWLLGLALLHSLMATEKQGVFSYWTTLFSLLAFAFSVLGTFIVRSGALTSVHAFALDNTRGYVLLLIFFVLTALAFGLFALRAGSSSESAVKFQFISKSGGILLLNILLTIATVSTFLGTFYPMLFQAMNWGSISVGSPYFNSIFFPIITAILILMVIVLSIRKGQFDRTLLIRYGWLLIPSLILAGLMIWQQLRHNSALNFHAFAFVLLTLAIWLLFVTLWQNWRQIRLSQFGMILAHCGVAIVTIGAVMTGYFGSEIGVRLAPQQSQTLGQYEFHYRQFSNEIGPNFTAEVAFFDVTKNGKPYAKIIPERRYYDVRTMTMSEVGLDGGFWGDLYIVMGDSLGKGEFTFRLHYKPLIRWLWAGGILMAFGALFSVFGLRRKQEK

SEQ ID NO: 68084 - DNA, 1935 bp, Ehrlichia canis str. Jake
  CDS (1)..(1935)
atgattaatttaatagagcttccgcttttaatagcgtgtgtattttcaattgtatatccatttgtttcttatttatctttttgctggtcaaaggtatttacaatattgatatttatgctgacaagttctgctatgggtttactgttgtatacacacattgttgatgatttctcattttataatgtgtactacaactcacatacaacgaaacctttattatataaaatatttggtatttggggtaatcatgaaggctctattttattatgggtatggataataagtttttatagtttactattagagttttttcttgaaagggaagatctcaaaaaaatagctatttcaatacaacatataatgaactttggatttttgttatttaccttgttcatatctaacccttttctaaagatgcctactattgaatatgaaggattagggtttaaccctatactgcaggatactgggttaatgatacatcctcctattttgtatttaggatatgtaggatttagtgtagtgttttcccttgctgtagctggtgtaatcgttcaaaaggatagtgtaaaatgggcaactattataaataagtgggtcttgttagcgtggtcatttttaactttaggaatagggttaggtagctggtgggcttatagagaattaggttggggaggattttggttttgggatcctgttgaaaatgcttcacttatgccatggctatttggaacagctttacttcatttgctgcccttagttagaaagtttaatatattttataactttgcaattttattatcaattttttcatttataatgagcctgattggtacgttcttagtgagatctggtgttttaatatctgttcatgcttttgctaatgatccaaagtgtggattctatatattaatgttgattggtatcataattagtagtgggattgtaagtttcatttgttttgcaaagaaggctcaagagaaaaaacatgattttttactcttgtcaaaagtaacaatgttgttgtttaacaatgttctgctgttaacagcttttactatagtatttatcggtactatatatcctattgtattagaagttataacaggagatgttatttctataggtgcaccgtattataattctttatttaactatttaatattttgtactttgttattgatgatcattgttatgggattggacaaaaagagaaataaaattttagtagagaattttaagttttcaggacttataacttcattgattgttccttttattatagataataatttttttattattgcaatgattctattatcagttttattgtttttatctgtactggaaacctattgtaggaaaataagaatacttgctgtgccattttgtgaaactgccagattaattaaatcatactctacaaaatattattccatgctagtgtcacacattggtgttgctgtttttatatttggtgtgattggatctactgtatggggcgaaacttatgaactttatatgaaggaaggcaactctgttaagacaaaaaatcttcaagttgttttatctaaattatcttttgtaaaaaatgaaaattacaatgctatacgtggaaagtttctaataataaagtctggggaaatattagataaaatatttcctgagaatagattttatatagttgaaggagttagaaatactgaaagtgctatatatagacattggttatctgatgtttatattgtgattggtgatatagataaagcgatgggtatagcagtaaagatatattataagccttttataaatttgatatggataggatttttgttaatcacgtttggtggtgttataggattgttcgctaacactactacaagaaaagcttcgatgtttgaagaattgaaagctgatgattccacttgtatgtga

SEQ ID NO: 68085 - protein, 644 aa, Ehrlichia canis str. Jake
MINLIELPLLIACVFSIVYPFVSYLSFCWSKVFTILIFMLTSSAMGLLLYTHIVDDFSFYNVYYNSHTTKPLLYKIFGIWGNHEGSILLWVWIISFYSLLLEFFLEREDLKKIAISIQHIMNFGFLLFTLFISNPFLKMPTIEYEGLGFNPILQDTGLMIHPPILYLGYVGFSVVFSLAVAGVIVQKDSVKWATIINKWVLLAWSFLTLGIGLGSWWAYRELGWGGFWFWDPVENASLMPWLFGTALLHLLPLVRKFNIFYNFAILLSIFSFIMSLIGTFLVRSGVLISVHAFANDPKCGFYILMLIGIIISSGIVSFICFAKKAQEKKHDFLLLSKVTMLLFNNVLLLTAFTIVFIGTIYPIVLEVITGDVISIGAPYYNSLFNYLIFCTLLLMIIVMGLDKKRNKILVENFKFSGLITSLIVPFIIDNNFFIIAMILLSVLLFLSVLETYCRKIRILAVPFCETARLIKSYSTKYYSMLVSHIGVAVFIFGVIGSTVWGETYELYMKEGNSVKTKNLQVVLSKLSFVKNENYNAIRGKFLIIKSGEILDKIFPENRFYIVEGVRNTESAIYRHWLSDVYIVIGDIDKAMGIAVKIYYKPFINLIWIGFLLITFGGVIGLFANTTTRKASMFEELKADDSTCM

SEQ ID NO: 68086 - DNA, 1986 bp, Rubrivivax gelatinosus PM1
  CDS (1)..(1986)
atgattcccgagctcgggcagatcgcgctgctgctggcgctggccaccgccctgatccagggcaccctgccgctgctgggcgccgctcgcggccgcgccgactggatggcgctcgcgcggccggcggcgcagacgcagttcctgctggtcgcgctggccttcggctgcctggtggcgtccttcgtgcgacacgacttctcggtgctgaacgtggccaccaactcgaacagcgcgctgccgctgttctaccgcatcgccgcctcctggggcagccacgagggctcgctgctgctgtgggtgctgatgctcagcagctggacgctcgcggtggcgctgcgcagccgccacctgccggtgccggtggtgtcgcgcatcctcgcggtgatgggcctgatcagcgtgggcttcctgctgttcatgctgatcacctccaaccccttcgaccgcctgttcccggtcccaccggacggcaacgacctgaacccgctgctgcaggaccccggcatgatcgtgcacccgccgatgctctacatgggctacgtgggcttctcggtggccttcgccttcgccgtcgcggcgctgctcggcggcacgctcgacgccacctgggcgcgctggacgcggccctggaccaccgccgcctgggccttcctgacgctgggcatcatgctcggcagcacctgggcctactacgtgctgggctggggcggctggtggttctgggacccggtggagaacgcctccttcctgccctggctggccggcacggcgctgatccattcgctggcggtcaccgagaagcgcggcgccttcaagtcctggacggtgctgctggcgatcgtcgccttctcgctgtcgctgctcggcaccttcctcgtgcgctcgggcgtgctgtcgtcggtccacgccttcgccacggacccgcagcgcggcctgttcatcctgctgttcctggtcatcgtgatcggcggctcgctcaccctgtacgcgtggcgcgcgcccaaggtggggctcggcgcgcgcttcggcgtggtgtcgcgcgagtcgatgctgctcgccaacaacgtgctgttcgtcgtcgccacgctgtcggtgctgctcggcacgctctacccgctgctgctcgacgccatgggcctgggcaagatctccgtcgggccgccctacttcgacgccgtgttcgtgccgctcatggcgccagcggtgttcttgctcggcgtggggccgctggcgcgctggaagcaggccgaactgcccgacctggcccgccggctgcgctgggctgccgccatcgcggtggtcgcggcgctgctcacgggctggctggccggccgcatcgcgctgggcgcgacgctcggcctgctgatgagctactggatcgtcgccgccctcggggtcgacctgtgggagcggctgcgcccggccggtggcctgccgatgagcctggcggcccgcgcgcggcagctgccgcgcgcgatgctcggcatgatgctggcccacctgggcgtggcggtgttcgccttcggcgtgagcatggtcaccacctaccagctcgagcgtgacgtgaagatggcgatcggcgacaccaccgaggccggcggcttcgtgttcgcgctgcgcggcctgaaggagatccagggcccgaactacgacggcctgcagggccagatcgaagtcacgcgcgacggcaaggcggtggcgctgctgaagcccgagaagcgcatctaccgcgtgcagcgcaacccgatgaccgaggccgacatcaaccgcggcatcacgcgcgacctctacgtgtcgctgggcgagcccaccgccgacggcagctggatcgtgcgggtctacttcaagcccttcgtcaactggatctggggcggctgcgtcctgatggcgctgggcggcgccctcgcggcgagcgatcggcgctaccgcgcccggcagcgccaggagcacgggcagcaggccggcccggccggagcggtggcgtga

SEQ ID NO: 68087 - protein, 661 aa, Rubrivivax gelatinosus PM1
MIPELGQIALLLALATALIQGTLPLLGAARGRADWMALARPAAQTQFLLVALAFGCLVASFVRHDFSVLNVATNSNSALPLFYRIAASWGSHEGSLLLWVLMLSSWTLAVALRSRHLPVPVVSRILAVMGLISVGFLLFMLITSNPFDRLFPVPPDGNDLNPLLQDPGMIVHPPMLYMGYVGFSVAFAFAVAALLGGTLDATWARWTRPWTTAAWAFLTLGIMLGSTWAYYVLGWGGWWFWDPVENASFLPWLAGTALIHSLAVTEKRGAFKSWTVLLAIVAFSLSLLGTFLVRSGVLSSVHAFATDPQRGLFILLFLVIVIGGSLTLYAWRAPKVGLGARFGVVSRESMLLANNVLFVVATLSVLLGTLYPLLLDAMGLGKISVGPPYFDAVFVPLMAPAVFLLGVGPLARWKQAELPDLARRLRWAAAIAVVAALLTGWLAGRIALGATLGLLMSYWIVAALGVDLWERLRPAGGLPMSLAARARQLPRAMLGMMLAHLGVAVFAFGVSMVTTYQLERDVKMAIGDTTEAGGFVFALRGLKEIQGPNYDGLQGQIEVTRDGKAVALLKPEKRIYRVQRNPMTEADINRGITRDLYVSLGEPTADGSWIVRVYFKPFVNWIWGGCVLMALGGALAASDRRYRARQRQEHGQQAGPAGAVA

SEQ ID NO: 68088 - DNA, 1962 bp, Pseudomonas fluorescens PfO-1
  CDS (1)..(1962)
ttgggccatctggccatgatcctggcgctgtgtttcgcgctggtgcaggcggtggtgccgttgctcggtgcctggcgcggtgatcgtctgtggatgggcctcgctcaaccggcggcgtgggggcagttcgcgttcctgctgttcgccttcggttgcctgacctacgccttcatgaccgacgatttctccgtggcctacgtcgcgatgaactccaacagcgcgctgccgtggtactacaagttcagcgcggtgtggggcgcccacgaagggtcgctgctgctgtgggcgctgatcctcggcggctggaccttcgcggtgtcggtgttctcgcggcagttgccgcaagtcatgctcgctcgcgtgctggcggtgatgggcatgatcagcaccggttttctgctgttcctgatcctcacctcgaacccgttttcgcggatcctgccgcagatcccggccgacggtcgtgacctcaatccgctgctgcaggacatcggcctgatcgttcatccgccgatgctgtacatgggctatgtcggtttctcggtggccttcgcgtttgccattgccgcattgctgggcggtcgtctcgatgcggcgtgggcacgctggtcgcgtccgtggaccatcgtcgcctgggccttcctcggcatcggcatcaccctcggttcatggtgggcttactacgaactcggctggggcggctggtggttctgggacccggtggaaaacgcatcgttcatgccatggctggtgggcacggcgctgattcactcgctggcggtcaccgagaaacgtggcgtgttcaagagctggacggtgttgctggcgattgccgcattctccctgagcctgctcggtacgttcctcgtacgttccggcgtgctgacctcggtgcacgcgtttgcctccgatcctgagcgcggcgtgttcatcctgatcttcctgctgttcgtggtcggtggttcgctgacactgtttgcgctgcgcgcgccggtggtcaagagccaggtcggtttcaatctgtggtcgcgggaaaccctgctgctgggtaacaacctggtgctggtggtggcggcgtcgatgatcctgctcggcacgctgtacccgctgattctcgatgcgatcagcggcgccaagctgtcggtcggcccgccgtacttcaacgcgctgttcattccgttgatggcgctgttgatgctggtgatggcggtcggcgtgatcgtgcgctggaaggacaccccggtgaaatggctggtcagtatgctgactccggtgctgctgggcagcgtcgcgctggcggtggtggccggtgtcgcttatggtgatttcaactgggcggtgatcgcgacgttcctgcttgcggcctgggtgttgctggccggtgtgcgcgacatcttcgacaagactcgtcacaaaggcctgatcaaaggcctgccgaccctgacccgcagctactggggcatgcagatcgcccacctcgggatcgccgtctgcgcgctgggcgtggtgttgtcgagccagaacagtgccgaacgtgacctgcgtctggcaccgggcgaatcaatggacctggccggttatcagttcgtgtttgaaggcgccaagcacttcgaaggcccgaacttcacttccgacaagggcaccgtccgggtgatccgcaacggtcaggaagtcagcgtgctgcacccggaaaaacgcctgtacaccgtgcagaactcggtgatgaccgaagccgggatcgacgccggtttcacccgtgacctctacgtcgctttgggtgaaccgctgggcgatggcgcctgggcagtgcgggtccacgtcaaaccgttcgtgcgctggatctggttcggcggcctgctgaccggtttcggtggtttgctggcggcgctggatcggcgttatcgagtgaaggtcaaagccaaagtgcgtgaagcgctgggcatggaaggagccgctgcatga

SEQ ID NO: 68089 - protein, 653 aa, Pseudomonas fluorescens PfO-1
MGHLAMILALCFALVQAVVPLLGAWRGDRLWMGLAQPAAWGQFAFLLFAFGCLTYAFMTDDFSVAYVAMNSNSALPWYYKFSAVWGAHEGSLLLWALILGGWTFAVSVFSRQLPQVMLARVLAVMGMISTGFLLFLILTSNPFSRILPQIPADGRDLNPLLQDIGLIVHPPMLYMGYVGFSVAFAFAIAALLGGRLDAAWARWSRPWTIVAWAFLGIGITLGSWWAYYELGWGGWWFWDPVENASFMPWLVGTALIHSLAVTEKRGVFKSWTVLLAIAAFSLSLLGTFLVRSGVLTSVHAFASDPERGVFILIFLLFVVGGSLTLFALRAPVVKSQVGFNLWSRETLLLGNNLVLVVAASMILLGTLYPLILDAISGAKLSVGPPYFNALFIPLMALLMLVMAVGVIVRWKDTPVKWLVSMLTPVLLGSVALAVVAGVAYGDFNWAVIATFLLAAWVLLAGVRDIFDKTRHKGLIKGLPTLTRSYWGMQIAHLGIAVCALGVVLSSQNSAERDLRLAPGESMDLAGYQFVFEGAKHFEGPNFTSDKGTVRVIRNGQEVSVLHPEKRLYTVQNSVMTEAGIDAGFTRDLYVALGEPLGDGAWAVRVHVKPFVRWIWFGGLLTGFGGLLAALDRRYRVKVKAKVREALGMEGAAA

SEQ ID NO: 68090 - DNA, 2016 bp, Rhodospirillum rubrum
  CDS (1)..(2016)
atgatcgccgagcttggacatttctgcctcgtgctcgccctgttcgtcgccctcgtccaggcggtggtgccgatggttggggcgcagcgcggcaatctggcgtggatggacttggcgcgcagcggctcggtcgccctgttcggcctgatcgttctggccttcgccgccctgacctattgctatgtcgtcagcgacttctcggtgatgaacgtcttcgagaacagccatagcgacaagccgatgctctataaggtctcgggcgtctggggcaatcacgaggggtcgctgctgctgtggatcctgatcctgtcgggcttcagtctggcggtcagtctggtcggcggcaatctgccccccgccctgcgggcccgcaccctgtcggtccaggcgatgatcacctgcggctttttgctgttcatcttgttcacctccaatcccttcgcccgggtgcccggcctcgaggttcccttgaatggccgcggccttaacccgctgctccaggatcccggcctcgccttccatccgcccatgctctatgccggctatgtcggcttctcgatggccttctccttcgccatcgccgccctgatcgagggcaaggtcgatgccgcctgggcccgctgggtccgcccgtggacgctggtggcctgggtcttcctgaccttcggcatcgccctgggcagttggtgggcctattacgaactgggctggggcggctggtggttctgggacccggtcgagaacgccagcttcatcccctggctatcgggcacggcgctgctgcattcggccgtcgtcgtcgagaagcgcgacgccttgaaatcctggacgatcctgctggcgatcgtcaccttctcgctgtcgctgcttggcactttcctggtgcgttcgggcgtcatcacctcggttcacgcctttgccaccgatcccacgcgcggcctgttcattctggggctgctgctggtcgccatcggcggatccttcaccctttacgccgtgcgcgccccggcgctgaagggcggcgggctgttcgcgccgatttcgcgcgaaggcgggctgttgatcaataatctgctgatgagcacggcctcggccacggtgctgctcggcacgctgtatccgctgatcgccgacgccctcgatttgggcaaggtcacggtgggcgcgccgttcttcaaccgggtcttcctgccgctgatggtgcccttgctggtgctgatggcgatcggcccgctgctgtcgtggaagcgcgccgatctgcgtggggcgctcggccggctgaagggcgcgctgatcgtcgcggcgctggttttcgccggcaccttcctggcgaccgggggcggtctggcccaggtcggcgccgccgccggcatgaccctggccgcctgggtgctggtcggcaccctggtcgaactggccgatcggatccgctttttgcgcattcccttagccgattcgctgcgccgcctcgtcggtctgccgcgatcgacctggggcatggttctggcccatggcggcatggggctggtggtgatcggcgtcgttggcaatacggcctggaaggccgaaagcatccagaccctgcgcccgggcgaaagccgcgagctggccggccataccttcaccctgcaaggcgccgccccgatccagggccccaattacgaggcgctgcgcggcgatatcctcctgtcgcgcgagggcgagaccctggcccgcttggctcccgagaagcggctttacaccaccccgccgatgccgaccaccgaggccgggatccacagcaacggcctgtcggactattacgcggtgatcggcgatcccaccgacaacggcggcttcgtcacccgcttctattacgagccggcggtgcctttcttgtggtatggcgccttgttcatgggcctgggcggactggtctcgctgtcggatcgccgccaccgggtgggggcgccaacggcgcgccgcgtctccccggccaagaccgccagcccccccgcccccgccccggcggaataa

SEQ ID NO: 68091 - protein, 671 aa, Rhodospirillum rubrum
MIAELGHFCLVLALFVALVQAVVPMVGAQRGNLAWMDLARSGSVALFGLIVLAFAALTYCYVVSDFSVMNVFENSHSDKPMLYKVSGVWGNHEGSLLLWILILSGFSLAVSLVGGNLPPALRARTLSVQAMITCGFLLFILFTSNPFARVPGLEVPLNGRGLNPLLQDPGLAFHPPMLYAGYVGFSMAFSFAIAALIEGKVDAAWARWVRPWTLVAWVFLTFGIALGSWWAYYELGWGGWWFWDPVENASFIPWLSGTALLHSAVVVEKRDALKSWTILLAIVTFSLSLLGTFLVRSGVITSVHAFATDPTRGLFILGLLLVAIGGSFTLYAVRAPALKGGGLFAPISREGGLLINNLLMSTASATVLLGTLYPLIADALDLGKVTVGAPFFNRVFLPLMVPLLVLMAIGPLLSWKRADLRGALGRLKGALIVAALVFAGTFLATGGGLAQVGAAAGMTLAAWVLVGTLVELADRIRFLRIPLADSLRRLVGLPRSTWGMVLAHGGMGLVVIGVVGNTAWKAESIQTLRPGESRELAGHTFTLQGAAPIQGPNYEALRGDILLSREGETLARLAPEKRLYTTPPMPTTEAGIHSNGLSDYYAVIGDPTDNGGFVTRFYYEPAVPFLWYGALFMGLGGLVSLSDRRHRVGAPTARRVSPAKTASPPAPAPAE

SEQ ID NO: 68092 - DNA, 1962 bp, Ralstonia metallidurans CH34
  CDS (1)..(1962)
atgattccagaaatcggccacctcgccctcatcgctgccttgttcgtggcactcgctcaaggtgttcttgccctggccggcgcggcgcgagccaacctcacctggatcgcgttcgcccgccccgctgcacgcgctcaattcctgttggtgatggtcggttttgccgcgctcacctgggcctttgtcgcgaaggactactcggtcgcctacgtcgctcaaaactccaattctcagctcccgctgggctacagaatggccgcggtctggggcggacatgagggttcgctcctgctctggctgctgatgcagaccggctgggcctatgcggtcagccggttgtcgaaacagcttccggatgccatggtggcgcgcgttctgggcgtgctcggcctggtgacggccggcttcctgctgttcgtcctgttgacctccaatcccttcgagcgacttttcccggtaccgcaagatggatgggatctgaatccgctcctgcaggatatcggcttgatctttcatccaccgctgctttacatggggtacgtcggattttcggtggccttcgcattcgcgattgctgcattgcttgccggacaactggactcgacgtgggcacgctggtctcgtccctgggccaccgcagcctgggcaaatctgacggtcggaatcgccttggggagttggtgggcctactacgagttgggctgggggggctggtggttttgggacccggtcgagaactcgtcgttcatcccctggctggtgggcaccgccttgatccactctttggcggtgacggaaaagcgggccagtttcaagaactggacggtgctgctctcgatcggcgcattttcttgctcgcttttgggtgcctttctggtgcgctcgggcgtactgacttctgtgcatgcatttgccaccgatccgcgacgcgggttattcattctgattctgctgacggtcattgtgggcacgtcgctcgctttgttcgcatggcgagcccctaaggtcggcatgggaggacggttcgacatggtctccagggagtccttgctgctggtcaacaatgtgctgttggtcgtcactgccggcgctgtcgcgctcggtacgctgtacccactgctcgtcgatgcgctgggcctgggcaagctctccgtggggccgccatacttcaatgcggtgttcgtgccattgatgatccccgcgttgcttctgattgcggtaggacccgccgccaattggaaggccgcccagttcggtgccatcttcaggcagttgcgcgtgccgatgattgctgcacccctggtgggcctgaccgccccgttcgtgctggggcactggtcagcttctgcggcgttgggcttgatgctcgccacgtggattgcggtgtcggtggtgacgggcatcttcggccgaatgcgcgccacccgcggcgggttgcgtgcccagccacgcagttggcttgggatgcatatggcgcatctgggcatcgcggtattcgtgactggcgtgaccatcgtcagtgggtatgagaccgagcgagacgttcgattggcccagggcgagtccgtcagcatcggcggctacgacctcactttgatcggcgtcagaagcacgcgggggcccaactacgtggcgcagataggcgatatcgaactgtcgcgcgacggcaaggtcttgcgtcggctgcatccggaaaagcgcaattacccggcctcgcagatgccgatgaccgaggtggcgatcgatgcaaacggactgcgccacgtctacgcggcgctcggcgaaccgctcggcgacggtgtttggagcgttcgtgtctaccacaagccattcgttgactggatctggatcggctgcatcctgatggcgcttggcggtggcttggccatcagcgatcgtcgataccgtctgaagcctcgccgtcaacacgtcgctccgccattgcccgaggccgcatcatga

SEQ ID NO: 68093 - protein, 653 aa, Ralstonia metallidurans CH34
MIPEIGHLALIAALFVALAQGVLALAGAARANLTWIAFARPAARAQFLLVMVGFAALTWAFVAKDYSVAYVAQNSNSQLPLGYRMAAVWGGHEGSLLLWLLMQTGWAYAVSRLSKQLPDAMVARVLGVLGLVTAGFLLFVLLTSNPFERLFPVPQDGWDLNPLLQDIGLIFHPPLLYMGYVGFSVAFAFAIAALLAGQLDSTWARWSRPWATAAWANLTVGIALGSWWAYYELGWGGWWFWDPVENSSFIPWLVGTALIHSLAVTEKRASFKNWTVLLSIGAFSCSLLGAFLVRSGVLTSVHAFATDPRRGLFILILLTVIVGTSLALFAWRAPKVGMGGRFDMVSRESLLLVNNVLLVVTAGAVALGTLYPLLVDALGLGKLSVGPPYFNAVFVPLMIPALLLIAVGPAANWKAAQFGAIFRQLRVPMIAAPLVGLTAPFVLGHWSASAALGLMLATWIAVSVVTGIFGRMRATRGGLRAQPRSWLGMHMAHLGIAVFVTGVTIVSGYETERDVRLAQGESVSIGGYDLTLIGVRSTRGPNYVAQIGDIELSRDGKVLRRLHPEKRNYPASQMPMTEVAIDANGLRHVYAALGEPLGDGVWSVRVYHKPFVDWIWIGCILMALGGGLAISDRRYRLKPRRQHVAPPLPEAAS

SEQ ID NO: 68094 - DNA, 2043 bp, Ralstonia metallidurans CH34
  CDS (1)..(2043)
atgaatccggaactgggccacttcgcactgatcctggccatgctcgtggcgctggtgctggcaacgctgccgatggtgggcgcggcgcgcggcaatgttgcctggatgtgccttgcacggcccgccgccttcctgcatggcacgctgctgatcgcggcctacctctcgctgacatacgctttcgtcgacaacgacttcagcgtgctctatgtggcggcgaactctaacagcgcgctgccactgatctaccgcatggcggcggtatggggcggccatgaggggtcgatgctgctgtggtcgctgatgctggcgctgtgggcaatggccgtggctggcttcagccgccgcctgccactggcgttcgtcgcccgcgtgcttggcgtgatggggggcatcagcaccggactgctgctgttcgtgctgttcgcatcgaatccgttcctgcgtctgttgccccgcgcgatggaggggcgcgacctcaatccgctgctgcaggaccccggcatggtgttccatccgccattcctgtacatgggctacgtcggcttcgcggtggcattctcattcgcggtggcggccttgcttgaaggacgactcgacgcggcctgggcacgctggtcgcgcccgtggacgatcctggcgtggatgttcctgaccatcggcatcgcgatgggcagcatgtgggcctactacgaactgggctggggcggctggtggttctgggacccggtggagaacgcgtcgttcatgccctggctggccggcaccgcgctgatccactcgctggcggtcaccgagaagcgcggcgcgttccgcgcctggaccgctctgctggcgatcttcacgttctcgctgagcctgctcggcacgttcctggtccgctctggcgtgcttacctcggtccacgcgttcgcggtggatccccggcgcggcatcttcatcctgacgttgctgggactggtcacggggctggcgctcgcgctattcgcgtggcgcgcgccccggctgacccagcgcaccgatttcaacctgacctcgcgcgagtcttttctgctggccaataacgtgctgctggccgtggccgcctcggcggtgctgctcggcacgctgtatccgctgctgctcgacgtgctggacctcggcaaggtatcggtcggccccgagtacttcgaagaagtgttcgtgccgctgatggcccccgccgtgctgctgatgggtgccgccccgctggcacgctggggacgcagcgacctgcccgacatggccaggcgactgcgctgggcggccgtggcaagtgtggtcatcgcgcttgggctgctggccgtgctgcgcaacagctccgccatgaccgggctcggcctcacgctggccgcgtggtgtgcaatgagcgggctggccagcctggccacgcagatgcggcacgcgcgggactggcgctccggcctgcgccagttgccggccggctactacggcatgttgctggcccacatcggcgtgggcgtgttcatcaccggcgtcacgctggtcaagagccaggagagcgtgcgcgagttgtcgatgcgcgtgggcgattcggtcgcggttggcggctacgatttccgcttcgacggtgtggcgccggtcaggggaccgaactacgacgcgctgcggggcacggtcacggtgacgcggcaaggccgtccggtcaccacgctcgccaccgagcggcgcgtctaccgcagccaggacatgccgaccaccgaggccgccatcgacaccgggctcgcacgcgatctctatgtggcgctcggcgattcgtcggatgccacgtccgccgatgcccgctgggcgctgcgggtctacgtgaagcccttcgtctcgtgggtctggggcggctgcgcgttgatggcgctgggcggactccttgccgccagcgaccgccgatatcgcgcgcgccatccggcggcagcggtcacgtctgcggtcacggccaatgacgatgcgggggcccggcccgccacgccaccgctgacgctgcctgctggcaaggagtccgaagcatga

SEQ ID NO: 68095 - protein, 680 aa, Ralstonia metallidurans CH34
MNPELGHFALILAMLVALVLATLPMVGAARGNVAWMCLARPAAFLHGTLLIAAYLSLTYAFVDNDFSVLYVAANSNSALPLIYRMAAVWGGHEGSMLLWSLMLALWAMAVAGFSRRLPLAFVARVLGVMGGISTGLLLFVLFASNPFLRLLPRAMEGRDLNPLLQDPGMVFHPPFLYMGYVGFAVAFSFAVAALLEGRLDAAWARWSRPWTILAWMFLTIGIAMGSMWAYYELGWGGWWFWDPVENASFMPWLAGTALIHSLAVTEKRGAFRAWTALLAIFTFSLSLLGTFLVRSGVLTSVHAFAVDPRRGIFILTLLGLVTGLALALFAWRAPRLTQRTDFNLTSRESFLLANNVLLAVAASAVLLGTLYPLLLDVLDLGKVSVGPEYFEEVFVPLMAPAVLLMGAAPLARWGRSDLPDMARRLRWAAVASVVIALGLLAVLRNSSAMTGLGLTLAAWCAMSGLASLATQMRHARDWRSGLRQLPAGYYGMLLAHIGVGVFITGVTLVKSQESVRELSMRVGDSVAVGGYDFRFDGVAPVRGPNYDALRGTVTVTRQGRPVTTLATERRVYRSQDMPTTEAAIDTGLARDLYVALGDSSDATSADARWALRVYVKPFVSWVWGGCALMALGGLLAASDRRYRARHPAAAVTSAVTANDDAGARPATPPLTLPAGKESEA

SEQ ID NO: 68096 - DNA, 2079 bp, Burkholderia fungorum LB400
  CDS (1)..(2079)
ttgattcctgaaatcgggcactttgcgctgatcctcgcgttgctgctcgcactcacgactggtgtactgccggtgatcggtgtgcagcgcggcatcgatggctggatacgtcttgcctggccggcggcgcgcgcgcagtttgctttcgtcgcgattgcttttggctgtctgtcatggtcgttcctcatcaatgacttttccgtcctctacgtggtggagaactcgaattccgcgttacccgccgtctatcgttttactgcggtctggggcggtcatgaaggctcgctgctgctgtgggtgttgctgttgacgctttggatggtggccgtcacctgtttcagcaagcaattgccggtgacgatggtggccacggtactgggtgtgatgagttggattgcgagtggctttttgctgttcatgctcttcacgtcgaacccattcagccgcctgattccgcagtccatggagggccgcgatctgaatccgctgctgcaggaccctggcatggtcattcatccgccggtgctctacgcgggctacgtcggtttctcggtggctttcgcatttgcgattgcggcgttgctgtcgggccggcttgacgcggcatgggcacgctggtcgcgcccgtggaccacggccgcctgggtgttcctgacgctgggcatcatgctgggcagcggctgggcttactacgaacttggctggggcggatggtggttctgggatccggtcgaaaacgcttcattcatgccgtggctggcgggtacggccttgatccattcgctcgcggtcacggagaagcgcggcagcttccgcagttggaccgctttgctggcgatctgcgcgttttcgttgagcctgctaggcacgttcctcgtgcgttccggcgtgattacctcggtccatgcatttgcgtccgatccgacccgcggcgtgttcatcctcgggtttcttgcgctggtggtgggtggcgcgctgcttctctttgcctggcgcgcgccgcagatcggcctgggggccggctttgagcccgtgtcgcgggaggccttgctgctgtcgaacaatgtgctgttaatggtggctgccgcgtcggtgctgctcggcacgctttatccgatggtgctggatgcacttggactcgacaagatttcggtcgggccgccgtatttcgacagcgtgttcgtgccgttgatgacgccggctatctttctgatgggcgtgggaccgcttgcccgctggaaggcggctcgcgtgcccgatctcgcggcgcgcctgcgctgggccgcggcggtcagcgtcgtcacagcgctggcgctgccgttcacgctcggcagttggcggccgctcgtcagtcttggcctgctgctcgcgacctggagcttcgcgacggtcgcggtgagcatgcgtgagcgcatcggtagccagcagggccgtcctcttctgcgattcaggcgcgtaccgcgggcgagctacggcatgtggctcgcgcacgctgggatcggtgtgtttatcgtgggtgtgacgctggtcaaaggttacgagtcggagcgcgatgtgccgatgcgcaggggccagaccgtcgaggttggcggctaccagttccgtttcgacggggtccgcgatgtcgacgggccgaactaccgtgcgacgcgcgcctcgatcgcagtgagtcgcgaggggcgaccggttacgacgctctatccggagaagcgtctttttctcgtgcagaagatgcccatgaccgaggctgcgatcgaccacggcgtgctacgcgatctgtacgtggcaatgggcgagccgattggcgaggaagcatggaccttgcggatccagatcaagccattcgttcgctggatctgggcgggttgcctgctgatggcattgggcggaatgcttgccgccagcgaccggcgatatcggttgtttccgggccggcgcgtgctgcagatgaacgaggctgcgcgtagtgctggagtgcggccccttgctgcaaacgaaattcgccaaaccggcgcgatcggagcgccgggcgtgatagctgccgcgccacaccatcccgtcaacgaggaccgcggatga

SEQ ID NO: 68097 - protein, 692 aa, Burkholderia fungorum LB400
MIPEIGHFALILALLLALTTGVLPVIGVQRGIDGWIRLAWPAARAQFAFVAIAFGCLSWSFLINDFSVLYVVENSNSALPAVYRFTAVWGGHEGSLLLWVLLLTLWMVAVTCFSKQLPVTMVATVLGVMSWIASGFLLFMLFTSNPFSRLIPQSMEGRDLNPLLQDPGMVIHPPVLYAGYVGFSVAFAFAIAALLSGRLDAAWARWSRPWTTAAWVFLTLGIMLGSGWAYYELGWGGWWFWDPVENASFMPWLAGTALIHSLAVTEKRGSFRSWTALLAICAFSLSLLGTFLVRSGVITSVHAFASDPTRGVFILGFLALVVGGALLLFAWRAPQIGLGAGFEPVSREALLLSNNVLLMVAAASVLLGTLYPMVLDALGLDKISVGPPYFDSVFVPLMTPAIFLMGVGPLARWKAARVPDLAARLRWAAAVSVVTALALPFTLGSWRPLVSLGLLLATWSFATVAVSMRERIGSQQGRPLLRFRRVPRASYGMWLAHAGIGVFIVGVTLVKGYESERDVPMRRGQTVEVGGYQFRFDGVRDVDGPNYRATRASIAVSREGRPVTTLYPEKRLFLVQKMPMTEAAIDHGVLRDLYVAMGEPIGEEAWTLRIQIKPFVRWIWAGCLLMALGGMLAASDRRYRLFPGRRVLQMNEAARSAGVRPLAANEIRQTGAIGAPGVIAAAPHHPVNEDRG

SEQ ID NO: 68098 - DNA, 1965 bp, Magnetococcus sp. MC-1
  CDS (1)..(1965)
atgtggatagaagttggacattatgccgccatcctggcgttgctgctgagtattacccaaatggtcacccctatggtgggcatacgcagtggtcagatggcctgggtcagggttggtcgctacagcgcctttgcggtgtttttgctcttgagcgtagccagtggcacactgatacacgcctttatgagccacgatttttccgtgctctatgtggcccgcaactcttccttgagcctgccatccttctatttggccaccgccatgtgggggggacatgagggctctttgttgctgtgggcttggttaatgtccttttttattgccgttgcagcatggcgccactggaacacccactcggtctcgatgccctggattttgaccattctaggggccgtgaccctgggttttctgtgcttggtattgctgctctcttcgccctttgagcggctgtttcccatccccatggatggacgggatcttaatccgctgttgcaagatcctggtatggtttttcaccccccctttctctatctgggttatgtgggttttgcggttccctatgcctttgccatggcggcactgataaccggacaggccaaggatgagtggatcttggcaacccggcgctggaccctgtttgcctggaccatgcttacgacgggcatcgtgtttggtgcctactgggcctattatgagctgggctggggcggctattgggcttgggatccggtggagaatgcctctttcatgccctggttaaccggtaccgcctttttgcattcgatcatggtgcaagagcgccgccagatgtttaaggtatggaatctattcctgattatcaccaccttttcgctctcactgctgggtacctttttggtgcgttcgggggtgcttagttcggtacatgcgtttgctaccgacccgggccggggtatgtttattttaagctttatggcggttatgttgctgtttagctttggtgtgctggtgtggcgagccgatgccttaaaagcggaaaaccgcatggacgcggtggtgtgtcgcgagagcaccttcttgtttaataacctgttcctgttggttggggcgatcacggtgctgctgggcaccctctacccgctcgctttggaagcgttgatggatgccaaggtcacggtgggccccccctactttaacaaggtgtttgtgccgattatgctgggcctgcttattctgatgggcattggtcccttgatctcttggcggcgggccgcccagggacagttaaaaaagaactttttggtgccgggtctgttggccttggtggggattcctatcgccctgctcttgggtgtgcagcacccttacgccattgttacggtgatgatcattctgtttgtgggcagcacccaccttattgatgtacagcggggcgttgcggctcgccttcaagcgggtagccacaaccccatttctgctttcgttaaaatggtcgcccgtaacaagcgccgctacggtggcctgacggtgcatattggcattctggttatgtgcgcgggttttattggcagtggcatgttccaggaggttcagaccgtcattatgcaacccggcgataaggtacgcctttcgggttgggagctgaccctggaaaagtaccatcaggtgcgtaaagataactggacagcaaccgaagcggtgatgcatggcgtgcgggaggatggtctgaccgtcagcttgcatccccaaaaacgtaagtatgataaccatgagatggagaccaccgaggcctccattatcaactttttctgggaagatctctatgtggtgttgggagatcgcatccctggcaaggggtgggccattaaagcctaccgcaaccccttgattagctgggtttggtatggctccttcatcatcgcggcgggggctatactggcactcttccagggacgccgttttaaacgcatccagggggcctcttag

SEQ ID NO: 68099 - protein, 654 aa, Magnetococcus sp. MC-1
MWIEVGHYAAILALLLSITQMVTPMVGIRSGQMAWVRVGRYSAFAVFLLLSVASGTLIHAFMSHDFSVLYVARNSSLSLPSFYLATAMWGGHEGSLLLWAWLMSFFIAVAAWRHWNTHSVSMPWILTILGAVTLGFLCLVLLLSSPFERLFPIPMDGRDLNPLLQDPGMVFHPPFLYLGYVGFAVPYAFAMAALITGQAKDEWILATRRWTLFAWTMLTTGIVFGAYWAYYELGWGGYWAWDPVENASFMPWLTGTAFLHSIMVQERRQMFKVWNLFLIITTFSLSLLGTFLVRSGVLSSVHAFATDPGRGMFILSFMAVMLLFSFGVLVWRADALKAENRMDAVVCRESTFLFNNLFLLVGAITVLLGTLYPLALEALMDAKVTVGPPYFNKVFVPIMLGLLILMGIGPLISWRRAAQGQLKKNFLVPGLLALVGIPIALLLGVQHPYAIVTVMIILFVGSTHLIDVQRGVAARLQAGSHNPISAFVKMVARNKRRYGGLTVHIGILVMCAGFIGSGMFQEVQTVIMQPGDKVRLSGWELTLEKYHQVRKDNWTATEAVMHGVREDGLTVSLHPQKRKYDNHEMETTEASIINFFWEDLYVVLGDRIPGKGWAIKAYRNPLISWVWYGSFIIAAGAILALFQGRRFKRIQGAS

SEQ ID NO: 68100 - DNA, 1968 bp, Novosphingobium aromaticivorans DSM 12444
  CDS (1)..(1968)
atgatcgctgaactcggtcttgccgtcctgtggatggcggcggcgcttgccgccttgcagcttttcgccggcgtttcggccctgcgcccaggcggcggggcggcgggcaagtcgctcgccggcatggttcgcccgctagctgtcatgcagggtgcgctcgtcgcgatctcgttcctggcgctgatcgacttgttcctggaaacggacctgtcggtgaagctcgtggcggaaaacagccactcgatgaagccgttcatcttcaagctggcgggtacgtggggcaaccacgaaggctcgatgctgctgtgggtgacgatcatggcggtatcgggcggtttcgtcgcgctcatcgagaagcgcctgcgcgaagacacgctgatcgccacgctggcggggcaggccttcgtcagcctcggcttctatgccttcctgctgttctcctcgaacccgttcgagcgactggcggaaccagcgcctgatggtgccggcctcaacccgctgctgcaggacatcggcctcgcatttcatccgcccacgctctacgtcggttatgtcgggctttcggtggcgttcagctttgccatcggcgcgctgatcacgcgtgacgtcggccccgctttcgcccgcgcgatgcgcccctgggtgctgggcgcgtggattttcctcaccatcggcatcacggccggttcctactgggcctactacacgctcggctggggtggctggtggttctgggaccctgtcgagaacgcctcgctcatgccctggctggccgcgacggcattgcttcactcggcctccgtccttgccagtcgcaacgccttgcgcgcgtggacggtgatgcttggcgtgatcgccttttcgatgtcgatggtcggcaccttcctggtgcgctcgggcatcctgacgtcggtccatgctttcgccgtcgatccggaacgcggctcgttcatccttgcgcttctggccatctacatcggcggtgcattggcactcttcggcctgcgcgcgtcgaccgtgaccgagggtgaacgtttcagcctgttcagccgtgaggcgagcctcgtgttcaacaacgtgatgctctgcggcacgctcggcatcgtgctgatcggcacgctctacccactgctgaccgaagcgttcggtgccaaggtttcggtgggacctccctatttcaatccggtatccgcgatcttcgtgattccgatgatgctcgtcatgggcgtcgggccgctgcttcgctggcgcaaggacaagccaggccgcgtgaccggcagtgtcgcggtgcctgcgctgctcaccgcgctcgtcctgctcgccgtcgtggtcctggcccccggcattcgcatcctgcccgcgctcggccttgcggttggcgccgggttggcgctggcgagctggttcccgctcaggggccgcaacctgcgccgcacgccgctcagcgtctggggcatggtcttcggccacttcggcattgccgtcgccttgctcggcgctgccagcgaaagcgcattctcgaccgaacggctggccgcgatgaatgtgggcgatacgcaaagcgtcggtccgatctcgctcaagctcgagaagatcgaacctgtcgccggccccaactggaccgcgctcgaggcaacggtcagcgcatcgtacaagggcggggcgccggtcacgctgcatccgcaggcgcgcaccttctcctcgccgcctggcgagcgtaccgaatccgcactccatacgcgctggaacggccagctctatgccgtgctcggcaacgagggcgaggatggccgctggcagatgcgcttctggtggaagccgttcgtgccgctgctctggctcggcgggctgctgattgcgtttggcggcgttctggcgcttctgggccgggtggcgcatgatgttcgccgcctgcgcgcaggcggcaagattgcatatcgccgggcccggatggagcaggtgaagtga

SEQ ID NO: 68101 - protein, 655 aa, Novosphingobium aromaticivorans DSM 12444
MIAELGLAVLWMAAALAALQLFAGVSALRPGGGAAGKSLAGMVRPLAVMQGALVAISFLALIDLFLETDLSVKLVAENSHSMKPFIFKLAGTWGNHEGSMLLWVTIMAVSGGFVALIEKRLREDTLIATLAGQAFVSLGFYAFLLFSSNPFERLAEPAPDGAGLNPLLQDIGLAFHPPTLYVGYVGLSVAFSFAIGALITRDVGPAFARAMRPWVLGAWIFLTIGITAGSYWAYYTLGWGGWWFWDPVENASLMPWLAATALLHSASVLASRNALRAWTVMLGVIAFSMSMVGTFLVRSGILTSVHAFAVDPERGSFILALLAIYIGGALALFGLRASTVTEGERFSLFSREASLVFNNVMLCGTLGIVLIGTLYPLLTEAFGAKVSVGPPYFNPVSAIFVIPMMLVMGVGPLLRWRKDKPGRVTGSVAVPALLTALVLLAVVVLAPGIRILPALGLAVGAGLALASWFPLRGRNLRRTPLSVWGMVFGHFGIAVALLGAASESAFSTERLAAMNVGDTQSVGPISLKLEKIEPVAGPNWTALEATVSASYKGGAPVTLHPQARTFSSPPGERTESALHTRWNGQLYAVLGNEGEDGRWQMRFWWKPFVPLLWLGGLLIAFGGVLALLGRVAHDVRRLRAGGKIAYRRARMEQVK

SEQ ID NO: 68102 - DNA, 1956 bp, Microbulbifer degradans 2-40
  CDS (1)..(1956)
atggcgggtagctacaacggtaagctggtgtggatggcctctgcgcgatctttatccaccggcatgtttgtgtttgttgcaatctcaatagtgttgcttggcgtttcgttctatcaggacgatttcactgtagcctatgtcgccaatcactcgaattcattgctgcctgtggtgtacaaaatatgtgccgtttggggcgggcacgagggttcaatgctgctgtgggtgttaatgcttgcaggttggactttagcggtaactatttttagccgcgaattaccgctagattttcaagctagggtgctttcagtactcggcatggtgtcgtttggctttattttgtttattttgctcacctcaaacccatttgaccgaatattgcccttaccgcctgtggatggcgctgacttaaacccattcttacaagaccccggctttatcttccatccgccaatgctgtatatgggctatgttggctttgctgttatttttgcattcagtattgcggcattgctaagtggccggttagatagcgcctgggcaagatggtgtaggccttggggtaatttggcgtggtgctttttaacgctgggtttaacacttggaagttggtgggcgtactacgagctaggttggggtggctggtggttctgggacccagttgaaaacgcagcctttatgccttggttggtgggtaccgcatttatccataatttggcggtgtcggaaaagcgtgggttatttaaaaactggaccctatttttagctatttttggcttctcgctgagcttgttgggcacgttactagtgcgctcgggcttgcttacatccgttcatgcttttgccagtgatccgtcgcgcggggtatttattggggcattcttatttattgtgattcttgcctcgctcatactatttgctatgcgggcgcctctggttaaatcaaaaacaggttttgcgctgctatcgcgcgatgcgtttttattgctaaacagtgtggtgtttattgtttctgcttccattgtattgctaggcacactttaccctgtagtgttgttgctacttgggttgggcgctgtgtcggtgggcgagccatactttaatatctttttctctatattaatgagcattgccgccatagctaccggtattggcatggtgcttaattggaaaaagaccgaagctaaaagaatgcgtgactgggttaagtcgcccgcgttgtatgcgctttggttgggtaccgcattgccgggcatgatagccgatgaatattcttgggctgcggcggtttctattgcgcttggcagctgggttattttgtcttgtttgttcgatctagtacgtaaaacccgcaatgctgcgagtgtgtggattggaatgggcaagctaacggctacgtactacggcatgattgtggcgcatattggctttggtatatgcctattgggtgtgtgtttagataccatttacgatgatcagcgtgatctacggttagagctaggtaagcccgcgtttgctggccacttagagtatgagcttgttgatgtaagccgcgtaagagggccaaactataatggcgagcgagccgaagttatagtgcgcaaagacggcgagacaataagcattctgcacccagaaaagcgcgcttatttttctggtggcaatataatgagtgaagtggctatcgaccctggctttttttacgatatttatattgcgctgggggaaaagctagacaatacctcgtggagtatgcgtattcactacaaaccggtagtgcgttggatatggtttggcgcagtgtttatggcgctgggtggccttatagctattacagataaacgctacaagcgcaaaaaaactgttgctgtaaaaaatgcagtgggtgaagacgcaaaagctggcgatgccgatgcgaagcccatacttgccactgccaaacaacaacccgagtaa

SEQ ID NO: 68103 - protein, 651 aa, Microbulbifer degradans 2-40
MAGSYNGKLVWMASARSLSTGMFVFVAISIVLLGVSFYQDDFTVAYVANHSNSLLPVVYKICAVWGGHEGSMLLWVLMLAGWTLAVTIFSRELPLDFQARVLSVLGMVSFGFILFILLTSNPFDRILPLPPVDGADLNPFLQDPGFIFHPPMLYMGYVGFAVIFAFSIAALLSGRLDSAWARWCRPWGNLAWCFLTLGLTLGSWWAYYELGWGGWWFWDPVENAAFMPWLVGTAFIHNLAVSEKRGLFKNWTLFLAIFGFSLSLLGTLLVRSGLLTSVHAFASDPSRGVFIGAFLFIVILASLILFAMRAPLVKSKTGFALLSRDAFLLLNSVVFIVSASIVLLGTLYPVVLLLLGLGAVSVGEPYFNIFFSILMSIAAIATGIGMVLNWKKTEAKRMRDWVKSPALYALWLGTALPGMIADEYSWAAAVSIALGSWVILSCLFDLVRKTRNAASVWIGMGKLTATYYGMIVAHIGFGICLLGVCLDTIYDDQRDLRLELGKPAFAGHLEYELVDVSRVRGPNYNGERAEVIVRKDGETISILHPEKRAYFSGGNIMSEVAIDPGFFYDIYIALGEKLDNTSWSMRIHYKPVVRWIWFGAVFMALGGLIAITDKRYKRKKTVAVKNAVGEDAKAGDADAKPILATAKQQPE

SEQ ID NO: 68104 - DNA, 1524 bp, Haemophilus influenzae 86-028NP
  CDS (1)..(1524)
ttgggattgatttgctttggttttgcggtgtttattttattttattccaatccatttggacgcattttccctgctcccgcagaagggcgcgatctcaatccaatgttgcaagatgtgggattaattttccatccgcctttattatatgttggctatgtgggctttgcggtaaattttgcaatgagtttgagtgcgttgatttataaccaatctgcacgacaaattgcccgctcaatgcgtggatgggtgttggtttcttggttgtttttaaccattggcattgtgcttggtgcttggtgggcatattacgaacttggctggggcggttggtggttctgggatcccgtagaaaatgcgtctttaatgccttggttgcttgggttagcgttattacacagtttaatggcgacggaaaaacaaggcgtatttagttattggacaacgcttttttctctgcttgcttttgcctttagcgtattaggcacgtttattgttcgttctggcgcgctcacttctgtgcacgcctttgcattggataacacgcgcggttatgtgttgttattaattttctttgttttgacagcgttagcctttggtttattcgctttacgagcgggaagttcatcagaaagtgcggtgaaatttcagttcatttctaaatcgggtggcattttattactgaatattttgctgaccattgcgacggtttctacctttttaggtaccttttacccgatgttattccaagcgatgaattggggctcaatttcggtgggaagtccttattttaatagtattttcttccccattattacggcgattttaatcctaatggtaattgtgcttagcatacgtaaggggcaatttgatcgcacattattgatacgttgtgggtggttgcttattccgtctttaattcttgcaggcctaatgatttggcaacagctacgccataattctgcgttgaattttcacgctttcgcttttgtgttattaactcttgcgatttggcttttgttggtcactttatggcaaaattggcgacaaattcgtttgtctcaatttggtatgattttagcgcattgtggcgtggcgattgtaactattggtgcggtaatgagtggttattttggcagtgaaattggtgtgcgtttagcaccgcaacaaagtcaaacgctgggacaatatgaatttcactatcgccaattttctaatgaaatcggaccaaactttacggcagaagtcgccttttttgacgtaactgaaaatggtaaaccttatgcagaaattatccccgaacgccgttattacgatgttcgtacaatgacaatgagtgaagtggggcttaatggcggtttttggggcgatttatatattgtgatgggcgattctctcggcaaaggggaatttactttccgcttacattataaaccactgattcgttggctttgggcgggcggtattttaatggcctttggcgcactttttagcgtcttcggattacgcagaaaacaggaaaaataa

SEQ ID NO: 68105 - protein, 507 aa, Haemophilus influenzae 86-028NP
MGLICFGFAVFILFYSNPFGRIFPAPAEGRDLNPMLQDVGLIFHPPLLYVGYVGFAVNFAMSLSALIYNQSARQIARSMRGWVLVSWLFLTIGIVLGAWWAYYELGWGGWWFWDPVENASLMPWLLGLALLHSLMATEKQGVFSYWTTLFSLLAFAFSVLGTFIVRSGALTSVHAFALDNTRGYVLLLIFFVLTALAFGLFALRAGSSSESAVKFQFISKSGGILLLNILLTIATVSTFLGTFYPMLFQAMNWGSISVGSPYFNSIFFPIITAILILMVIVLSIRKGQFDRTLLIRCGWLLIPSLILAGLMIWQQLRHNSALNFHAFAFVLLTLAIWLLLVTLWQNWRQIRLSQFGMILAHCGVAIVTIGAVMSGYFGSEIGVRLAPQQSQTLGQYEFHYRQFSNEIGPNFTAEVAFFDVTENGKPYAEIIPERRYYDVRTMTMSEVGLNGGFWGDLYIVMGDSLGKGEFTFRLHYKPLIRWLWAGGILMAFGALFSVFGLRRKQEK

SEQ ID NO: 68106 - DNA, 1965 bp, Silicibacter sp. TM1040
  CDS (1)..(1965)
atgattacagagctcggtcacttcgccctcatcctcgcctttatgatcgccatcgtgcagacggttgtgcccctgattggtgcgcataaacgctggcccggctggatggccgtggcggaacccgcagcgcaggcccagttcctgtttacggcgttttcctttggggcgctcacatgggcctttgtgacctcggatttctcgctgcggctggtgacgctcaacagccactccgccaaaccgatgatctacaagatctcgggcacttgggggaaccatgagggctccatgctgctctgggtgctgatcgtgaccctctttggggccttggcctcggtgtttggaggcgggctgccgccgacactcaaggcgcgggtgctcagtgtgcaatcggccattggcgtggcctttttcgcgttcatcctctttacctccaaccccttcttgcggctggaaaaccctccctttgacgggcaggatctcaatccgctcctgcaagatccgggcctcgcgttccacccgccgtttctgtacttgggctatgtggggctctcgatggcgttctcctttgctgtggctgccctgatcgaagggcgggttgatgcggcctgggggcgctgggtccggccctggacattggcggcgtgggtgttcctgaccatcggcatcgcgctggggtcctggtgggcctattacgagcttggctggggcggcttctggttctgggatccggtggagaatgcgtccttcatgccatggcttctcgccgctgcgcttctgcattccgcgatcgtggtggaaaagcgcgaggcgctcaagagctggaccatccttctcgcgatcctcgcctttggcttttcgctcatcggcaccttcatcgtgcgctctgggcttttgacctcggtgcatgcctttgccaatgatccagagcgtggcgtggtgatccttggaattctcgccttctttaccggcggcgcgctgctgctctttgccctgcgcgcgcaggctatggaggccaaaggcgtgttctccatggtcagccgggagagcgcgctggtggccaacaacctcttgctggcggtcagctgctttgtggtttttgttggcacgctctggccggtggtggcggagatggcctttgatcgcaagctctcggtcggggcaccgttctttgatgcggccttcccgcccttcatggtggcgctggggctcttgctgccgatcggctcaatgctgccgtggaagcgcggtaaaggcgccaagacgctctggacgctgcgctatggcatcgtactggcgctggcccttgcggggctcgcctgggcgatccagaccgaaaagagcctgcttggccccgttggcgttctgctgggcgcttgggtcgtaagcggcgctgcacttgatttgttgcaacgcgcagggcgcaaggaccggctctcgcgcctgatgcggttgccgcgtgccgattggggcaaggcggtggcgcatgccgggcttggcgtgacgatctttgccgtggcagggctgacggcctggcaaaaagaagacatccgtgttgccaacctcaatgagccgttccgcgtcggtccctttgaactggtgctgtctgcggtcgaagaggggcgcgggccgaattacttcaccacgatgggcgtggtggatgtgacccgcaacggcaaggacgtcgcaacgctgcggccggagaaacgcgtctatccggtggcgcagatgcccaccacggaggcggcgattgattatcggttcacccgcgatctctatgtggtgctgggcgatgcgcaagagggcggcggatttactctgcgcacctatatcaagcccttcgccaactggatctggggcggcagcctgctgatggcccttggcggcttcctgagcctctcggaccgtcggttccgggttgcggccggggtgcgcaaggcccccaccgagggggtgcccgcggaatga

SEQ ID NO: 68107 - protein, 654 aa, Silicibacter sp. TM1040
MITELGHFALILAFMIAIVQTVVPLIGAHKRWPGWMAVAEPAAQAQFLFTAFSFGALTWAFVTSDFSLRLVTLNSHSAKPMIYKISGTWGNHEGSMLLWVLIVTLFGALASVFGGGLPPTLKARVLSVQSAIGVAFFAFILFTSNPFLRLENPPFDGQDLNPLLQDPGLAFHPPFLYLGYVGLSMAFSFAVAALIEGRVDAAWGRWVRPWTLAAWVFLTIGIALGSWWAYYELGWGGFWFWDPVENASFMPWLLAAALLHSAIVVEKREALKSWTILLAILAFGFSLIGTFIVRSGLLTSVHAFANDPERGVVILGILAFFTGGALLLFALRAQAMEAKGVFSMVSRESALVANNLLLAVSCFVVFVGTLWPVVAEMAFDRKLSVGAPFFDAAFPPFMVALGLLLPIGSMLPWKRGKGAKTLWTLRYGIVLALALAGLAWAIQTEKSLLGPVGVLLGAWVVSGAALDLLQRAGRKDRLSRLMRLPRADWGKAVAHAGLGVTIFAVAGLTAWQKEDIRVANLNEPFRVGPFELVLSAVEEGRGPNYFTTMGVVDVTRNGKDVATLRPEKRVYPVAQMPTTEAAIDYRFTRDLYVVLGDAQEGGGFTLRTYIKPFANWIWGGSLLMALGGFLSLSDRRFRVAAGVRKAPTEGVPAE

SEQ ID NO: 68108 - DNA, 1974 bp, Azotobacter vinelandii
  CDS (1)..(1974)
atgattcccgaactcggccacctggggatgatcctcgccctgtgcctggcgctggtgcagggcaccttgccgctgatcggcgcctggcgtggcgaccgcctgtggatgggcctggccgtgccggccgcctgggggcagttcgctttcctgtcgttcgccttcgtctgtctgacccaggctttcctggtcgacgacttctcggtcgcctacgtggccggcaactccaacagcgccttgccctggtactacaagctgagcgccgtgtggggcgcccacgaaggatcgctgctgctctgggcgctgatcctctccggctggaccttcgcggtgtcggtcttttcccggcaactgcccgaggagatgctggcccgcgtgctgggcgtgatggggctgatcagcgtcggcttcctgctgtttctgatcgtcacctccaaccccttcgcccgcctgttgccgcagacgccggtcgatggccgcgacctcaacccgctgttgcaggacttcggcctgatcgtccatccgccgatgctctacatgggttacgtcggcttctcagtggccttcgccttcgccatcgccgcgctgctcggcgggcgcctcgatgccgcctgggcgcgctggtcgcggccctggacgctggtcgcctgggcctttctcggtatcggcatcgtgctcggctcctggtgggcctattacgagctgggctggggcggctggtggttctgggacccggtggagaacgcttccttcatgccctggctgctgggcaccgcactgttgcactcgctggcggtgacggagaagcgcggggtgttcaagagctggacggtgcttctggccatcgccgccttctcgctgagcctgctcggcaccttcctggtgcgttccggggtgctgacttcggtgcatgccttcgccaacgatccggagcgcggcgtgttcatcctgatcttcctgctggtggtggtcggcagttcgctgaccctgttcgccatccgcgcgccggtggtcaggagccaggtgggcttcgccctccgctcgcgggaaaccctgctgctggtgaacaacctgctgctggtggtggcgacctcgaccatcctgctcggcacgctctatccgctactgctggatgcgctgtccggcgccaagctgtcggtcgggccgccgtacttcaatgcgctgttcctgccgctgatggggctgctgatgctgacgctggcggtcggcgtgctggtgcgctggaaggacacgccgctgcgctggctgtccggcatgctcgcgccggtactgctggccagcgtggcgctggccctgctggccgccttcgtgctcggcgatttcgcctgggcggtgctggcgaccgctttcctggcggcctgggtggttctcgccggggcgcgcgacctgctcgacaagacccgccacaagggactgctcaagggcctgcacgcgctttcgccgagctactggggcatgcaactgtcccacctggggatcgccgtctgcgccctgggcatcgtcctgagcagccaggaaagcgccgagcgcgacctgcgcatggcgccgggcgatgccgtggaactgggcggctaccgcttcgtcttcgagggcacccgccaccatgaggggcccaacttcgtcgccgaccgggccagcgtccgcgtcttcgacggcgacgacgaggtggccgtgctgcacccggagaagcgtctctataccgtgcagcggatgccgatgaccgaggccggcatcgacgcaggtttcacccgcgacttctacgtcgccctgggcgagccgctggaaaacggcgcctgggcggtccgcctgcatatcaagccgttcgtccgctggatctggctggggggcctgatgatggctttcggcgcggcgctggcggcctgcgaccggcgttatcgggtcaaggtcagggcccgcgtgcgcgaggctctgggcctggccggacaaggagcctga

SEQ ID NO: 68109 - protein, 657 aa, Azotobacter vinelandii
MIPELGHLGMILALCLALVQGTLPLIGAWRGDRLWMGLAVPAAWGQFAFLSFAFVCLTQAFLVDDFSVAYVAGNSNSALPWYYKLSAVWGAHEGSLLLWALILSGWTFAVSVFSRQLPEEMLARVLGVMGLISVGFLLFLIVTSNPFARLLPQTPVDGRDLNPLLQDFGLIVHPPMLYMGYVGFSVAFAFAIAALLGGRLDAAWARWSRPWTLVAWAFLGIGIVLGSWWAYYELGWGGWWFWDPVENASFMPWLLGTALLHSLAVTEKRGVFKSWTVLLAIAAFSLSLLGTFLVRSGVLTSVHAFANDPERGVFILIFLLVVVGSSLTLFAIRAPVVRSQVGFALRSRETLLLVNNLLLVVATSTILLGTLYPLLLDALSGAKLSVGPPYFNALFLPLMGLLMLTLAVGVLVRWKDTPLRWLSGMLAPVLLASVALALLAAFVLGDFAWAVLATAFLAAWVVLAGARDLLDKTRHKGLLKGLHALSPSYWGMQLSHLGIAVCALGIVLSSQESAERDLRMAPGDAVELGGYRFVFEGTRHHEGPNFVADRASVRVFDGDDEVAVLHPEKRLYTVQRMPMTEAGIDAGFTRDFYVALGEPLENGAWAVRLHIKPFVRWIWLGGLMMAFGAALAACDRRYRVKVRARVREALGLAGQGA

SEQ ID NO: 68110 - DNA, 1950 bp, Actinobacillus pleuropneumoniae serovar 1 str. 4074
  CDS (1)..(1950)
atggttgcggaattaggtaattacgcattggcacttgcgttcggattgtcaatttttttggcaattttaccgcttgttggtgcacaaaaacagaatagtactcttatggcgttagctcgtccgataacatgggcaatgtttttagcattaacgatttcattcggttcgcttttttatctgtttgcggtaaatgacttcagcgtgcaatacgtagtgaataactccaactcaacattacctatccaatatcgtctttctgcggtttggggatcgcacgaaggatcaatgctgttatgggtttggttgctttcgctttggtctatcgctgtggtggcattttctcgccagatgccggaagaagccgtttcgcgcgtattgagtgtaatgggattaatcagtatcggatttttggttttcttaatctttagttcaaatccgtttaaacgtactttccccgattttcctgcggacggtcgagaattaaatccgatgttgcaagatgtcggactgattttccatccgccgttattatatatgggatatgtcggtttctcggtggcatttgcgttcgcgattgcttcactaatgaccggaagattggataccgcttgggctcgttggtctcgtccttggacaatggcggcttgggtatttttaacacttggtatcgtactcggttcgtggtgggcttattacgaattaggctggggaggctggtggttctgggatccggttgaaaatgcttcgttaatgccgtggattgccggaacggcactgattcactcgttagccgttacggaaaaacgcggtacttttaaagcttggacggttttactggcgatattggcgttctcgctgtgtttattaggcaccttcttagtacgttccggtattttggtttcggtacatgcgtttgcttccgatccgactcgcggtttgtatattcttgcctatttagttttagtaattggcggttcattattactttacgctttacaaggctcgaaaattaaaagtttggataattatgaacgttattcgagagaatcgatgttgttaattaataacgtaatgctgatggcattcttatccgtagtgctgctgggtacattattaccgttagtacataaacaaatcggtttaggcacgatttcgatcggtgcgccgttctttgatcaaatgtttttaattttaatggtaccgttctcgtttattttaggtatcgggccattagtaaaatggcgtagagatcaagtatctgcgattcgaacaccggtaattattgccttaattatgatggtggtactcggtttcggcttaccgtatttactgcacgaccgtattactgccacttcggtattaggcgtgatgatggcatcgattattgtcattttgagcctatatgaattacatcaaagagcgacgcatagacattcatttttagccggtgtgtttaaattatcccgttctcattgggggatggtattggcgcacgtaggtgtcgcaatgacagtattcggaatcgcattcagccaaaactatagcgtagagaaaaacgtacgtatgaatgtcggcgatacggtatcgcttcaaggttacgactttactttcaaaggaatcaaaattaccgacggtgcgaactatcagggcggcacggctgaaattgagatttcgcgtcaagggcaatatgaatcgactctgaatgcggagaaacgcttctataacgtcagtaaaatggggatgaccgaagcggcaatcgactggggctttagaagagacttatatgccgctttaggtgaaaagttggaagacggttcatggggcgtacgtttatattataaaccgtttgttcgctggatctggattggcggcttatttatggtgttcggcggtttgctctgtatgtttgacaaacgttacagattaaacgtagttaaaaaagctgcataa

SEQ ID NO: 68111 - protein, 649 aa, Actinobacillus pleuropneumoniae serovar 1 str. 4074
MVAELGNYALALAFGLSIFLAILPLVGAQKQNSTLMALARPITWAMFLALTISFGSLFYLFAVNDFSVQYVVNNSNSTLPIQYRLSAVWGSHEGSMLLWVWLLSLWSIAVVAFSRQMPEEAVSRVLSVMGLISIGFLVFLIFSSNPFKRTFPDFPADGRELNPMLQDVGLIFHPPLLYMGYVGFSVAFAFAIASLMTGRLDTAWARWSRPWTMAAWVFLTLGIVLGSWWAYYELGWGGWWFWDPVENASLMPWIAGTALIHSLAVTEKRGTFKAWTVLLAILAFSLCLLGTFLVRSGILVSVHAFASDPTRGLYILAYLVLVIGGSLLLYALQGSKIKSLDNYERYSRESMLLINNVMLMAFLSVVLLGTLLPLVHKQIGLGTISIGAPFFDQMFLILMVPFSFILGIGPLVKWRRDQVSAIRTPVIIALIMMVVLGFGLPYLLHDRITATSVLGVMMASIIVILSLYELHQRATHRHSFLAGVFKLSRSHWGMVLAHVGVAMTVFGIAFSQNYSVEKNVRMNVGDTVSLQGYDFTFKGIKITDGANYQGGTAEIEISRQGQYESTLNAEKRFYNVSKMGMTEAAIDWGFRRDLYAALGEKLEDGSWGVRLYYKPFVRWIWIGGLFMVFGGLLCMFDKRYRLNVVKKAA

SEQ ID NO: 68112 - DNA, 2394 bp, Chloroflexus aurantiacus
  CDS (1)..(2394)
atgtatctctttggtacgttcctcctgatggccagtctggggatgaccttgctggcgattatcagttatggactagttttacgtgggcagcgggtagcgcttagttatgcccgtttcggtgtctatgcggcgttagccggcgtgctgatgtcgtggacgctactgattacggtgtttcttgcccgccgctttgatctggactacgtctacaactatagctcccgcgatctggagttcttcttcacgattgcggccagttgggccggtcaaccaggtagttttatgatctggttgctgtgggggtcaattgccagcgcgttgctgattcgccgtaccaagcattttgagtcgtatgtgttaatggttgttatggcgatccaggcagcgatcattgggtttgtgctggtgctcaatccattccagcccctggtcgatcccaataccggcgtcgcacttaccccaggtgacggtcgcggtctcaatccgctgttgcacaacttctggatgatcattcaccccccaatcctgttcgttggctatgcgctttccatgattcccttcgcatttgccctggctgcgctgtggcggcgcgattacgatacatgggtgaaacgggccttgccatggacattggcggcctgggcatttctggggctggcactcttgctcggcggttactgggcttatgagacgctgggctggggtggctattggggttgggatccggttgaaaacttgtcgctggtaccctggctcattctaaccgccctgatccacgggatgcttgtgcaacgcacccacggtggtttgcgaaagaccaacctcgtgttgggtgtggcgacgtacattacggtgttctacgctacctttatgacccgcagcggggtctatgctaacttctctgtccactcatttgtcgccgaagggatttttgagggactggttggctttcagattttcttgctggcggttgccattgtctcgttgctggcccgctggaacgatattcctgcccgtccacttagtgacaaattcttctcgcgtgatagcttcttcgtgctggcgattattaccattgtcatgaccgcgctggtcgttggtatcggcacctcgatgccggtcatttcggctattcctggggtagggcatacgctgcaagagtggatggggcgttatttcgagcttgatgacggcaccctgatgaacccgcaggcgcaaccgtttgaagatggccgtttttcgcttgccccatccttctaccagcgcacagtacctccactcggcgtggtagcaatcgtgttgctgatcgttgggccactccttggctggcgcgacgctaatctcagccacctcctgcgtgcattgcgttggccggcagtgtttgcagtgatagcggctgtcgtggccatgattatcaatgtgcgcgatttgctctccctggcttatgttgccggtggtgtcttcgcgtttggaacgaacctggtgatgattattcgtaccctgcgtggtggctggttacggatcggtggctatcttgctcacctcggttttacagtgatggcgattgggatggttgcctcttcggcctacgctactcccgatactcgcctgacgctatctcccggtgagtcggcccgattgtttggctatgagtttatcttcaacggctatcaacttgatgaccagcagcgtggtgtgctcgatctcacggtgagtgacggatcgggtaccttctcggctcgaccgtatctctactttaatcagcgtatgggcgcaaccatgcaaacgccctcgatccacagctatctctggcacgatctctacatttcaccggcaggttatgacccggaacgtgatccttcgcgaccggtgttaggtgtggatcagagcgcacagatggggccatacacgttgaccttccgcgggttcaatatcgaccgcgaggcaatgatgcgtggtgaagcgaaggttggcgcccgtgtcgaagttacttatgaaggccagaccttcgaggttgagccgcgggtggaagttgtccccaatccgaccacgaatgaaggtgagttgcagttcattccggtcaccctacccggtggccacaccctgcgtctagcggagcttgatccgaccaaccgcatggtgcttctcgaaggtagtggtcccggcctggatgatctgccggtggtgccggccaaggctgtcattgcggtgagtgtcaaaccgctggttgtgctggtctggactggtgttatcatgatggtgatcggcggtgcaatcgcactggtacggcgctaccttgaaggtagtctggcgctggctggtgcacgagtacgactacccaaagcgttgccggaactggcggctcaactgggctggcgcggggccggcgactag

SEQ ID NO: 68113 - protein, 797 aa, Chloroflexus aurantiacus
MYLFGTFLLMASLGMTLLAIISYGLVLRGQRVALSYARFGVYAALAGVLMSWTLLITVFLARRFDLDYVYNYSSRDLEFFFTIAASWAGQPGSFMIWLLWGSIASALLIRRTKHFESYVLMVVMAIQAAIIGFVLVLNPFQPLVDPNTGVALTPGDGRGLNPLLHNFWMIIHPPILFVGYALSMIPFAFALAALWRRDYDTWVKRALPWTLAAWAFLGLALLLGGYWAYETLGWGGYWGWDPVENLSLVPWLILTALIHGMLVQRTHGGLRKTNLVLGVATYITVFYATFMTRSGVYANFSVHSFVAEGIFEGLVGFQIFLLAVAIVSLLARWNDIPARPLSDKFFSRDSFFVLAIITIVMTALVVGIGTSMPVISAIPGVGHTLQEWMGRYFELDDGTLMNPQAQPFEDGRFSLAPSFYQRTVPPLGVVAIVLLIVGPLLGWRDANLSHLLRALRWPAVFAVIAAVVAMIINVRDLLSLAYVAGGVFAFGTNLVMIIRTLRGGWLRIGGYLAHLGFTVMAIGMVASSAYATPDTRLTLSPGESARLFGYEFIFNGYQLDDQQRGVLDLTVSDGSGTFSARPYLYFNQRMGATMQTPSIHSYLWHDLYISPAGYDPERDPSRPVLGVDQSAQMGPYTLTFRGFNIDREAMMRGEAKVGARVEVTYEGQTFEVEPRVEVVPNPTTNEGELQFIPVTLPGGHTLRLAELDPTNRMVLLEGSGPGLDDLPVVPAKAVIAVSVKPLVVLVWTGVIMMVIGGAIALVRRYLEGSLALAGARVRLPKALPELAAQLGWRGAGD

SEQ ID NO: 68114 - DNA, 1962 bp, Paracoccus denitrificans
  CDS (1)..(1962): transl_table=11
atgctggtcgagaccgggcattttgcgctgctggtggccctctgcgtcgcgctgatccagtcggtcattcccctggtgggggcccagcgcggctggtcgggctggatggcggtttcgacccccaccgcgctgggccagtttgggatgatcgcgatcgcgttggcgaccctgatctatgccttcgtgacggccgacttttcgctcaagatgctctacgaaaactcccataccgataagccgctgctctacaaggtggccggggtctggggcaaccatgaggggaacgtgcttctgtgggtgctgatcctggccatgtttacggccgcgtccgcggcctttggcggtgcgatgccggagcggctgcgggcccggctgctcgcggtgcagggctccatcggggtcgcctttctgctctttgtgctttttacctcgaacccattcattcgggtggaagaagcccccttcagcggccgcgacctgaacccgatcctgcaggaccccgggctcgcgttccatccgccgttcctgtacgtcgggtatgtggggttttcgatcggcttcggcttcgccgtggccgcgctgctcgagggcaaggtcgacgccgcctgggcgcgctgggtcaggccatggacgctggcgggctgggtcttcctgaccgtcggcatcgcgctgggttcgtggtgggcctattacgaggtgggctggggcgggttctggttctgggatcccgtggaaaacgccagcttcatgccctggctgatcgccgccggcctcctgcattccgccatcgtggtggaaaagcgcgaggtgctgaaaagctggaccatcctgctggcgatcatggctttcggcttttcgctgatcggcaccttcatcgtgcgctcgggggtcattacctcggtccacagctttgccagcgaccccaagcgcggggtgttcatcctggcgatcctggcgttcttcctcggcgggtcgctgaccctttatgccgcgcgggcgaacgagatccaggcgaagggggtgctgtccatggtcagccgcgaatcgtcgctcatcatgaacaacgtccttatcgcggtggccgcgctggtggtcttgaccggcacggtgtggcccctgctggcggagctgttttgggaccgacgactggcggtgggggcgccgttctttgaaaagacctttaccccattcatggtggggctggccctgcttctccccatcggggcgatggtgccgtggaaacgctcgagcctcggcaagctggtccggccggtgttgcccgcgctggtctttgccggggcggtgatggcgctggtctttgccgtctcgaccggccgttcggcgctggcggtgggcgccgcgtcgctgggcggctggatggtgtttggcgccctgtccgagatctggcaacgcgccaaccggaccccgggacgcctcctgcggctgccgcggaacgattggggcaaggcgttggcgcatgggggcctgggcatcgcctttgcgggcgtcgggctgttgatgatgggccaggtcgaggatgtccgcgtggcgaagacgggggacgcgttcgaggtcgcaggttacaccatctcgctgatctccgtcgaggatctgccggggcccaacttcgccgccaagtccgcgacgatggaggtccggcagggcgggaagctgctgacgaccctgcatcccgaaaagcgcgtctatccggcgcaggcgatgccgaccacggaggccgccatcgacagcggcttttggcgcgatgtctatgcggtcatcggcgacccgcaggaggcggggggctgggcggtgcggtcgtattacaagcctttcgccaactggatctgggcgggctgtctggtgatggcctttggcggcgtgctgagccttaccgaccggcggtaccgtacggccaccggcgcgcggcgcgcggcggtcgccgatgctctggccgcggagtga

SEQ ID NO: 68115 - protein, 653 aa, Paracoccus denitrificans
MLVETGHFALLVALCVALIQSVIPLVGAQRGWSGWMAVSTPTALGQFGMIAIALATLIYAFVTADFSLKMLYENSHTDKPLLYKVAGVWGNHEGNVLLWVLILAMFTAASAAFGGAMPERLRARLLAVQGSIGVAFLLFVLFTSNPFIRVEEAPFSGRDLNPILQDPGLAFHPPFLYVGYVGFSIGFGFAVAALLEGKVDAAWARWVRPWTLAGWVFLTVGIALGSWWAYYEVGWGGFWFWDPVENASFMPWLIAAGLLHSAIVVEKREVLKSWTILLAIMAFGFSLIGTFIVRSGVITSVHSFASDPKRGVFILAILAFFLGGSLTLYAARANEIQAKGVLSMVSRESSLIMNNVLIAVAALVVLTGTVWPLLAELFWDRRLAVGAPFFEKTFTPFMVGLALLLPIGAMVPWKRSSLGKLVRPVLPALVFAGAVMALVFAVSTGRSALAVGAASLGGWMVFGALSEIWQRANRTPGRLLRLPRNDWGKALAHGGLGIAFAGVGLLMMGQVEDVRVAKTGDAFEVAGYTISLISVEDLPGPNFAAKSATMEVRQGGKLLTTLHPEKRVYPAQAMPTTEAAIDSGFWRDVYAVIGDPQEAGGWAVRSYYKPFANWIWAGCLVMAFGGVLSLTDRRYRTATGARRAAVADALAAE

SEQ ID NO: 68116 - DNA, 2145 bp, Pseudomonas fluorescens
  CDS (1)..(2145): transl_table=11
atgacctctacattgtttattcccgagttgggccagttggcgatgatcctcgccctgtgctttgccatcgtccaggccatcgtgccgctgctgggcgcctggcgcggtgatcggctgtggatgagcctggcgcaacccgcgctggggccagttcgcgttcctggcgttcgctttggttgcctgacctacgcctttatgaccgacgacttttccgtcgcctatgtcgccagcaactccaacagcgctttgccctggtactacaagttcagcgccgtctggggtgcccacgaaggctccctgctgctgtgggccttcatcctcggcggctggacctttgcggtgtcggtgttctcccggcagttgccgcaagtgatgctggcgcgggtgctggcggtgatgggcatgatcagcatcggcttcctgctgttcttgatcatgacctccaacccgttcgagcggattctgccgcagattcccgtggacggtcgcgacctcaacccgctgctgcaggatatgggcctgatcgtccacccgccgatgctatacatgggttatgtgggcttctccgtggctttcgcctttgccatcgccgccttgctcggcgggcgtctcgacgccgcctgggcgcgctggtcgcggccgtggaccatcgtcgcctgggccttcctgggtatcggcatcaccctgggctcgtggtgggcctactatgaactcggctggggcggctggtggttctgggacccggtggaaaacgcctccttcatgccctggctggtgggcacggcgctgattcactccctggcagtcacggaaaaacgcggcgtgttcaagagctggacggtgttgctggccatcgccgccttctccctgagcctgctgggcaccttcctcgtgcgttccggcgtgctgacgtcggtgcatgcgttcgctgccgaccctgagcgcggcgtgttcatcctgatcttcctgctgtgcgtggtgggcggctcgctgaccctgttcgccctgcgtgcgccggtggtcaagagccacgtgggcttcaacctgtggtcgcgggaaaccctgctgctggggaacaacctggtcctggtggtcgccgcttcgatgatcctgctgggcaccctgtacccgctggtgctcgatgccctgaccggcgccaaactgtcggtcggcccgccgtacttcaacgccttgttcatcccgttgatgggcctgctgatggtggtgatggcgattggcgtgctggtgcgctggaaagacaccccggtcaaatggctgctgggcatgctcactccggtgctgctgggcagtgccgccttgtcggtgattgccgggattcctacggcgacttcaactgggccgtgctcgcgactttcatgctggcggcctgggtgttactggccgcgtgcgcgatatcttcgacaagacccgccacaagggcctgatcaaaggcctgccgaccctgacccgcagttactggggtatgcagatcgcccacatcggcatcgccgtgtgtgccctgggcgtggtgttgtccagccagaacaggcccgagcgcgacttgcgcctggcccctggcgagtccatggctcgccaggggccaggcgcaagtctgcgctcggcgctgttctggctggacaacaccacgcccagggcacacacggcgatgccgatgtgggcgatctgcataccccagtaactgctgggtcaagggtcggcaggcctttgatcaggcccttgtggcgcatggacctggcgggctaccagttcgtgtttgaaggtgccaagcacttcgaagggccgaacttcacttccgacaaaggcaccgtgcgcgtggtgcgcaacggcaagcaaatcgccgtgctgcacccggagaaacgcctgtacaccgtgcaaagctcgatgatgaccgaagccgggatcgacgccgggttcacccgtgatctctacgtggcactgggcgagccgttgggcgatggcgcctgggccgtgcgcgtgcacgtcaaaccgtttgtgcgctggatctggttcggtggcctgctgaccggcttcggcgggttgctggccgcgatggaccggcgttaccgggtcaaggtcaagagccgggtgcgtgaagcccttggcatgcaaggagccgctgtatga

SEQ ID NO: 68117 - protein, 714 aa, Pseudomonas fluorescens
MTSTLFIPELGQLAMILALCFAIVQAIVPLLGAWRGDRLWMSLAQPALGPVRVPGVRFGCLTYAFMTDDFSVAYVASNSNSALPWYYKFSAVWGAHEGSLLLWAFILGGWTFAVSVFSRQLPQVMLARVLAVMGMISIGFLLFLIMTSNPFERILPQIPVDGRDLNPLLQDMGLIVHPPMLYMGYVGFSVAFAFAIAALLGGRLDAAWARWSRPWTIVAWAFLGIGITLGSWWAYYELGWGGWWFWDPVENASFMPWLVGTALIHSLAVTEKRGVFKSWTVLLAIAAFSLSLLGTFLVRSGVLTSVHAFAADPERGVFILIFLLCVVGGSLTLFALRAPVVKSHVGFNLWSRETLLLGNNLVLVVAASMILLGTLYPLVLDALTGAKLSVGPPYFNALFIPLMGLLMVVMAIGVLVRWKDTPVKWLLGMLTPVLLGSAALSVIAGIPTATSTGPCSRLSCWRPGCYWPRARYLRQDPPQGPDQRPADPDPQLLGYADRPHRHRRVCPGRGVVQPEQARARLAPGPWRVHGSPGARRKSALGAVLAGQHHAQGTHGDADVGDLHTPVTAGSRVGRPLIRPLWRMDLAGYQFVFEGAKHFEGPNFTSDKGTVRVVRNGKQIAVLHPEKRLYTVQSSMMTEAGIDAGFTRDLYVALGEPLGDGAWAVRVHVKPFVRWIWFGGLLTGFGGLLAAMDRRYRVKVKSRVREALGMQGAAV

SEQ ID NO: 68118 - DNA, 2001 bp, Rhizobium etli
  CDS (1)..(2001): transl_table=11
atgatcatcgagatcggccattacgctctggtcgtgcggctggcgacggcgctgatcgtctcgatcgtgcctgtcatcgcggcccgccgtcatgatccggcgctgatggatgtggcgacatcaggttcgctggcgatgtttgcccttgtcgcctttgccttcgccgtcttgacctatgcccatgtcgtctccgacttctccgtcgagaacgtctgggagaattcgcattcgctggtgccgctgatctacaaatattccggcgtctggggcaatcacgagggatcgatgatgctctggctgctgatcctggcgctgttcagcgcgctggtcgcgatcttcggcgccaatctgccggagacgctgaaagccaatgtgcttgccgtgcaggcctggatctcgctcgccttcaccctgttcatccttttgacctccaatcccttcctgcggctcgatccggccccggccgagggccgcgatctcaatccggtgctgcaggatgtcgggctcgccatccacccgccgctgctctatctcggctattgtcggcttttccgttgcttctccttcgccgttgcagccctcattgaaagccgcatcgacgccgcctgggcgcgctgggtccggccctggacgctcgccgcctggacctgcctgacgcttggcatcgccatgggctcctactgggcctattacgagctcggctggggcggctggtggttctgggacccggtggaaaacgcctcgttcatgccgtggctcgccggcaccgcgctgctgcattcggcgctcgtcatggaaaagcgcgaggcgctgaagatctggacggtgctgctcgccatcctgaccttctcgctgtcgctgatgggcaccttcctggtgcgctccggggtgctgacctcggtgcatgcctttgccagcgatcccacccgcggcgttttcatcctgtcgatcctgctgatcttcatcggcggagcgctgtcgctgtttgccctgcgggcgccgaagcttgcggccggcgggctgtttgcgccgatctcgcgcgagggggcgctcgtcctcaacaatctgatcctgacggtcgcctgcggcacggtgctgaccggcacgctctatccgctgctgttggaaacgctgaccggcgacaagatctccgtcgggccgcccttcttcaacctgaccttcggcctgctgatggcgccgctgctcgtcatcgtgccgttcgggccgctgctggcctggaagcgcggcgatctgctcggcgccctgcagcggctctacgttgtcgcggctctcgccttcaccgccgcggtcatcgtcttttatctccaacatggcgggccggtgctctccgtgctcgggctcgggctggcgccgggctgttcctggatcctcggcgccgttgccgatctctggtatcgggccggcatctgcataggtcgccgggcagcatcgcctggcgccgcctttccggcttgccgcgctcggccttcgcacgcgcttgcccatgccggcctcgcggtcacggtgctcggcatcgtcgccgtcaccaccttccagagcgaacatgttgtcgcgatgaagccgggcgagataatcgaggccgggggctacagccttgcgttcgacggcatgcgcccgggcagggacccgaactacaccgaggagcgcggccayttcaccatccgacgcgccggggttgcggtcgccgagacctggtcggccaagcgcctttacaccgcccggcagatgccgacgacggaggccggcatccagaccttcggtctcagccagctctatgtctcgctgggcgacgccaccaaggacggcggcatcgtcgtgcgcatctggtggaagccgttcatcctgtgcatctggggcggcgcgatgatcatggccgccggcggcctcgtctcgctctccgaccggcgcctgcgtgtcggcgcaccgcggagaaaggctaaggcaaaaccgacgacgcctgcgatggagccggcggaatga

SEQ ID NO: 68119 - protein, 666 aa, Rhizobium etli
MIIEIGHYALVVRLATALIVSIVPVIAARRHDPALMDVATSGSLAMFALVAFAFAVLTYAHVVSDFSVENVWENSHSLVPLIYKYSGVWGNHEGSMMLWLLILALFSALVAIFGANLPETLKANVLAVQAWISLAFTLFILLTSNPFLRLDPAPAEGRDLNPVLQDVGLAIHPPLLYLGYCRLFRCFSFAVAALIESRIDAAWARWVRPWTLAAWTCLTLGIAMGSYWAYYELGWGGWWFWDPVENASFMPWLAGTALLHSALVMEKREALKIWTVLLAILTFSLSLMGTFLVRSGVLTSVHAFASDPTRGVFILSILLIFIGGALSLFALRAPKLAAGGLFAPISREGALVLNNLILTVACGTVLTGTLYPLLLETLTGDKISVGPPFFNLTFGLLMAPLLVIVPFGPLLAWKRGDLLGALQRLYVVAALAFTAAVIVFYLQHGGPVLSVLGLGLAPGCSWILGAVADLWYRAGICIGRRAASPGAAFPACRARPSHALAHAGLAVTVLGIVAVTTFQSEHVVAMKPGEIIEAGGYSLAFDGMRPGRDPNYTEERGHFTIRRAGVAVAETWSAKRLYTARQMPTTEAGIQTFGLSQLYVSLGDATKDGGIVVRIWWKPFILCIWGGAMIMAAGGLVSLSDRRLRVGAPRRKAKAKPTTPAMEPAE

SEQ ID NO: 68120 - DNA, 1995 bp, Rhizobium leguminosarum
  CDS (1)..(1995): transl_table=11
atgatcatcgagatcggccattacgcgctggtgctggcgctggcaacggcgctcatcctctccatcgtgccggtaatcggagcccgtcgtcacgaccgggcgatgatggatgtggcgacgatcggctcgctggcgatgttctcgctggtggccttctccttcggcgtgctgacctatgcccatgtcgtctcggatttctcggtcgagaacgtctgggagaattcgcattctctggtgccgctgctctacaaatattccggcgtctggggcaatcacgaagggtcgatgatgctctggctgttgatcctgacgctgttcagcgccctggtcgccgtcttcggccgcaatctgccggagacgctgaaggccaatgtactttccgtgcaggcctggatatcggtcgccttcacgctgttcattctgttgacctccaatcccttcctccggctcgatccggcgccggccgagggccgcgatctcaacccggtccttcaggatgtcggtctggcgatccacccgccgctgctctatctcggctattgtcggcttctccgctgtttctcctttgcggtcgcggccctgctggaagggcggatcgacgccgcctgggcccgctgggtgcggccctggacgcttgccgcctggacctttctgacgcttggcatcgccatgggctcttactcttactgggcctattacgagctcggctggggcggctggtggttctgggacccggtggaaaacgcctccttcatgccatggctcgccggtaccgcactgttgcattctgccctcgtcatggaaaagcgcgaggcgctgaagatctggacggtgctgctggccatcctcaccttttcgctgtcgctgatgggcaccttcctggtgcgctccggcgtgttgacctcggtgcatgcctttgccagcgacccatcccgcggcgttttcattctctgcatcctgctgatcttcatcggcggggcgctgtcgctatttgctttccgcgcgccgcggctgtcggcaggcgggctgtttgcgccgatctcgcgcgagggcgcgctcgttgtcaacaatcctgatctgacggtcgcctgcggcacggtgctcaccggcacgctctatccgctgctcttggaaacgctgaccggcgacaagatttccgtcgggccgcccttcttcaacctgaccttcggcctgctgatggcgccgctgatcgtcatcgtccccttcgggccgatgctggcctggaagcgcggcgatctgctcggtgccctgcagcggctctatgtcgtggcaggtcttgccttccttgccgcagtaatcttcttctacatcgaacatggcgggccggtgctgtcagtgctcggcctcgcgccgggctgttcctggatcctcggcgccgtcgccgatctctggtatcgcgccggcatctgtataggtcgccgggccgtcttgcctggcgccggctttccggcctgccgtgttcgcttcggcaccgcccttgcccatgccggactcggcgtcaccgtgcttggcatcgtcgcggtgacgacgttccagagcgagcatgtcatcgagatgaagccgggtgaggtgaccgaggccggcggttatagcctgcatttcgacggcatgcagccggggaccgaaccgaactataccgaggagcgtggccacttcaccatccgacgtgccggcgtcgcggttgccgatacctggtcggccaagcgcctttataccgcccggcagatgccgacgacggaggccggcatcctgaccttcgggctgaggcagctctatgtctctttgggtgatgccaccaaggacggcggcatcgtcgtacgcatctggtggaagccgttcattctctgcatctggggcggcgcggtgttcatggccttcggcggcctcgtctcgctcagcgaccggcgcctgcgtgtcggcgccccggccaaggcaagcgcaaagccggctcccgcaatggagccggcggaatga

SEQ ID NO: 68121 - protein, 664 aa, Rhizobium leguminosarum
MIIEIGHYALVLALATALILSIVPVIGARRHDRAMMDVATIGSLAMFSLVAFSFGVLTYAHVVSDFSVENVWENSHSLVPLLYKYSGVWGNHEGSMMLWLLILTLFSALVAVFGRNLPETLKANVLSVQAWISVAFTLFILLTSNPFLRLDPAPAEGRDLNPVLQDVGLAIHPPLLYLGYCRLLRCFSFAVAALLEGRIDAAWARWVRPWTLAAWTFLTLGIAMGSYSYWAYYELGWGGWWFWDPVENASFMPWLAGTALLHSALVMEKREALKIWTVLLAILTFSLSLMGTFLVRSGVLTSVHAFASDPSRGVFILCILLIFIGGALSLFAFRAPRLSAGGLFAPISREGALVVNNPDLTVACGTVLTGTLYPLLLETLTGDKISVGPPFFNLTFGLLMAPLIVIVPFGPMLAWKRGDLLGALQRLYVVAGLAFLAAVIFFYIEHGGPVLSVLGLAPGCSWILGAVADLWYRAGICIGRRAVLPGAGFPACRVRFGTALAHAGLGVTVLGIVAVTTFQSEHVIEMKPGEVTEAGGYSLHFDGMQPGTEPNYTEERGHFTIRRAGVAVADTWSAKRLYTARQMPTTEAGILTFGLRQLYVSLGDATKDGGIVVRIWWKPFILCIWGGAVFMAFGGLVSLSDRRLRVGAPAKASAKPAPAMEPAE

SEQ ID NO: 68122 - DNA, 1977 bp, Acetobacter diazotrophicus
  CDS (1)..(1977): transl_table=11
atgacgccggaactgggcaatttcgcgctggcgctggcctgctgcctggccggcgggcaggcgatcctgccgctggtgggcgcgcggcggcgcgacccgcggctgatggcgctggcccccgccctggcggtggggcagatgctggcgctggccttttccttcgcatgcctgatcgatgcggcggtgcgtgacgatttctcggtccagaacgtcgcggccaacagcgccgccgccaagccgctgctgtacaaaatcaccggcgtatggggcaatcacgagggatcggtactgctgtgggcgctgatcctggggatctgcggcggggcggtggcactgttcggccgcaacctgccctctgccctgcgggcgcgggtcatcgcggtcctgggcggcgtttcggccggcttccagctgttctgcctgacgacgtccaatccgttcgaccgcgtctggcccgcgccgatggacggccagggcatgaacccgctgctgcaggacccgggcctggccttccatccgcccattctctacaccggctatgtcggcttcgccgtgcccttcgccttcgccgtcgccgccctgatcgagggacgggtggacgccgcctggggccgctgggtccgcccctgggccgtcgcggcctggtgcttcctgacctgcggcatcgcgctggggtcgtggtggtcgtactacgtgctgggctggggcggctactggttctgggacccggtggaaaacgcgtcgctgatcccgtggctgaccggcaccgcgctggtccattccgccatcgtggtggaaaagcgcgaggcgctgaagatctggaccgtgctgctggcatcggacatttcgttctcgctgtccggcacgttcctggtccgctcgggcattctcaattccgtccatgccttcgccaacgacccggcgcgcggcatcttcatcctgggcctgctggcgctggtcatcggcgggtcgctgctgctgttcgcgatccgcgcgccggcgctggtggcgggcggcctgttcgcgccggtctcgcgcgaggggctgctggtcgtgaacaatatcctgctgtgctcgatctgcgcggtggtgctgaccgggaccatgtatccgcccttcatgtcgctgctgttcggcaagacgatttcggtcggcaagccgttcttcgacgccacggcggcgccgctggcgattccgcttctggccttcatggggttcggcccgatgatgccgtggaagcgcgcccagttctggcccgtgctgcgccggctgtggtgggccgggatcgtcaccgccctcgccttctgcctgatggcctggcgcatccgcgacgtgctgccgctgctggccgcgaccggcgcggtctgggtgatcgcggccagcgtcgccgacattgccgagcgcgtccgcctgttccgcatcccgcccggcgccagcctgcagcgcgcgcgcatgctgccgcgcgcggcgctgggcgcggccctggcccatgccggcgtcggcatcagcgtgctggggctggccgccatgtcgcaggcccagcaccgcatcgtcgaggtccgggtcggccagaccgagatgctggccggcgacgcctggaccctgaccgcgatccgcgcggcccccggcccgaactacacgtccctgatcgcgacgatcgaggtccggcatgacggcaggctggtcaccgtgctgcatccgtccaagcgcaccttccccagccagaaccagacgacgaccgaggtcgccatccataccaacctgatgtccgacctgtacggcgtgctgggcgaccggcacggcaccgacgccgacccgacctacgtgctgcgcctgcactacaatccgctggcgccgtggatctgggctggcgggctgatcatggcgctgggcggggcgctgtcgctgtccgaccggcggacgcgcgtcggcgcgccgcgccgcgccgccgcccccggcatggtggccgcgcaatga

SEQ ID NO: 68123 - protein, 658 aa, Acetobacter diazotrophicus
MTPELGNFALALACCLAGGQAILPLVGARRRDPRLMALAPALAVGQMLALAFSFACLIDAAVRDDFSVQNVAANSAAAKPLLYKITGVWGNHEGSVLLWALILGICGGAVALFGRNLPSALRARVIAVLGGVSAGFQLFCLTTSNPFDRVWPAPMDGQGMNPLLQDPGLAFHPPILYTGYVGFAVPFAFAVAALIEGRVDAAWGRWVRPWAVAAWCFLTCGIALGSWWSYYVLGWGGYWFWDPVENASLIPWLTGTALVHSAIVVEKREALKIWTVLLASDISFSLSGTFLVRSGILNSVHAFANDPARGIFILGLLALVIGGSLLLFAIRAPALVAGGLFAPVSREGLLVVNNILLCSICAVVLTGTMYPPFMSLLFGKTISVGKPFFDATAAPLAIPLLAFMGFGPMMPWKRAQFWPVLRRLWWAGIVTALAFCLMAWRIRDVLPLLAATGAVWVIAASVADIAERVRLFRIPPGASLQRARMLPRAALGAALAHAGVGISVLGLAAMSQAQHRIVEVRVGQTEMLAGDAWTLTAIRAAPGPNYTSLIATIEVRHDGRLVTVLHPSKRTFPSQNQTTTEVAIHTNLMSDLYGVLGDRHGTDADPTYVLRLHYNPLAPWIWAGGLIMALGGALSLSDRRTRVGAPRRAAAPGMVAAQ

SEQ ID NO: 68124 - DNA, 1953 bp, Legionella pneumophila
  CDS (1)..(1953): transl_table=11
atgatagcggaattaggactgttttttttgattttggctttagtggcttctttgatgttagctttgatcccattagctggtttgcaattcaatcggaaagactggattgattcctccaggaattatgtcgtgctgcaatttttatttgtggcatgtgcttacctatgtctcacggcctgttttttgatggatgatttttcggtgatctatgtgctgaataactccagcttattgctcccatggttttataaattttgtgctgtgtggggtgggcatgaaggttccatgctgttatgggttgctatccttagtttttggatgatcctggtttgtttttttagctcaagccttgatacggaaatgcgcgctcgggtattagttattttaggttggctaagcattggttttattctttttttgttaatgacttccaatcctttcttgcgccaatttcaagtattgaatacacagggccgtgatctgaatccattgctgcaagatcctggctttttattccatcctcctatgttgtacatgggatatgtagggttttgtgtcgcttttgcttttgctattgccgccttgtgggcagggaaagtagaaaccagttggtctaaatggaccagaccctggactctggctgcctggtgttgtttaaccgcgggaattactttgggcagttggtgggcttatagagaattaggctggggtggttggtggttttgggatcctgtagaaaacgcttcttttatgccctggctggttggtacggcactattgcattctttggcagttacagagcagcgccagcaatttaaagcgtggaccatgttgcttgcaatcgctgctttttctttaagtttaattggtacttttcttgttcgctctggagttttaacttcagttcatgcctttgcggttgatcctcagcggggattatatattctgggatttttgttattcgtcattgggggttctttaacattgtttcttttcagagcccaaaccttgcaagtcaataaacatcctggcttattatcccgagaaagtgcgttgttgttaaacaatgtgtttttagtggttattatgctgacggtattaatgggcacggtttatccattgctggtggaagggttagggttaggcaaattatccgttggagcgccctattttaatgcagtatttgttccattaataattcctttattattgctaatggggttaggtgtccgtttgaaatggcagaatgattgttggagggatgtcttcagaaaactaaatcgtatttttttgcttagtctgatattgcctgtcattttactattctgtacctcaactgaaatacaccttacagcccttttgggattaattttggcattctgggttttgttgagtactgctaatgcggcgtatcacaaagtcagagatagaggggtggcaggagttggacaggcttattgggggatggttttggctcattgtggtgtcgcagcaacagtgattggcattgctgtttcttcagcttatggcgtacaagatgatgtacgtatgtctcctggcaagcaagtgagtctgctggattatcagattggattcattaatcagactccgttgaatggcccaaattacaaagggacaagggctgagttttcaatacaatatcagaataaaactaggcaaatttttcctgaaaaaagagtgtataccattggacaaatgccaatgactgagtctgcgattgatgtgactcctttccgagatatttacattgctttgggggagccactgtctgaggatgcctggtcggtccgaatttattataaaccgttggtccgctggatatgggctggcggatttatgattttagccggaggcgttttggcattaacagatagaaggtattacagaaaaaggcaagtaacggtaatggcagggcaggagatcaagatatga

SEQ ID NO: 68125 - protein, 650 aa, Legionella pneumophila
MIAELGLFFLILALVASLMLALIPLAGLQFNRKDWIDSSRNYVVLQFLFVACAYLCLTACFLMDDFSVIYVLNNSSLLLPWFYKFCAVWGGHEGSMLLWVAILSFWMILVCFFSSSLDTEMRARVLVILGWLSIGFILFLLMTSNPFLRQFQVLNTQGRDLNPLLQDPGFLFHPPMLYMGYVGFCVAFAFAIAALWAGKVETSWSKWTRPWTLAAWCCLTAGITLGSWWAYRELGWGGWWFWDPVENASFMPWLVGTALLHSLAVTEQRQQFKAWTMLLAIAAFSLSLIGTFLVRSGVLTSVHAFAVDPQRGLYILGFLLFVIGGSLTLFLFRAQTLQVNKHPGLLSRESALLLNNVFLVVIMLTVLMGTVYPLLVEGLGLGKLSVGAPYFNAVFVPLIIPLLLLMGLGVRLKWQNDCWRDVFRKLNRIFLLSLILPVILLFCTSTEIHLTALLGLILAFWVLLSTANAAYHKVRDRGVAGVGQAYWGMVLAHCGVAATVIGIAVSSAYGVQDDVRMSPGKQVSLLDYQIGFINQTPLNGPNYKGTRAEFSIQYQNKTRQIFPEKRVYTIGQMPMTESAIDVTPFRDIYIALGEPLSEDAWSVRIYYKPLVRWIWAGGFMILAGGVLALTDRRYYRKRQVTVMAGQEIKI

SEQ ID NO: 68126 - DNA, 1965 bp, Rhodobacter sphaeroides
  CDS (1)..(1965): transl_table=11
atgattgtcgaattcggccatttcgcgctggtgctgtcgctggctgtggcctttgtgcaagtccgtggtgccgttcgtcggcggcgaatcggcgttgttctggctggatggcggtgccgaacccgcggcggtcaccccagttctgctgatcggttctctttcgccgcgctgacctgggccttcgcgacctcggatttctcggtgcgcctcgtggtgctgaactcgcacacgctgaagcccatgctctacaagatcagcggcgtctgggggaaccacgagggctcgctgctcctgtgggtgctgatcctcgcgctgttcggagcctgcgccgcggtcttcgggcagaacctgccgcccacgctcaaggcgcgcgtgctggcggtgcaggggatgatcggcgcggccttcctggcctttctcctcttcacctcgaacccgttcctgcgcatgggcgaggtgcccttcgacggcgaggatctgaacccgcttctgcaggatccggggctcgccttccacccgcccttcctttacctcggctatgtcggcctctcgatggccttctccttcgcggtggcggccctgatcgagggccgcgtcgatgccgcctggggccgctgggtccggccctggacgctcgccgcctgggtgtttctcaccatcggcatcgcgctcggctcctggtgggcctattacgagctcggctggggcggcttctggttctgggacccggtcgagaacgcctccttcatgccctggctgatcgcggcggcgctgctccactctgccatcgtggtcgagaagcgcgaagcgctgaagagctggacgatcctgctggccatcctcgccttcggcttctcgctcattggcaccttcatcgtgcgctcgggcgtcatcacctccgtccatgccttcgccaacgatcccgagcgcgggatcttcatcctgatgatcctcgcggtcttcatgggcggggcgctcacgctcttcgccgcgcgggcgagcgccatggaggccaagggggtcttcggcatcgtcagccgcgagtcgggcctcgtgctgaacaacgtgctgctgacggtggcctgtttcgtggtcttcatcggcacgatctggccgcttcctgccgaactcctctggggccgcaagctgtcggtgggtgctccgttcttcaacgcggccttcacccccttcatggtggtgatcgccctcgtcctgccttatgggcgccgtcctccctggaagcgggccgagctcggccgcgggatgcggccgctctggggggcgctcgcgctctcggcggccctgggtgcgctggtcttcgcgctgcagacgggccggtcggcgctcgggcccgtcggcctcgcgctcggcgcctggctcgtcttcggcacgctcctcgacctctggggccgcaccgggcgcggcgcgctcggcgggcggctcgcgcgcctccggcgactgccgcgcgcggactggggcaaggccactgcccatgcgggcctcggcgtcacgatcttcgccgtggcggccatcaccgcctggcaggtcgagtcgatccgcgtgatgaagccgggcgagaccttcgccctcggccgctacgacgtcctgctcgagggcgtgcgcgagatcgaagggccgaactaccgctcgaccgtggccgacttccgcgtgacccgcgacgggccgaatggcgaactccatcccgagaagcgcgtctatccggtggccgccatgccaacgacggaagcgccatcgatacggttcacccgcgactcttacctcgtgatcggcgacccgcaggagggcggcggctatgcggtgcgcagctacatcaagcccttcgccaactggatctggggcggcgcgctgctgatggcgctcggcgggctgctgagcctctcggaccgccgctaccgcatcgccgccggggcgcgccggatgccggccgcggtggctgcagaatga

SEQ ID NO: 68127 - protein, 654 aa, Rhodobacter sphaeroides
MIVEFGHFALVLSLAVAFVQVRGAVRRRRIGVVLAGWRCRTRGGHPSSADRFSFAALTWAFATSDFSVRLVVLNSHTLKPMLYKISGVWGNHEGSLLLWVLILALFGACAAVFGQNLPPTLKARVLAVQGMIGAAFLAFLLFTSNPFLRMGEVPFDGEDLNPLLQDPGLAFHPPFLYLGYVGLSMAFSFAVAALIEGRVDAAWGRWVRPWTLAAWVFLTIGIALGSWWAYYELGWGGFWFWDPVENASFMPWLIAAALLHSAIVVEKREALKSWTILLAILAFGFSLIGTFIVRSGVITSVHAFANDPERGIFILMILAVFMGGALTLFAARASAMEAKGVFGIVSRESGLVLNNVLLTVACFVVFIGTIWPLPAELLWGRKLSVGAPFFNAAFTPFMVVIALVLPYGRRPPWKRAELGRGMRPLWGALALSAALGALVFALQTGRSALGPVGLALGAWLVFGTLLDLWGRTGRGALGGRLARLRRLPRADWGKATAHAGLGVTIFAVAAITAWQVESIRVMKPGETFALGRYDVLLEGVREIEGPNYRSTVADFRVTRDGPNGELHPEKRVYPVAAMPTTEAPSIRFTRDSYLVIGDPQEGGGYAVRSYIKPFANWIWGGALLMALGGLLSLSDRRYRIAAGARRMPAAVAAE

SEQ ID NO: 68128 - DNA, 1968 bp, Pantoea citrea
  CDS (1)..(1968): transl_table=11
atgatacctgaaataggcagttttttgttatgcctggcccttggctgggctgtgttactgagtatttacccgctgtggggagccgcgcgacaggacagtcgtttgatgggactggcccggcctttgacttatggtttgtttacctgtattgcggcacgatttctgattctggtgcattcttttattgtcaacgactttactgtggcctatgtcgctgagaactccaataccatgctgccaatctggtaccgcattgcagcaacctggggagctcatgagggatcgttactgctctggttactgatgctcagtggctggacactggcggtacggttgctgagtcgtggtatgccacaggatgccattgcccgggtgctggcggtgatgggcatgattaaccttggcttcctgctgtttattactctgacctccaacccgtttatccggacattacctgatttccccgttgatggcagcgatctcaacccaatgctccaggatatcggactgattttccacccgccattactctatatggggtacgtcggattctcagtggcatttgcgtttgccattgcttcactgatgaccgggcggctcgatacggcatgggcccgctggtcacgtccgtggacgacagcggcgtggattttcctgaccatcgggattgttttagggctcggctgggcttattacgacctgggctggggtggctggtggttctgggatccggttgaaaatgcctcgctgatgccgtggctggccggaaccgcattgattcactcactggcggtgacagagaaacgcgggacctttaaatcctggactgtgttactggctattaccgccttctcactgagtctgttggggaccttcctggtacgttcaggtgtcctggtatcggttcactcgttcgcgtccgatccttcccgtggtatttttattctgatattcctggtgattgtcatcggatgttcgttactgctgtacgctatccgtggtggacaggtgcgtagcagggtacagcctgaaggctggtcgagagagtcgtttctgttaggaaataatgttctgttgattgccgctatgctggtggtattgctggggactttgttacccctggtacacaaggaactgggcctgggcagcatttcgattggtgcgccgttcttcaatactatgtttacctggctgatggcgccgtttgctctgatgttgggtattgggcctctggtacgctggcgtcgtgatgaacctcagaaattgtataagcggttaattattgcggcggttgtcactctgattgcttccgttgtcctgccattactgttgcaggaccgtattgaagcgatgacggtggttggtctgctgatgtcagtctgggtaattgtactgacgctgatggaacttcatgagcgtgcaacccatcgccatacctttttccgtgggctgggacatctgtcccgcagtcactggggaatggttctggggcatcttggcgtggcggtgacggtgattggaatagcgttcagtacccaatacagtgttgaacgcgatgtccgtatgaaagccggtgataacgtcgatatccataattatcattttgttttccgtgatgttcagcgcctggtgggtcctaactataccggcggggtggcaattattgatgtcacccgcaacggaaaacaagaagctgtgctgcatgcagagaaacgtttttataccgccgcccgcaccatgatgacgatggtgcaatcagtggcggttttggccgcgatctttacgcacgcagccctgggtgaagagataggccagggttcctgggccgttcgtctctattacaaaccttttgttcgctggatttggttcggtggtgtgtttatggcggttggcggtattttgtgtctgctcgacccgcggtatcgctcccgcaagaaagcacaggcacaggaggaatcactgtcatga

SEQ ID NO: 68129 - protein, 655 aa, Pantoea citrea
MIPEIGSFLLCLALGWAVLLSIYPLWGAARQDSRLMGLARPLTYGLFTCIAARFLILVHSFIVNDFTVAYVAENSNTMLPIWYRIAATWGAHEGSLLLWLLMLSGWTLAVRLLSRGMPQDAIARVLAVMGMINLGFLLFITLTSNPFIRTLPDFPVDGSDLNPMLQDIGLIFHPPLLYMGYVGFSVAFAFAIASLMTGRLDTAWARWSRPWTTAAWIFLTIGIVLGLGWAYYDLGWGGWWFWDPVENASLMPWLAGTALIHSLAVTEKRGTFKSWTVLLAITAFSLSLLGTFLVRSGVLVSVHSFASDPSRGIFILIFLVIVIGCSLLLYAIRGGQVRSRVQPEGWSRESFLLGNNVLLIAAMLVVLLGTLLPLVHKELGLGSISIGAPFFNTMFTWLMAPFALMLGIGPLVRWRRDEPQKLYKRLIIAAVVTLIASVVLPLLLQDRIEAMTVVGLLMSVWVIVLTLMELHERATHRHTFFRGLGHLSRSHWGMVLGHLGVAVTVIGIAFSTQYSVERDVRMKAGDNVDIHNYHFVFRDVQRLVGPNYTGGVAIIDVTRNGKQEAVLHAEKRFYTAARTMMTMVQSVAVLAAIFTHAALGEEIGQGSWAVRLYYKPFVRWIWFGGVFMAVGGILCLLDPRYRSRKKAQAQEESLS

SEQ ID NO: 68130 - DNA, 1983 bp, Bradyrhizobium japonicum
  CDS (1)..(1983)
atgatcgcggaatccgggcattacgcgctggtgctggcgctcgggctggcactgatccaatccatcgtgccgttgatcggcgcgcggctgcgcgacgatgcgctgatgagcgtggcgcgctccaccgcgctggcgcagctgctgttcgtcggcgcctcgttcgtggcgctggtgatgctgcatgtgaattcggatttctccgtcgccaacgtctacgagaattcgcattcgatgaagccgctgctctacaagatcaccggcgtctggggaaaccatgaaggctcgatgctgctgtgggtgtcgatcctggcgctgttcggcggattggtcgcggcgttcggcaacaatcttccgctgtcgctgcgcgcgcatgtgctcgcggtgcaggcctggatcgccagtgccttctatctcttcatcctggtgacctcgaacccgttcctgcgtatcgccaacccgccgatcgagggacgcgatctcaatcccgtgctgcaggacatcggtctcgccgtgcatccgccgatgctctatctcggctatgtcggattctcgatctcgttctcctttgccatcgcggcgctgatggaggggcggatcgacgccgcctgggcgcgctgggtgcggccgtggacgctggtcgcgtggatcttcctgacgctcggcatcgcgatgggctcctactgggcctattacgagctcggctggggcggctggtggttctgggatccggtcgagaacgcctcgctgatgccgtggcttgccgggacggcgctgctccattcggcgctggtgatggagaagcgcaacgcgctgaaggtctggaccatcctgctgtcgatcctgaccttctcgctatcgctgctcggcaccttcctggtgcgctcgggcgtcatcacctccgtgcatgcctttgccaccgatccgacccgcggcgtgttcattctgctgatcctctgcctgttcatcggcggcagcctgtcgctgttcgcaggccgcgcgacatcgttgaagcagggcggcctgttcgcgccgatctcgcgtgagggcgcgctggtgctgaacaatctgctgctgaccgtcgcctgcgcggtcgtgctgttcggcacgctctatccgctggcgatggagatgctcgccgacttcaagatgtcggttggcgcgccgttctacaacctcaccttcgcaccgctgtttgccctgttgctgctcgccgtgccgttcgggccgatgctggcgtggaagcgcggcgatctgctcggcgtcacccagcggctgctcgcggccggcgttgccgggctcgttgtagtcgcgatcgtctgggcctggacgcgtggcggcagcgcgctcgcaccgctcgcgatcggacttggcgtcttcgtcatcgccggcgccgtcaccgatctggtcgagcggacgggcctggttcgtctgccgctcgcaacagcgctgcagcgggcgcgcggcctgccacgctcggcctggggcgcggcattggcgcatgccggcctcggcgtcgcgctgatcgggatcgtctgcgagaccacctggaacagcgaatatatcgcgacgatgaagcggagcgacgtcgcccatgtcgccggctacgacgtgaagctcgacgggttgtttcagcgtcagggcccgaactaccgcgagatgatcgccgagttcaacgtcagccgcgacggtgagacactgagcgtcatgacgccgtccaagcgcagcttcaccacccgcggctcctccaccacggaggccgcgctgctgacccgcggggcgagccagctctacatctcgctgggcgatgccaatgccgagggcgcgattgccgtgcgcatctatcacaagccgctggtgctgctgatctggtggggtccggtgctgatggccttcggcggcgtgctgtcgctgtccgatcgccgcctgcgggtcggcgcgccaaaaccggcgcgggccaagcagcgcctgcagccggcggagtga

SEQ ID NO: 68131 - protein, 660 aa, Bradyrhizobium japonicum
MIAESGHYALVLALGLALIQSIVPLIGARLRDDALMSVARSTALAQLLFVGASFVALVMLHVNSDFSVANVYENSHSMKPLLYKITGVWGNHEGSMLLWVSILALFGGLVAAFGNNLPLSLRAHVLAVQAWIASAFYLFILVTSNPFLRIANPPIEGRDLNPVLQDIGLAVHPPMLYLGYVGFSISFSFAIAALMEGRIDAAWARWVRPWTLVAWIFLTLGIAMGSYWAYYELGWGGWWFWDPVENASLMPWLAGTALLHSALVMEKRNALKVWTILLSILTFSLSLLGTFLVRSGVITSVHAFATDPTRGVFILLILCLFIGGSLSLFAGRATSLKQGGLFAPISREGALVLNNLLLTVACAVVLFGTLYPLAMEMLADFKMSVGAPFYNLTFAPLFALLLLAVPFGPMLAWKRGDLLGVTQRLLAAGVAGLVVVAIVWAWTRGGSALAPLAIGLGVFVIAGAVTDLVERTGLVRLPLATALQRARGLPRSAWGAALAHAGLGVALIGIVCETTWNSEYIATMKRSDVAHVAGYDVKLDGLFQRQGPNYREMIAEFNVSRDGETLSVMTPSKRSFTTRGSSTTEAALLTRGASQLYISLGDANAEGAIAVRIYHKPLVLLIWWGPVLMAFGGVLSLSDRRLRVGAPKPARAKQRLQPAE

SEQ ID NO: 68132 - DNA, 1944 bp, Escherichia coli
  CDS (1)..(1944): transl_table=11
atgatgccagaaattggtaacggactgctgtgcctggcgctgggaattgcgctgctgctgtccgtgtatccgctatggggcgtggcgcgcggagatgcgcgcatgatggcgtcttcccgcttgtttgcctggctgctgtttatgtctgtggctggcgcatttctggtgctggtcaatgctttcgtggtcaacgacttcaccgtcacctatgttgccagcaactccaatacccagcttccggtgtggtatcgcgtggcggctacctggggcgcgcatgaaggctcgctactgctgtgggtgctgctgatgagcggctggacctttgcggtggcgatttttagtcagcgtattccgctggatattgtggcccgtgtactggcgataatggggatggtcagtgtcggctttttgctgttcattctctttacctctaacccgttctctcgcacgttgccgaacttcccgattgaaggtcgcgatcttaacccgctattgcaggatccggggctgatcttccatccgcctctgctttatatggggtacgtgggtttctcggtggcgtttgcttttgccattgcttctttgctgagcgggcgtctggacagcacttatgcgcgttttactcgtccgtggacgctggcagcgtggatcttcctgacgctcggcatcgtgctcggttccgcatgggcctattacgaactcggctggggtggctggtggttctgggatccggtagaaaacgcctcgtttatgccgtggctggtggggactgcgctgatgcactcactggcggtcactgaacaacgcgccagcttcaaagcgtggacattactgctggcaatcagtgccttctcgttgtgtctgttggggactttcctcgtgcgttccggcgtgctggtatcggtacacgcgtttgcgtctgatccggcgcgcggtatgtttatcctcgcctttatggtgctggtgattggcggttcgctgctgctgtttgccgcgcgtggacacaaagttcgctcacgcgtaaacaatgcgctgtggtcgcgggaatctttgctgttagcgaacaatgttttgctggtcgctgcgatgctggtggtgttgctggggacgctgctgccgttggtgcataagcaactgggactgggcagtatttcgattggcgaaccgttcttcaacaccatgtttacctggctgatggtgccgtttgcgctactgcttggtgtcggtcctctggtgcgctgggggcgggatcgcccgcgtaagatccgcaatttattgattatcgccttcatctctacgctggtgctgtcgctgctgttgccgtggctgttcgaaagcaaagttgtggcgatgacggtgctcggcctggcaatggcctgctggattgcggtgctggcaattgcggaagctgcgctacgtatttcacgcggcacgaaaaccaccttcagttattgggggatggtggcggctcaccttgggctggcagtgacaattgttggcattgcctttagccagaactatagcgttgagcgtgatgtgcgcatgaagtccggcgatagcgtcgatattcatgaatatcgcttcaccttccgtgatgtcaaagaggtgactggcccgaactggcgtggcggtgtggcgactatcggcgtaacgcgcgatggcaagccggaaacggtgctgtatgcggaaaaacgttattacaacactgccgggtcgatgatgaccgaagcggcaattgacggcggcatcacgcgtgacctgtacgcggccctcggtgaagagctggaaaacggcgcgtgggccgtgcgtctttactacaaaccatttgttcgctggatttgggcgggcgggctgatgatggcgttgggcggactgctgtgtctgtttgatcctcgctatcgtaagcgcgtgagtccgcaaaaaactgcgccggaggccgtatga

SEQ ID NO: 68133 - protein, 647 aa, Escherichia coli
MMPEIGNGLLCLALGIALLLSVYPLWGVARGDARMMASSRLFAWLLFMSVAGAFLVLVNAFVVNDFTVTYVASNSNTQLPVWYRVAATWGAHEGSLLLWVLLMSGWTFAVAIFSQRIPLDIVARVLAIMGMVSVGFLLFILFTSNPFSRTLPNFPIEGRDLNPLLQDPGLIFHPPLLYMGYVGFSVAFAFAIASLLSGRLDSTYARFTRPWTLAAWIFLTLGIVLGSAWAYYELGWGGWWFWDPVENASFMPWLVGTALMHSLAVTEQRASFKAWTLLLAISAFSLCLLGTFLVRSGVLVSVHAFASDPARGMFILAFMVLVIGGSLLLFAARGHKVRSRVNNALWSRESLLLANNVLLVAAMLVVLLGTLLPLVHKQLGLGSISIGEPFFNTMFTWLMVPFALLLGVGPLVRWGRDRPRKIRNLLIIAFISTLVLSLLLPWLFESKVVAMTVLGLAMACWIAVLAIAEAALRISRGTKTTFSYWGMVAAHLGLAVTIVGIAFSQNYSVERDVRMKSGDSVDIHEYRFTFRDVKEVTGPNWRGGVATIGVTRDGKPETVLYAEKRYYNTAGSMMTEAAIDGGITRDLYAALGEELENGAWAVRLYYKPFVRWIWAGGLMMALGGLLCLFDPRYRKRVSPQKTAPEAV

SEQ ID NO: 68134 - DNA, 1983 bp, Pseudomonas fluorescens
  CDS (1)..(1983): transl_table=11
atgacgtccgcactgtttattccggagctgggccagttgcggatgatcctcgccctgtgctttgccgtggtccaggctgtggtgccattgctcggcgcctggccgggtgaccgcctgtggatgagcctggcgcagccggcgcgctggggccagtttgccttcctgttgttcgccttcggttgcctgacctacgcctttatgaccgacgacttttccgtcgcctatgtcgcaaacaactccaacagcgccttgccctggtattacttgttcagcgccgtgtggggcgcccacgaaggttcgttgctgctgtgggcgttgatcctcggtggctggaccttcgccgtatcggtgttttcgcgccaactgccgcaagtcatgctggcacgggtgctggcggtgatgggcatgatcagcattggctttttgctgttcctgatcatgacctccaaccctttcagccgcatgctgccgcagatcccggcggacgggcatgacctcaacccgctgttgcaggacatcggcctgatcgtgcatccgcccatgctctatatgggctacgtcggcttctccgtagcctttgccttcgccatcgccgccttgcttggcgggcgtctggatgcggcgtgggcgcgttggtcgcggccatggaccatcgttgcctgggccttcctcggtatcggtatcaccctgggctcatggtgggcctactacgaacttggctggggcggctggtggttctgggatccggtggaaaacgcgtccttcatgccctggctggtgggcactgcgctgattcattccctggcggtcaccgaaaaacgcggcgtgttcaagagctggactgtgttgctcgccatcgccgcgttttccctcacgctgctcgcagccttcctggtgcgttcgggcgtgctgacctcggtgcatgcgttcgcctctgaccccgagcgtggcgtgttcatcctgatcttcctgctgtttgtggtgggcggctcgctgaccctgttcgtgcgcgcaccggtggtcaagagccaggtcggcttcaacctgtggtcgcgggaaaccctgctgctgggcaataacctggtgctggtggtagccgcgtcgatgatcctgctcggcaccctctacccgctggtgctggatgccctcagcggcgccaagctgtccgtcggcccgccgtatttcaatgcgttgttcatcccgctgatgggcctgttgatggtggtgatggcggtcggcgtgctggtgcgctggaaagacactccggtgaaatggctggtgggcatgctcgctccggtgctgctaggcagcgttgcgctggccgtggtcgccggtattgcctacggcgacttcaactgggcagtgctcgccaccttcctgctcgccgcctgggtattactggccggtgtgcgtgacatcttcgacaagacccgtcacaaaggtttgctcaaaggtctgccgaccctgacccgcagctactggggcatgcagatcgcccacatcggcatcgcggtgtgcgccctcggcgtggtgctgtccagccagaacagcgccgagcgcgacctgcgcctggcgccgggcgaatccatggacttggccggttaccacttcatcttcgaaggcgccaagcacttcgaagggccgaactttacctcagacaaaggcacggtgcgcgtggtgcgcaacggcaaggaaatcgccgtgctgcacccggaaaaacgcctttacaccgtgcagagttcgatgatgaccgaagcgggcattgacgccggcttcacccgtgacctctatgtggccctcggagaacccctgggcgacggcgcctgggccgtgcgggtgcatgtcaaacccttcgtgcgctggatctggttcggcggtttgctcaccggttttggcggtttgctcgcggcgctggaccggcgttatcgggtcaaggtcaaaagccgggtgcgtgaagcactgggtatgggagctgcggtatga

SEQ ID NO: 68135 - protein, 660 aa, Pseudomonas fluorescens
MTSALFIPELGQLRMILALCFAVVQAVVPLLGAWPGDRLWMSLAQPARWGQFAFLLFAFGCLTYAFMTDDFSVAYVANNSNSALPWYYLFSAVWGAHEGSLLLWALILGGWTFAVSVFSRQLPQVMLARVLAVMGMISIGFLLFLIMTSNPFSRMLPQIPADGHDLNPLLQDIGLIVHPPMLYMGYVGFSVAFAFAIAALLGGRLDAAWARWSRPWTIVAWAFLGIGITLGSWWAYYELGWGGWWFWDPVENASFMPWLVGTALIHSLAVTEKRGVFKSWTVLLAIAAFSLTLLAAFLVRSGVLTSVHAFASDPERGVFILIFLLFVVGGSLTLFVRAPVVKSQVGFNLWSRETLLLGNNLVLVVAASMILLGTLYPLVLDALSGAKLSVGPPYFNALFIPLMGLLMVVMAVGVLVRWKDTPVKWLVGMLAPVLLGSVALAVVAGIAYGDFNWAVLATFLLAAWVLLAGVRDIFDKTRHKGLLKGLPTLTRSYWGMQIAHIGIAVCALGVVLSSQNSAERDLRLAPGESMDLAGYHFIFEGAKHFEGPNFTSDKGTVRVVRNGKEIAVLHPEKRLYTVQSSMMTEAGIDAGFTRDLYVALGEPLGDGAWAVRVHVKPFVRWIWFGGLLTGFGGLLAALDRRYRVKVKSRVREALGMGAAV

SEQ ID NO: 68136 - DNA, 2031 bp, Rhizobium meliloti
  CDS (1)..(2031): transl_table=11
atgatcatcgaactcgggcactatgcactggttttggcgctcgcgaccgcgatcatccagggcgtcctgcccgtcctgggggtgcggcgcggcgacccttccttgatgggactggcagcaaacgcggcgctcgtctgcttcctgctcgtcgctttctccttcgccgtgctgacattcgcctatgtgacatcggatttctcggtcaagaacgtctgggagaactcgcattccctcaaaccgctgatctacaagatcaccggggtctggggaaaccatgaaggctcgatgcttctctggctgctcattcttgtcttcttttccgcgatggtggcgctcttcggccgcaacctgccggagacgttgaaggcgaacgtccttgcggtgcaggcctggatcgcgaccgccttcgcgttcttcgtcctgctgacctccaatcccttcgcgcggctcgtgccggcaccgggcgagggcagggacctcaaccccgtgctgcaggatatcgggctcgcgatccacccgcccttgctctatctcggctatgtcggcttttccgtatgcttctccttcgcggtcgccgcgctcatcgaggggcggatcgatgcggcctgggcgcgttgggtgcggccgtggacacttgccgcctggacttttcttaccgccggcatcgccatgggctcctattgggcctattacgagctgggctggggcggctggtggttctgggacccggtcgaaaacgcctccttcatgccttggctcgccggaacggcacttctgcactcggccctggtcatggaaaagcgcgaagcgctaaagatatggaccgtgctgctggcgatcatgaccttctcgctgtcgctgctcggcacgttcctggtgcgctccggcgtgctgacatccgtccatgccttcgccaccgacccgacccgcggcgtcttcattctcgccatcctggtcgtcttcatcggcggtgcgttctcgctctttgccttccgtgcctcccatctcaaggccgggggaatattcgcaccggtttcgcgtgagggtgcgctcgtcgtgaacaacctgatcctgacgacggccacggcgacggtgctgaccggcacgctgtatccgctggtactcgaagcgctgaccggcgacaaaatttcggtcggcgcgccgttcttcaacatgacgttcggcctgctgatgctgccgctcatcgccgtcgttcccttcggcccgctgcttgcctggaagcgcggcgaccttgccggtgcggcgcagcgtctgtttgcggctgccgcgctcggcctgctcgccgcggcgatctgttattacgcggtaaacggtggcccggtcctggctcctttcggcctcggcctcggcgtctacctgattctgggagcgctcaccgatctggttctgcgctccgggctcggcaaggtggcggcgggcgtcgcctggagacggctttcgggcctgccgcgttcggctttcggcacggcgctcgcccatatcgggctcggaatcaccctgatcgggatcgtcacggtcacggctttcgaaacggaaacggtcgtcgagatgaaaccgggggcggtggtcgatgtcgggcgttacagcctgcgtttcgacggcatgcgtgaagggcgcgggccgaactataccgaggatgccggccatttcaccgtcagtcgaggcggcgtcgaggttaccgagatctggtcgtcgaaacggctctattcggcgcggcgcatgccgacgaccgaggccggaatccggaccttcggcctgagccagctctatgtatccttgggcgacgacatggcggacggcggcatcgtcgtccgcatctggtggaaaccgctgatcctatgcatctggggcggcgcgctcgtgatgatggccggcggcgtcgtttcgctcagcgaccggcgccttcgcgtcggcgcgccggcgcgtgccagaaaggccctcgccctggatcacgatgatttcaggtcggatcgaccaaaaatcatcaacgtgatcgattctaaaggttag

SEQ ID NO: 68137 - protein, 676 aa, Rhizobium meliloti
MIIELGHYALVLALATAIIQGVLPVLGVRRGDPSLMGLAANAALVCFLLVAFSFAVLTFAYVTSDFSVKNVWENSHSLKPLIYKITGVWGNHEGSMLLWLLILVFFSAMVALFGRNLPETLKANVLAVQAWIATAFAFFVLLTSNPFARLVPAPGEGRDLNPVLQDIGLAIHPPLLYLGYVGFSVCFSFAVAALIEGRIDAAWARWVRPWTLAAWTFLTAGIAMGSYWAYYELGWGGWWFWDPVENASFMPWLAGTALLHSALVMEKREALKIWTVLLAIMTFSLSLLGTFLVRSGVLTSVHAFATDPTRGVFILAILVVFIGGAFSLFAFRASHLKAGGIFAPVSREGALVVNNLILTTATATVLTGTLYPLVLEALTGDKISVGAPFFNMTFGLLMLPLIAVVPFGPLLAWKRGDLAGAAQRLFAAAALGLLAAAICYYAVNGGPVLAPFGLGLGVYLILGALTDLVLRSGLGKVAAGVAWRRLSGLPRSAFGTALAHIGLGITLIGIVTVTAFETETVVEMKPGAVVDVGRYSLRFDGMREGRGPNYTEDAGHFTVSRGGVEVTEIWSSKRLYSARRMPTTEAGIRTFGLSQLYVSLGDDMADGGIVVRIWWKPLILCIWGGALVMMAGGVVSLSDRRLRVGAPARARKALALDHDDFRSDRPKIINVIDSKG

SEQ ID NO: 68138 - DNA, 1962 bp, Rhodobacter capsulatus
  CDS (1)..(1962): transl_table=11
atgatcgtcgagaccggccatttcgccctgatcctggccctgtgcgtggcgctggtgcaggcggtcattcccctggtgggcgcgcaaaagggctggtcgggctggatggccgttgccacccccgcggcgctggcgcagttcgggctgatcgccatcgcctttgccgcgctgacctatgcctttgtgacgtctgacttttcgctgaagctcgtctacgaaaactcgcataccgacaagccgatgctctacaaggtcaccggggtctggggcaaccatgagggctcgatgctgctttgggtgctgatcctcgccatgttcggcgcggcggccgcggcctttggcggtgccttgccggagcggctgcgggcgcgggtgctggcggtgcagggcaccatcggggtcgcgtttctggtctttgtgcttttcacctcgaacccgttcctgcggctggaagaagcgccgttcaacggccgcgacatgaacccgctgctgcaggacccgggtctcgccttccatccgccgttcctgtaccttggctatgtcgggctttcgatggccttcagcttcgccgtcgccgcgctgatcgaggggcgggtcgatgccgcctgggcgcgctgggtccggccctggaccttggccgcctggatcttcctgaccatcggcatcgcgctgggatcgtggtgggcctattacgagctcggctggggcggcttctggttctgggacccggtggaaaacgcctcgctgatgccctggctgctggcggcggcgctgttgcattccgccatcgtcgtcgaaaagcgcgaggcgctgaaaagctggacgatcctgctcgccatcatggccttcggcttttcgctgatcggcacgttcctggtgcggtccggggtgatttcctcggtgcacagtttcgccaatgaccccgagcgcggggtgttcatcctgttcatccttgccttcttcaccggcggggcgctgacgctttatgccgcgcgggcctcggagatgcaggcgaaggggctgttttccatggtcagccgcgaatcggcgctggtgatgaacaacgtgcttttggcggtggcggcgctggtggtgttcaccggcacggtctggccgctgatcgcggagctgttctgggaccgcaagctctcggtgggggcgccgttcttcgaaaaggcctttacccccttcatggtcgggctggcgctgctgttgccgctgggatcgatgatgccgtggaaacgcgcgagcctcggcaagctggtgcggccgctgttgcccgcgcttgtgctgacgctggcggtgctggcgctggtctgggtgatggcgacggggcggccgatgctggcgcttggcgcggcggggctgggcgcctggatcctttttggcgccctggccgagatctggcaacgcgccgggcggacgccgggacgcatcctgcggctgccgcgggcggattggggcaaggccttcgcgcatggcgggctgggcatcgtctttgcgggcgtcggcctcttgatggccgggcaggtcgaggatatccgcgtggcgaaggcgggcgacagtttcgaggtggcaggttacacgatcacgctggtgtcggtcgaggatgtgccggggccgaacttcaccgccaagaccgcgacgatggaggtgcggcagggcggcaagctggtggcgaccctgcatcccgaaaagcgcatctatccggtgcaggcgatgccgacgaccgaggccgatatcgacaacggcttctggcgcgatgtctatctggtgatcggcgacccgcaggagggcggcggctgggcggtgcggacctatgtcaagcctttcgcgaactggatctgggcgggctgtctgctgatggcctttggcggcgggctgagcctgaccgaccggcgttatcgcagcgccgccggggcgcggcgggcgacggtggccgatgctgttgcggcggagtga

SEQ ID NO: 68139 - protein, 653 aa, Rhodobacter capsulatus
MIVETGHFALILALCVALVQAVIPLVGAQKGWSGWMAVATPAALAQFGLIAIAFAALTYAFVTSDFSLKLVYENSHTDKPMLYKVTGVWGNHEGSMLLWVLILAMFGAAAAAFGGALPERLRARVLAVQGTIGVAFLVFVLFTSNPFLRLEEAPFNGRDMNPLLQDPGLAFHPPFLYLGYVGLSMAFSFAVAALIEGRVDAAWARWVRPWTLAAWIFLTIGIALGSWWAYYELGWGGFWFWDPVENASLMPWLLAAALLHSAIVVEKREALKSWTILLAIMAFGFSLIGTFLVRSGVISSVHSFANDPERGVFILFILAFFTGGALTLYAARASEMQAKGLFSMVSRESALVMNNVLLAVAALVVFTGTVWPLIAELFWDRKLSVGAPFFEKAFTPFMVGLALLLPLGSMMPWKRASLGKLVRPLLPALVLTLAVLALVWVMATGRPMLALGAAGLGAWILFGALAEIWQRAGRTPGRILRLPRADWGKAFAHGGLGIVFAGVGLLMAGQVEDIRVAKAGDSFEVAGYTITLVSVEDVPGPNFTAKTATMEVRQGGKLVATLHPEKRIYPVQAMPTTEADIDNGFWRDVYLVIGDPQEGGGWAVRTYVKPFANWIWAGCLLMAFGGGLSLTDRRYRSAAGARRATVADAVAAE

SEQ ID NO: 68140 - DNA, 1908 bp, Haemophilus influenzae
  CDS (1)..(1908): transl_table=11
atgcttccagaacttggctttttccttcttttactcgcaacagctagcgcgtttttccttgcgttagtgcctcaatttgggttattcaaaaaaaatccgactttaattaatgctgcttggccgcttagttatatttttacccttgcgacgacgttatcaattggtttgcttgcttattcttttgcggtggatgatttcacccttgaatatgtagcggcacattctaattcccaattacctacattttttaaagtggctgccacttggggaggacatgaaggttcaatgttgttttggttattttcattgagtttatggcttgctgcttttgctttttttaatcgaaaaaatgaccgcactttttctgctcaatctttatctttattgggattgatttgctttggttttgcggtgtttattttattttattccaatccatttggacgcattttcccagcacccgcagaagggcgcgatctcaatccaatgttgcaagatgtgggattaattttccatccacctttactatatgttggctatgtgggctttgcggtaaattttgcaatgagtttgagtgcgttgatttataaccaatctgcacgacaaattgcccgctcaatgcgtggatgggtgttggtttcttggttatttttaaccattggcattgtgcttggtgcttggtgggcttattacgaacttggctggggcggttggtggttctgggatcccgtagaaaatgcgtctttaatgccttggttgcttggtttggcattattacacagtttaatggcgacggaaaaacaaggcgtatttagttattggacaacgcttttttctctgcttgcttttgcctttagcgtattaggcacgtttattgttcgttctggcgcactcacttctgtgcatgcttttgcattggataacacgcgcggttatgtgttgttattaattttctttgttttgacagcgttagcctttggtttattcgctttacgagcgggaagttcatcagaaagtgcggtgaaatttcagttcatttctaaatcgggtggcattttattactgaatattttgctgaccattgcgacggtttctacctttttaggtaccttttacccgatgttattccaagcgatgaattggggctcaatttcggtgggaagtccttattttaatagtattttcttccccattattacggcgattttaatcttaatggtaattgtgcttagcatacgtaaggggcaatttgatcgcacattattgatacgttgtgggtggttgcttattccgtctttaattcttgcaggcctaatgatttggcaacagctacgaaataattctgcattacatttccatgctttcgcctttgtgttattaactcttgcgatttggcttttattcgtcacgttatggcaaaattggcgacaaattcgcttgtctcaatttgggatgattttagcacactgtggcgtggcgattgtgactattggtgcggtgatgagtgggtattttggcagtgaaattggtgtgcgtttagcaccgcaacaaagtcaaacgttagggcaatatgaatttcattatcgccaattttctaatgaaattgggccaaactttacggcagaagtcgccttttttgacgtaactaaaaatggtaaaccttatgcagaaattatcccagaacgccgttattacgatgtacgaacaatgacaatgagtgaagtggggcttgatggtggtttttggggcgatttatatattgtgatgggcgattctcttggcaaaggggaatttactttccgcttacattataaaccactgattcgttggctttgggcgggcggtattttaatggcctttggcgcactttttagcgttttcggattacgcagaaaacaggaaaaataa

SEQ ID NO: 68141 - protein, 635 aa, Haemophilus influenzae
MLPELGFFLLLLATASAFFLALVPQFGLFKKNPTLINAAWPLSYIFTLATTLSIGLLAYSFAVDDFTLEYVAAHSNSQLPTFFKVAATWGGHEGSMLFWLFSLSLWLAAFAFFNRKNDRTFSAQSLSLLGLICFGFAVFILFYSNPFGRIFPAPAEGRDLNPMLQDVGLIFHPPLLYVGYVGFAVNFAMSLSALIYNQSARQIARSMRGWVLVSWLFLTIGIVLGAWWAYYELGWGGWWFWDPVENASLMPWLLGLALLHSLMATEKQGVFSYWTTLFSLLAFAFSVLGTFIVRSGALTSVHAFALDNTRGYVLLLIFFVLTALAFGLFALRAGSSSESAVKFQFISKSGGILLLNILLTIATVSTFLGTFYPMLFQAMNWGSISVGSPYFNSIFFPIITAILILMVIVLSIRKGQFDRTLLIRCGWLLIPSLILAGLMIWQQLRNNSALHFHAFAFVLLTLAIWLLFVTLWQNWRQIRLSQFGMILAHCGVAIVTIGAVMSGYFGSEIGVRLAPQQSQTLGQYEFHYRQFSNEIGPNFTAEVAFFDVTKNGKPYAEIIPERRYYDVRTMTMSEVGLDGGFWGDLYIVMGDSLGKGEFTFRLHYKPLIRWLWAGGILMAFGALFSVFGLRRKQEK

SEQ ID NO: 68142 - DNA, 22 bp, Artificial sequence
  Primer sequence
atgttgaccccgttgacggcct

SEQ ID NO: 68143 - DNA, 23 bp, Artificial sequence
  Primer sequence
ttattcatcgcgcttcttccccc

SEQ ID NO: 68144 - protein, 954 aa, Artificial sequence
  Consensus
  Variant (2)..(37): Xaa in position 2 to 37 is any amino acid
  Variant (38)..(67): Xaa in position 38 to 67 is any or no amino acid
  Variant (69)..(75): Xaa in position 69 to 75 is any amino acid
  Variant (79)..(81): Xaa in position 79 to 81 is any amino acid
  Variant (83)..(85): Xaa in position 83 to 85 is any amino acid
  Variant (87)..(90): Xaa in position 87 to 90 is any amino acid
  Variant (92)..(99): Xaa in position 92 to 99 is any amino acid
  Variant (102)..(102): Xaa in position 102 is any amino acid
  Variant (107)..(107): Xaa in position 107 is any amino acid
  Variant (111)..(129): Xaa in position 111 to 129 is any amino acid
  Variant (130)..(149): Xaa in position 130 to 149 is any or no amino acid
  Variant (151)..(151): Xaa in position 151 is any amino acid
  Variant (152)..(159): Xaa in position 152 to 159 is any or no amino acid
  Variant (161)..(162): Xaa in position 161 to 162 is any amino acid
  Variant (164)..(167): Xaa in position 164 to 167 is any amino acid
  Variant (169)..(169): Xaa in position 169 is any amino acid
  Variant (172)..(178): Xaa in position 172 to 178 is any amino acid
  Variant (179)..(189): Xaa in position 179 to 189 is any or no amino acid
  Variant (191)..(192): Xaa in position 191 to 192 is any amino acid
  Variant (196)..(196): Xaa in position 196 is any amino acid
  Variant (199)..(199): Xaa in position 199 is any amino acid
  Variant (201)..(201): Xaa in position 201 is any amino acid
  Variant (203)..(205): Xaa in position 203 to 205 is any amino acid
  Variant (209)..(209): Xaa in position 209 is any amino acid
  Variant (212)..(212): Xaa in position 212 is any amino acid
  Variant (215)..(215): Xaa in position 215 is any amino acid
  Variant (217)..(220): Xaa in position 217 to 220 is any amino acid
  Variant (222)..(225): Xaa in position 222 to 225 is any amino acid
  Variant (227)..(227): Xaa in position 227 is any amino acid
  Variant (229)..(231): Xaa in position 229 to 231 is any amino acid
  Variant (232)..(275): Xaa in position 232 to 275 is any or no amino acid
  Variant (277)..(277): Xaa in position 277 is any amino acid
  Variant (279)..(281): Xaa in position 279 to 281 is any amino acid
  Variant (282)..(282): Xaa in position 282 is any or no amino acid
  Variant (284)..(285): Xaa in position 284 to 285 is any amino acid
  Variant (288)..(288): Xaa in position 288 is any amino acid
  Variant (291)..(292): Xaa in position 291 to 292 is any amino acid
  Variant (295)..(295): Xaa in position 295 is any amino acid
  Variant (296)..(297): Xaa in position 296 to 297 is any or no amino acid
  Variant (301)..(301): Xaa in position 301 is any amino acid
  Variant (308)..(308): Xaa in position 308 is any amino acid
  Variant (319)..(320): Xaa in position 319 to 320 is any amino acid
  Variant (324)..(326): Xaa in position 324 to 326 is any amino acid
  Variant (329)..(329): Xaa in position 329 is any amino acid
  Variant (332)..(333): Xaa in position 332 to 333 is any amino acid
  Variant (334)..(337): Xaa in position 334 to 337 is any or no amino acid
  Variant (339)..(339): Xaa in position 339 is any amino acid
  Variant (340)..(343): Xaa in position 340 to 343 is any or no amino acid
  Variant (346)..(346): Xaa in position 346 is any amino acid
  Variant (347)..(347): Xaa in position 347 is any or no amino acid
  Variant (349)..(351): Xaa in position 349 to 351 is any amino acid
  Variant (352)..(352): Xaa in position 352 is any or no amino acid
  Variant (354)..(356): Xaa in position 354 to 356 is any amino acid
  Variant (358)..(358): Xaa in position 358 is any amino acid
  Variant (362)..(362): Xaa in position 362 is any amino acid
  Variant (367)..(369): Xaa in position 367 to 369 is any amino acid
  Variant (370)..(371): Xaa in position 370 to 371 is any or no amino acid
  Variant (375)..(375): Xaa in position 375 is any amino acid
  Variant (378)..(378): Xaa in position 378 is any amino acid
  Variant (380)..(380): Xaa in position 380 is any amino acid
  Variant (381)..(383): Xaa in position 381 to 383 is any or no amino acid
  Variant (386)..(388): Xaa in position 386 to 388 is any amino acid
  Variant (390)..(401): Xaa in position 390 to 401 is any amino acid
  Variant (403)..(408): Xaa in position 403 to 408 is any amino acid
  Variant (409)..(451): Xaa in position 409 to 451 is any or no amino acid
  Variant (453)..(453): Xaa in position 453 is any amino acid
  Variant (455)..(466): Xaa in position 455 to 466 is any amino acid
  Variant (467)..(473): Xaa in position 467 to 473 is any or no amino acid
  Variant (476)..(477): Xaa in position 476 to 477 is any amino acid
  Variant (479)..(483): Xaa in position 479 to 483 is any amino acid
  Variant (484)..(518): Xaa in position 484 to 518 is any or no amino acid
  Variant (520)..(520): Xaa in position 520 is any amino acid
  Variant (522)..(522): Xaa in position 522 is any amino acid
  Variant (524)..(524): Xaa in position 524 is any amino acid
  Variant (526)..(547): Xaa in position 526 to 547 is any amino acid
  Variant (549)..(554): Xaa in position 549 to 554 is any amino acid
  Variant (555)..(667): Xaa in position 555 to 667 is any or no amino acid
  Variant (669)..(669): Xaa in position 669 is any amino acid
  Variant (671)..(676): Xaa in position 671 to 676 is any amino acid
  Variant (678)..(708): Xaa in position 678 to 708 is any amino acid
  Variant (709)..(746): Xaa in position 709 to 746 is any or no amino acid
  Variant (748)..(766): Xaa in position 748 to 766 is any amino acid
  Variant (767)..(789): Xaa in position 767 to 789 is any or no amino acid
  Variant (791)..(791): Xaa in position 791 is any amino acid
  Variant (793)..(799): Xaa in position 793 to 799 is any amino acid
  Variant (800)..(800): Xaa in position 800 is any or no amino acid
  Variant (802)..(803): Xaa in position 802 to 803 is any amino acid
  Variant (804)..(837): Xaa in position 804 to 837 is any or no amino acid
  Variant (839)..(845): Xaa in position 839 to 845 is any amino acid
  Variant (846)..(846): Xaa in position 846 is any or no amino acid
  Variant (848)..(850): Xaa in position 848 to 850 is any amino acid
  Variant (852)..(865): Xaa in position 852 to 865 is any amino acid
  Variant (866)..(938): Xaa in position 866 to 938 is any or no amino acid
  Variant (940)..(944): Xaa in position 940 to 944 is any amino acid
  Variant (946)..(946): Xaa in position 946 is any amino acid
  Variant (948)..(953): Xaa in position 948 to 953 is any amino acid
GXXXXXXXXXXXXXXXXXXXXXXXXXXXXXXXXXXXXXXXXXXXXXXXXXXXXXXXXXXXXXXXXXXLXXXXXXXDFSXXXVXXXSXXXXPXXXXXXXXWGXHEGSXLLWXXXXXXXXXXXXXXXXXXXXXXXXXXXXXXXXXXXXXXXLXXXXXXXXXFXXFXXXXSXPFXXXXXXXXXXXXXXXXXXGXXLNPXLQXDXGXXXHPPXLYXGYXGXXXXFXXXXAXLXXXXXXXXXXXXXXXXXXXXXXXXXXXXXXXXXXXXXXXXXXXXXXXRXWXXXXWXXLTXGIXXGSXXXWAYXELGWGGXWFWDPVENASXXPWLXXXALXHSXXXXXXRXXXXXWTXXLXXXXFXXXLXGTFXVRSGXXXXXSVHXFAXDXXXXRGXXXLXXXXXXXXXXXXLXXXXXXXXXXXXXXXXXXXXXXXXXXXXXXXXXXXXXXXXXXXXXXXXXSXEXXXXXXXXXXXXXXXXXXXGTXXPXXXXXXXXXXXXXXXXXXXXXXXXXXXXXXXXXXXXXXXXSXGXPXFXXXXXXXXXXXXXXXXXXXXXXWXXXXXXXXXXXXXXXXXXXXXXXXXXXXXXXXXXXXXXXXXXXXXXXXXXXXXXXXXXXXXXXXXXXXXXXXXXXXXXXXXXXXXXXXXXXXXXXXXXXXXXXXXXXXXXXXXXXXXXXHXGXXXXXXGXXXXXXXXXXXXXXXXXXXXXXXXXXXXXXXXXXXXXXXXXXXXXXXXXXXXXXXXXXXXXXXXXXXXXNXXXXXXXXXXXXXXXXXXXXXXXXXXXXXXXXXXXXXXXXXXRXYXXXXXXXXEXXXXXXXXXXXXXXXXXXXXXXXXXXXXXXXXXXXXIXXXXXXXXYXXXGXXXXXXXXXXXXXXXXXXXXXXXXXXXXXXXXXXXXXXXXXXXXXXXXXXXXXXXXXXXXXXXXXXXXXXXXXXXXXXXXXXXXXXXPXXXXXWXGXXXXXXG

SEQ ID NO: 68145 - protein, 11 aa, Artificial sequence
  Consensus
  Variant (2)..(2): Xaa in position 2 is Gly or Ser
  Variant (3)..(3): Xaa in position 3 is Ala, Gly, Asn or Ser
  Variant (8)..(8): Xaa in position 8 is Phe, Ile, Leu, Met or Val
  Variant (10)..(10): Xaa in position 10 is Phe or Leu
WXXHEGSXLXW

SEQ ID NO: 68146 - protein, 39 aa, Artificial sequence
  Consensus
  Variant (2)..(4): Xaa in position 2 to 4 is any amino acid
  Variant (7)..(7): Xaa in position 7 is Ile, Leu, Met or Val
  Variant (10)..(10): Xaa in position 10 is Asp or His
  Variant (11)..(11): Xaa in position 11 is any amino acid
  Variant (12)..(12): Xaa in position 12 is Ala or Gly
  Variant (13)..(13): Xaa in position 13 is Phe, Leu or Met
  Variant (14)..(14): Xaa in position 14 is any amino acid
  Variant (15)..(15): Xaa in position 15 is Phe, Ile, Leu, Met or Val
  Variant (19)..(19): Xaa in position 19 is any or no amino acid
  Variant (21)..(21): Xaa in position 21 is any or no amino acid
  Variant (23)..(23): Xaa in position 23 is any amino acid
  Variant (26)..(32): Xaa in position 26 to 32 is any amino acid
  Variant (33)..(33): Xaa in position 33 is Ala, Gly, Ser or Thr
  Variant (34)..(34): Xaa in position 34 is Phe, Ile, Leu, Met or Val
  Variant (35)..(35): Xaa in position 35 is Ala, Cys, Ser, Thr or Val
  Variant (36)..(36): Xaa in position 36 is any amino acid
  Variant (37)..(37): Xaa in position 37 is Ala, Gly or Ser
  Variant (38)..(38): Xaa in position 38 is Ala, Gly, Ser or Val
  Variant (39)..(39): Xaa in position 39 is Leu, Met or Val
GXXXNPXLQXXXXXXHPPXLXYXGYXXXXXXXXXXXXXX

SEQ ID NO: 68147 - protein, 53 aa, Artificial sequence
  Consensus
  Variant (2)..(5): Xaa in position 2 to 5 is any amino acid
  Variant (6)..(7): Xaa in position 6 to 7 is any or no amino acid
  Variant (9)..(10): Xaa in position 9 to 10 is any amino acid
  Variant (12)..(12): Xaa in position 12 is Gly or Thr
  Variant (13)..(13): Xaa in position 13 is any amino acid
  Variant (16)..(17): Xaa in position 16 to 17 is any amino acid
  Variant (19)..(20): Xaa in position 19 to 20 is any amino acid
  Variant (22)..(22): Xaa in position 22 is Ala or Ser
  Variant (24)..(25): Xaa in position 24 to 25 is any amino acid
  Variant (26)..(26): Xaa in position 26 is Leu or Val
  Variant (31)..(31): Xaa in position 31 is Phe, Trp or Tyr
  Variant (33)..(33): Xaa in position 33 is any amino acid
  Variant (40)..(40): Xaa in position 40 is Ala, Ser or Val
  Variant (41)..(41): Xaa in position 41 is Ala or Ser
  Variant (42)..(42): Xaa in position 42 is Phe or Leu
  Variant (43)..(43): Xaa in position 43 is Ile, Leu or Met
  Variant (46)..(46): Xaa in position 46 is Ile, Leu or Val
  Variant (47)..(47): Xaa in position 47 is any amino acid
  Variant (48)..(48): Xaa in position 48 is Ala, Gly or Ser
  Variant (49)..(49): Xaa in position 49 is any amino acid
  Variant (50)..(50): Xaa in position 50 is Ala or Gly
  Variant (51)..(52): Xaa in position 51 to 52 is any amino acid
WXXXXXXWXXLXXGIXXGXXWXYXXXGWGGXWXWDPVENXXXXPWXXXXXXXH

SEQ ID NO: 68148 - protein, 42 aa, Artificial sequence
  Consensus
  Variant (2)..(2): Xaa in position 2 is Asn, Ser or Thr
  Variant (3)..(3): Xaa in position 3 is any amino acid
  Variant (4)..(4): Xaa in position 4 is Phe, Ile, Leu, Met or Val
  Variant (5)..(5): Xaa in position 5 is Phe, Leu or Val
  Variant (6)..(6): Xaa in position 6 is any amino acid
  Variant (7)..(7): Xaa in position 7 is Ile, Leu or Val
  Variant (8)..(12): Xaa in position 8 to 12 is any amino acid
  Variant (13)..(13): Xaa in position 13 is Ala, Cys, Ser, Thr or Val
  Variant (14)..(14): Xaa in position 14 is Ile, Leu, Met or Val
  Variant (15)..(15): Xaa in position 15 is any amino acid
  Variant (16)..(16): Xaa in position 16 is Ala, Gly or Ser
  Variant (17)..(17): Xaa in position 17 is Ala or Thr
  Variant (18)..(18): Xaa in position 18 is Phe or Leu
  Variant (19)..(19): Xaa in position 19 is Phe, Ile or Leu
  Variant (23)..(23): Xaa in position 23 is Gly or Ser
  Variant (24)..(24): Xaa in position 24 is any amino acid
  Variant (25)..(25): Xaa in position 25 is Ile or Leu
  Variant (26)..(26): Xaa in position 26 is any amino acid
  Variant (28)..(28): Xaa in position 28 is Ile or Val
  Variant (30)..(30): Xaa in position 30 is Ala or Ser
  Variant (33)..(33): Xaa in position 33 is any amino acid
  Variant (34)..(34): Xaa in position 34 is Asp, Glu or Ser
  Variant (35)..(36): Xaa in position 35 to 36 is any amino acid
  Variant (38)..(39): Xaa in position 38 to 39 is any amino acid
  Variant (40)..(41): Xaa in position 40 to 41 is any or no amino acid
WXXXXXXXXXXXXXXXXXXVRSXXXXSXHXFAXXXXRXXXXL

SEQ ID NO: 68149 - protein, 16 aa, Artificial sequence
  Consensus
  Variant (2)..(2): Xaa in position 2 is any amino acid
  Variant (3)..(3): Xaa in position 3 is Ala, Ile or Val
  Variant (4)..(5): Xaa in position 4 to 5 is any amino acid
  Variant (6)..(6): Xaa in position 6 is Ile, Leu or Val
  Variant (8)..(8): Xaa in position 8 is any amino acid
  Variant (10)..(11): Xaa in position 10 to 11 is any amino acid
  Variant (12)..(12): Xaa in position 12 is Phe, Ile, Leu, Met or Val
  Variant (13)..(15): Xaa in position 13 to 15 is any amino acid
PXXXXXWXGXXXXXXG

SEQ ID NO: 68150 - DNA, 2280 bp, Escherichia coli K12; identical to SEQ ID NO: 11018
  CDS (470)..(1951)

SEQ ID NO: 68151 - protein, 493 aa, Escherichia coli K12; identical to SEQ ID NO: 11019

SEQ ID NO: 68152 - DNA, 1770 bp, Arabidopsis thaliana; identical to SEQ ID NO: 11020
  CDS (84)..(1559)

SEQ ID NO: 68153 - protein, 491 aa, Arabidopsis thaliana; identical to SEQ ID NO: 11021

SEQ ID NO: 68154 - DNA, 1512 bp, Arabidopsis thaliana; identical to SEQ ID NO: 11022
  CDS (1)..(1479)

SEQ ID NO: 68155 - protein, 492 aa, Arabidopsis thaliana; identical to SEQ ID NO: 11023

SEQ ID NO: 68156 - DNA, 1500 bp, Arabidopsis thaliana; identical to SEQ ID NO: 11024
  CDS (1)..(1500)

SEQ ID NO: 68157 - protein, 499 aa, Arabidopsis thaliana; identical to SEQ ID NO: 11025

SEQ ID NO: 68158 - DNA, 1865 bp, Solanum tuberosum; identical to SEQ ID NO: 11026
  CDS (66)..(1547)

SEQ ID NO: 68159 - protein, 493 aa, Solanum tuberosum; identical to SEQ ID NO: 11027

SEQ ID NO: 68160 - DNA, 1616 bp, Arabidopsis thaliana; identical to SEQ ID NO: 11028
  CDS (44)..(1576)

SEQ ID NO: 68161 - protein, 510 aa, Arabidopsis thaliana; identical to SEQ ID NO: 11029

SEQ ID NO: 68162 - DNA, 1416 bp, Nostoc sp. PCC 7120; identical to SEQ ID NO: 11030
  CDS (1)..(1416)

SEQ ID NO: 68163 - protein, 471 aa, Nostoc sp. PCC 7120; identical to SEQ ID NO: 11031

SEQ ID NO: 68164 - DNA, 1437 bp, Salmonella enterica subsp. enterica serovar Typhi; identical to SEQ ID NO: 11032
  CDS (1)..(1437)

SEQ ID NO: 68165 - protein, 478 aa, Salmonella enterica subsp. enterica serovar Typhi; identical to SEQ ID NO: 11033

SEQ ID NO: 68166 - DNA, 1452 bp, Brucella melitensis; identical to SEQ ID NO: 11034
  CDS (1)..(1452)

SEQ ID NO: 68167 - protein, 483 aa, Brucella melitensis; identical to SEQ ID NO: 11035

SEQ ID NO: 68168 - DNA, 1416 bp, Bacillus halodurans; identical to SEQ ID NO: 11036
  CDS (1)..(1416)

SEQ ID NO: 68169 - protein, 471 aa, Bacillus halodurans; identical to SEQ ID NO: 11037

SEQ ID NO: 68170 - DNA, 1428 bp, Haemophilus influenzae; identical to SEQ ID NO: 11038
  CDS (1)..(1428)

SEQ ID NO: 68171 - protein, 475 aa, Haemophilus influenzae; identical to SEQ ID NO: 11039

SEQ ID NO: 68172 - DNA, 1398 bp, Neisseria meningitidis; identical to SEQ ID NO: 11040
  CDS (1)..(1398)

SEQ ID NO: 68173 - protein, 465 aa, Neisseria meningitidis; identical to SEQ ID NO: 11041

SEQ ID NO: 68174 - DNA, 1425 bp, Pseudomonas aeruginosa; identical to SEQ ID NO: 11042
  CDS (1)..(1425)

SEQ ID NO: 68175 - protein, 474 aa, Pseudomonas aeruginosa; identical to SEQ ID NO: 11043

SEQ ID NO: 68176 - DNA, 1398 bp, Clostridium acetobutylicum; identical to SEQ ID NO: 11044
  CDS (1)..(1398)

SEQ ID NO: 68177 - protein, 465 aa, Clostridium acetobutylicum; identical to SEQ ID NO: 11045

SEQ ID NO: 68178 - DNA, 1446 bp, Agrobacterium tumefaciens; identical to SEQ ID NO: 11046
  CDS (1)..(1446)

SEQ ID NO: 68179 - protein, 481 aa, Agrobacterium tumefaciens; identical to SEQ ID NO: 11047

SEQ ID NO: 68180 - DNA, 1377 bp, Thermotoga maritima; identical to SEQ ID NO: 11048
  CDS (1)..(1377)

SEQ ID NO: 68181 - protein, 458 aa, Thermotoga maritima; identical to SEQ ID NO: 11049

SEQ ID NO: 68182 - DNA, 1407 bp, Campylobacter jejuni; identical to SEQ ID NO: 11050
  CDS (1)..(1407)

SEQ ID NO: 68183 - protein, 468 aa, Campylobacter jejuni; identical to SEQ ID NO: 11051

SEQ ID NO: 68184 - DNA, 1452 bp, Vibrio cholerae; identical to SEQ ID NO: 11052
  CDS (1)..(1452)

SEQ ID NO: 68185 - protein, 483 aa, Vibrio cholerae; identical to SEQ ID NO: 11053

SEQ ID NO: 68186 - DNA, 1413 bp, Clostridium acetobutylicum; identical to SEQ ID NO: 11054
  CDS (1)..(1413)

SEQ ID NO: 68187 - protein, 470 aa, Clostridium acetobutylicum; identical to SEQ ID NO: 11055

SEQ ID NO: 68188 - DNA, 1407 bp, Helicobacter pylori; identical to SEQ ID NO: 11056
  CDS (1)..(1407)

SEQ ID NO: 68189 - protein, 468 aa, Helicobacter pylori; identical to SEQ ID NO: 11057

SEQ ID NO: 68190 - DNA, 2867 bp, Serratia marcescens; identical to SEQ ID NO: 11058
  CDS (787)..(2223)

SEQ ID NO: 68191 - protein, 478 aa, Serratia marcescens; identical to SEQ ID NO: 11059

SEQ ID NO: 68192 - DNA, 1428 bp, Bacillus subtilis; identical to SEQ ID NO: 11060
  CDS (1)..(1428)

SEQ ID NO: 68193 - protein, 475 aa, Bacillus subtilis; identical to SEQ ID NO: 11061

SEQ ID NO: 68194 - DNA, 2066 bp, Pseudomonas fluorescens; identical to SEQ ID NO: 11062
  CDS (323)..(1759)

SEQ ID NO: 68195 - protein, 478 aa, Pseudomonas fluorescens; identical to SEQ ID NO: 11063

SEQ ID NO: 68196 - DNA, 1437 bp, Bacillus cereus; identical to SEQ ID NO: 11064
  CDS (1)..(1437)

SEQ ID NO: 68197 - protein, 478 aa, Bacillus cereus; identical to SEQ ID NO: 11065

SEQ ID NO: 68198 - DNA, 1419 bp, Acinetobacter sp; identical to SEQ ID NO: 11066
  CDS (1)..(1419)

SEQ ID NO: 68199 - protein, 472 aa, Acinetobacter sp; identical to SEQ ID NO: 11067

SEQ ID NO: 68200 - DNA, 1431 bp, Bacillus anthracis str; identical to SEQ ID NO: 11068
  CDS (1)..(1431)

SEQ ID NO: 68201 - protein, 476 aa, Bacillus anthracis str; identical to SEQ ID NO: 11069

SEQ ID NO: 68202 - DNA, 1461 bp, Photobacterium profundum; identical to SEQ ID NO: 11070
  CDS (1)..(1461)

SEQ ID NO: 68203 - protein, 486 aa, Photobacterium profundum; identical to SEQ ID NO: 11071

SEQ ID NO: 68204 - DNA, 1431 bp, Bdellovibrio bacteriovorus; identical to SEQ ID NO: 11072
  CDS (1)..(1431)

SEQ ID NO: 68205 - protein, 476 aa, Bdellovibrio bacteriovorus; identical to SEQ ID NO: 11073

SEQ ID NO: 68206 - DNA, 1575 bp, Corynebacterium diphtheriae; identical to SEQ ID NO: 11074
  CDS (1)..(1575)

SEQ ID NO: 68207 - protein, 524 aa, Corynebacterium diphtheriae; identical to SEQ ID NO: 11075

SEQ ID NO: 68208 - DNA, 1407 bp, Desulfovibrio vulgaris; identical to SEQ ID NO: 11076
  CDS (1)..(1407)

SEQ ID NO: 68209 - protein, 468 aa, Desulfovibrio vulgaris; identical to SEQ ID NO: 11077

SEQ ID NO: 68210 - DNA, 1413 bp, Desulfovibrio vulgaris; identical to SEQ ID NO: 11078
  CDS (1)..(1413)

SEQ ID NO: 68211 - protein, 470 aa, Desulfovibrio vulgaris; identical to SEQ ID NO: 11079

SEQ ID NO: 68212 - DNA, 1434 bp, Bacillus cereus; identical to SEQ ID NO: 11080
  CDS (1)..(1434)

SEQ ID NO: 68213 - protein, 477 aa, Bacillus cereus; identical to SEQ ID NO: 11081

SEQ ID NO: 68214 - DNA, 1392 bp, Treponema denticola; identical to SEQ ID NO: 11082
  CDS (1)..(1392)

SEQ ID NO: 68215 - protein, 463 aa, Treponema denticola; identical to SEQ ID NO: 11083

SEQ ID NO: 68216 - DNA, 1392 bp, Geobacter sulfurreducens; identical to SEQ ID NO: 11084
  CDS (1)..(1392)

SEQ ID NO: 68217 - protein, 463 aa, Geobacter sulfurreducens; identical to SEQ ID NO: 11085

SEQ ID NO: 68218 - DNA, 1437 bp, Yersinia pestis; identical to SEQ ID NO: 11086
  CDS (1)..(1437)

SEQ ID NO: 68219 - protein, 478 aa, Yersinia pestis; identical to SEQ ID NO: 11087

SEQ ID NO: 68220 - DNA, 1401 bp, Bradyrhizobium japonicum USDA 110; identical to SEQ ID NO: 11088
  CDS (1)..(1401)

SEQ ID NO: 68221 - protein, 466 aa, Bradyrhizobium japonicum USDA 110; identical to SEQ ID NO: 11089

SEQ ID NO: 68222 - DNA, 1416 bp, Wolinella succinogenes; identical to SEQ ID NO: 11090
  CDS (1)..(1416)

SEQ ID NO: 68223 - protein, 471 aa, Wolinella succinogenes; identical to SEQ ID NO: 11091

SEQ ID NO: 68224 - DNA, 1452 bp, Vibrio vulnificus; identical to SEQ ID NO: 11092
  CDS (1)..(1452)

SEQ ID NO: 68225 - protein, 483 aa, Vibrio vulnificus; identical to SEQ ID NO: 11093

SEQ ID NO: 68226 - DNA, 1428 bp, Porphyromonas gingivalis W83; identical to SEQ ID NO: 11094
  CDS (1)..(1428)

SEQ ID NO: 68227 - protein, 475 aa, Porphyromonas gingivalis W83; identical to SEQ ID NO: 11095

SEQ ID NO: 68228 - DNA, 1425 bp, Photorhabdus luminescens subsp; identical to SEQ ID NO: 11096
  CDS (1)..(1425)

SEQ ID NO: 68229 - protein, 474 aa, Photorhabdus luminescens subsp; identical to SEQ ID NO: 11097

SEQ ID NO: 68230 - DNA, 1410 bp, Gloeobacter violaceus PCC 7421; identical to SEQ ID NO: 11098
  CDS (1)..(1410)

SEQ ID NO: 68231 - protein, 469 aa, Gloeobacter violaceus PCC 7421; identical to SEQ ID NO: 11099

SEQ ID NO: 68232 - DNA, 1404 bp, Chromobacterium violaceum ATCC 12472; identical to SEQ ID NO: 11100
  CDS (1)..(1404)

SEQ ID NO: 68233 - protein, 467 aa, Chromobacterium violaceum ATCC 12472; identical to SEQ ID NO: 11101

SEQ ID NO: 68234 - DNA, 1440 bp, Helicobacter hepaticus ATCC 51449; identical to SEQ ID NO: 11102
  CDS (1)..(1440)

SEQ ID NO: 68235 - protein, 479 aa, Helicobacter hepaticus ATCC 51449; identical to SEQ ID NO: 11103

SEQ ID NO: 68236 - DNA, 1428 bp, Haemophilus ducreyi 35000HP; identical to SEQ ID NO: 11104
  CDS (1)..(1428)

SEQ ID NO: 68237 - protein, 475 aa, Haemophilus ducreyi 35000HP; identical to SEQ ID NO: 11105

SEQ ID NO: 68238 - DNA, 1413 bp, Streptomyces avermitilis; identical to SEQ ID NO: 11106
  CDS (1)..(1413)

SEQ ID NO: 68239 - protein, 470 aa, Streptomyces avermitilis; identical to SEQ ID NO: 11107

SEQ ID NO: 68240 - DNA, 1395 bp, Eikenella corrodens; identical to SEQ ID NO: 11108
  CDS (1)..(1395)

SEQ ID NO: 68241 - protein, 464 aa, Eikenella corrodens; identical to SEQ ID NO: 11109

SEQ ID NO: 68242 - DNA, 1452 bp, Vibrio parahaemolyticus; identical to SEQ ID NO: 11110
  CDS (1)..(1452)

SEQ ID NO: 68243 - protein, 483 aa, Vibrio parahaemolyticus; identical to SEQ ID NO: 11111

SEQ ID NO: 68244 - DNA, 1425 bp, Pseudomonas syringae pv; identical to SEQ ID NO: 11112
  CDS (1)..(1425)

SEQ ID NO: 68245 - protein, 474 aa, Pseudomonas syringae pv; identical to SEQ ID NO: 11113

SEQ ID NO: 68246 - DNA, 1437 bp, Pseudomonas putida; identical to SEQ ID NO: 11114
  CDS (1)..(1437)

SEQ ID NO: 68247 - protein, 478 aa, Pseudomonas putida; identical to SEQ ID NO: 11115

SEQ ID NO: 68248 - DNA, 1401 bp, Lactobacillus plantarum WCFS1; identical to SEQ ID NO: 11116
  CDS (1)..(1401)

SEQ ID NO: 68249 - protein, 466 aa, Lactobacillus plantarum WCFS1; identical to SEQ ID NO: 11117

SEQ ID NO: 68250 - DNA, 1413 bp, Clostridium tetani E88; identical to SEQ ID NO: 11118
  CDS (1)..(1413)

SEQ ID NO: 68251 - protein, 470 aa, Clostridium tetani E88; identical to SEQ ID NO: 11119

SEQ ID NO: 68252 - DNA, 1461 bp, Bacteroides thetaiotaomicron VPI; identical to SEQ ID NO: 11120
  CDS (1)..(1461)

SEQ ID NO: 68253 - protein, 486 aa, Bacteroides thetaiotaomicron VPI; identical to SEQ ID NO: 11121

SEQ ID NO: 68254 - DNA, 1440 bp, Wigglesworthia glossinidia brevipalpis; identical to SEQ ID NO: 11122
  CDS (1)..(1440)

SEQ ID NO: 68255 - protein, 479 aa, Wigglesworthia glossinidia brevipalpis; identical to SEQ ID NO: 11123

SEQ ID NO: 68256 - DNA, 1617 bp, Corynebacterium efficiens YS; identical to SEQ ID NO: 11124
  CDS (1)..(1617)

SEQ ID NO: 68257 - protein, 538 aa, Corynebacterium efficiens YS; identical to SEQ ID NO: 11125

SEQ ID NO: 68258 - DNA, 1473 bp, Bifidobacterium longum; identical to SEQ ID NO: 11126
  CDS (1)..(1473)

SEQ ID NO: 68259 - protein, 490 aa, Bifidobacterium longum; identical to SEQ ID NO: 11127

SEQ ID NO: 68260 - DNA, 1410 bp, Cytophaga sp; identical to SEQ ID NO: 11128
  CDS (1)..(1410)

SEQ ID NO: 68261 - protein, 469 aa, Cytophaga sp; identical to SEQ ID NO: 11129

SEQ ID NO: 68262 - DNA, 1386 bp, Thermoanaerobacter tengcongensis; identical to SEQ ID NO: 11130
  CDS (1)..(1386)

SEQ ID NO: 68263 - protein, 461 aa, Thermoanaerobacter tengcongensis; identical to SEQ ID NO: 11131

SEQ ID NO: 68264 - DNA, 1419 bp, Pasteurella multocida; identical to SEQ ID NO: 11132
  CDS (1)..(1419)

SEQ ID NO: 68265 - protein, 472 aa, Pasteurella multocida; identical to SEQ ID NO: 11133

SEQ ID NO: 68266 - DNA, 1374 bp, Thermoplasma acidophilum; identical to SEQ ID NO: 11134
  CDS (1)..(1374)

SEQ ID NO: 68267 - protein, 457 aa, Thermoplasma acidophilum; identical to SEQ ID NO: 11135

SEQ ID NO: 68268 - DNA, 2106 bp, Bacillus sp; identical to SEQ ID NO: 11136
  CDS (349)..(1755)

SEQ ID NO: 68269 - protein, 468 aa, Bacillus sp; identical to SEQ ID NO: 11137

SEQ ID NO: 68270 - DNA, 1428 bp, Rhizobium etli; identical to SEQ ID NO: 11138
  CDS (1)..(1428)

SEQ ID NO: 68271 - protein, 475 aa, Rhizobium etli; identical to SEQ ID NO: 11139

SEQ ID NO: 68272 - DNA, 1581 bp, Corynebacterium glutamicum; identical to SEQ ID NO: 11140
  CDS (1)..(1581)

SEQ ID NO: 68273 - protein, 526 aa, Corynebacterium glutamicum; identical to SEQ ID NO: 11141

SEQ ID NO: 68274 - DNA, 26 bp, Artificial sequence
  Primer sequence
atgtgtttaaagcaaatcattggcag

SEQ ID NO: 68275 - DNA, 25 bp, Artificial sequence
  Primer sequence
ttactgttcgctttcatcagtatag

SEQ ID NO: 68276 - protein, 465 aa, Artificial sequence; identical to SEQ ID NO: 33375
  Consensus
  Variant (2)..(2): Xaa in position 2 is any amino acid
  Variant (4)..(4): Xaa in position 4 is any amino acid
  Variant (6)..(7): Xaa in position 6 to 7 is any amino acid
  Variant (9)..(12): Xaa in position 9 to 12 is any amino acid
  Variant (14)..(16): Xaa in position 14 to 16 is any amino acid
  Variant (18)..(18): Xaa in position 18 is any amino acid
  Variant (20)..(21): Xaa in position 20 to 21 is any amino acid
  Variant (23)..(23): Xaa in position 23 is any amino acid
  Variant (26)..(27): Xaa in position 26 to 27 is any amino acid
  Variant (30)..(30): Xaa in position 30 is any amino acid
  Variant (32)..(49): Xaa in position 32 to 49 is any amino acid
  Variant (51)..(51): Xaa in position 51 is any amino acid
  Variant (53)..(53): Xaa in position 53 is any amino acid
  Variant (55)..(56): Xaa in position 55 to 56 is any amino acid
  Variant (58)..(70): Xaa in position 58 to 70 is any amino acid
  Variant (72)..(73): Xaa in position 72 to 73 is any amino acid
  Variant (75)..(88): Xaa in position 75 to 88 is any amino acid
  Variant (90)..(91): Xaa in position 90 to 91 is any amino acid
  Variant (93)..(94): Xaa in position 93 to 94 is any amino acid
  Variant (102)..(102): Xaa in position 102 is any amino acid
  Variant (106)..(106): Xaa in position 106 is any amino acid
  Variant (110)..(110): Xaa in position 110 is any amino acid
  Variant (113)..(113): Xaa in position 113 is any amino acid
  Variant (115)..(115): Xaa in position 115 is any amino acid
  Variant (117)..(118): Xaa in position 117 to 118 is any amino acid
  Variant (120)..(122): Xaa in position 120 to 122 is any amino acid
  Variant (124)..(124): Xaa in position 124 is any amino acid
  Variant (126)..(129): Xaa in position 126 to 129 is any amino acid
  Variant (132)..(133): Xaa in position 132 to 133 is any amino acid
  Variant (136)..(137): Xaa in position 136 to 137 is any amino acid
  Variant (143)..(144): Xaa in position 143 to 144 is any amino acid
  Variant (147)..(159): Xaa in position 147 to 159 is any amino acid
  Variant (161)..(166): Xaa in position 161 to 166 is any amino acid
  Variant (168)..(173): Xaa in position 168 to 173 is any amino acid
  Variant (175)..(176): Xaa in position 175 to 176 is any amino acid
  Variant (179)..(182): Xaa in position 179 to 182 is any amino acid
  Variant (184)..(184): Xaa in position 184 is any amino acid
  Variant (188)..(188): Xaa in position 188 is any amino acid
  Variant (195)..(197): Xaa in position 195 to 197 is any amino acid
  Variant (202)..(226): Xaa in position 202 to 226 is any amino acid
  Variant (228)..(228): Xaa in position 228 is any amino acid
  Variant (230)..(230): Xaa in position 230 is any amino acid
  Variant (233)..(233): Xaa in position 233 is any amino acid
  Variant (237)..(237): Xaa in position 237 is any amino acid
  Variant (239)..(242): Xaa in position 239 to 242 is any amino acid
  Variant (244)..(250): Xaa in position 244 to 250 is any amino acid
  Variant (252)..(261): Xaa in position 252 to 261 is any amino acid
  Variant (263)..(264): Xaa in position 263 to 264 is any amino acid
  Variant (266)..(267): Xaa in position 266 to 267 is any amino acid
  Variant (270)..(281): Xaa in position 270 to 281 is any amino acid
  Variant (284)..(285): Xaa in position 284 to 285 is any amino acid
  Variant (287)..(290): Xaa in position 287 to 290 is any amino acid
  Variant (292)..(293): Xaa in position 292 to 293 is any amino acid
  Variant (300)..(300): Xaa in position 300 is any amino acid
  Variant (305)..(305): Xaa in position 305 is any amino acid
  Variant (307)..(308): Xaa in position 307 to 308 is any amino acid
  Variant (310)..(311): Xaa in position 310 to 311 is any amino acid
  Variant (314)..(315): Xaa in position 314 to 315 is any amino acid
  Variant (317)..(317): Xaa in position 317 is any amino acid
  Variant (324)..(324): Xaa in position 324 is any amino acid
  Variant (330)..(331): Xaa in position 330 to 331 is any amino acid
  Variant (333)..(334): Xaa in position 333 to 334 is any amino acid
  Variant (337)..(340): Xaa in position 337 to 340 is any amino acid
  Variant (342)..(342): Xaa in position 342 is any amino acid
  Variant (346)..(350): Xaa in position 346 to 350 is any amino acid
  Variant (352)..(354): Xaa in position 352 to 354 is any amino acid
  Variant (358)..(358): Xaa in position 358 is any amino acid
  Variant (361)..(363): Xaa in position 361 to 363 is any amino acid
  Variant (365)..(372): Xaa in position 365 to 372 is any amino acid
  Variant (374)..(387): Xaa in position 374 to 387 is any amino acid
  Variant (389)..(390): Xaa in position 389 to 390 is any amino acid
  Variant (393)..(394): Xaa in position 393 to 394 is any amino acid
  Variant (396)..(405): Xaa in position 396 to 405 is any amino acid
  Variant (407)..(410): Xaa in position 407 to 410 is any amino acid
  Variant (412)..(412): Xaa in position 412 is any amino acid
  Variant (416)..(417): Xaa in position 416 to 417 is any amino acid
  Variant (419)..(432): Xaa in position 419 to 432 is any amino acid
  Variant (434)..(447): Xaa in position 434 to 447 is any amino acid
  Variant (449)..(464): Xaa in position 449 to 464 is any amino acid

SEQ ID NO: 68277 - protein, 50 aa, Artificial sequence; identical to SEQ ID NO: 13505
  Consensus
  Variant (2)..(2): Xaa in position 2 is any amino acid
  Variant (4)..(4): Xaa in position 4 is any amino acid
  Variant (6)..(6): Xaa in position 6 is any amino acid
  Variant (7)..(7): Xaa in position 7 is Leu, Ile, Phe, Met or Val
  Variant (9)..(11): Xaa in position 9 to 11 is any amino acid
  Variant (12)..(12): Xaa in position 12 is Val, Ile or Leu
  Variant (13)..(13): Xaa in position 13 is Pro, Ser, Glu or Ala
  Variant (14)..(16): Xaa in position 14 to 16 is any amino acid
  Variant (17)..(17): Xaa in position 17 is Tyr, Leu or Phe
  Variant (18)..(18): Xaa in position 18 is Tyr, Trp, Phe or His
  Variant (20)..(20): Xaa in position 20 is Ile, Val or Ala
  Variant (21)..(21): Xaa in position 21 is Gln, His or Asn
  Variant (22)..(22): Xaa in position 22 is Thr or Ser
  Variant (23)..(23): Xaa in position 23 is any amino acid
  Variant (25)..(25): Xaa in position 25 is Ala, Ser or Gly
  Variant (26)..(27): Xaa in position 26 to 27 is any amino acid
  Variant (29)..(29): Xaa in position 29 is Phe, Tyr or Val
  Variant (30)..(30): Xaa in position 30 is any amino acid
  Variant (31)..(31): Xaa in position 31 is Ile, Leu or Val
  Variant (32)..(32): Xaa in position 32 is Ser, Thr or Gly
  Variant (33)..(40): Xaa in position 33 to 40 is any amino acid
  Variant (41)..(42): Xaa in position 41 to 42 is any or no amino acid
  Variant (43)..(43): Xaa in position 43 is Ile, Val or Met
  Variant (44)..(44): Xaa in position 44 is any amino acid
  Variant (45)..(45): Xaa in position 45 is Ala, Gly or Ser
  Variant (46)..(48): Xaa in position 46 to 48 is any amino acid
  Variant (49)..(49): Xaa in position 49 is Val, Thr, Ile or Leu

SEQ ID NO: 68278 - protein, 57 aa, Artificial sequence; identical to SEQ ID NO: 13506
  Consensus
  Variant (1)..(1): Xaa in position 1 is Gln or Ser
  Variant (2)..(2): Xaa in position 2 is Gly, Thr or Ala
  Variant (4)..(4): Xaa in position 4 is Ala or Ser
  Variant (7)..(7): Xaa in position 7 is Ser, Gln or Thr
  Variant (8)..(8): Xaa in position 8 is any amino acid
  Variant (9)..(9): Xaa in position 9 is Asn or His
  Variant (12)..(12): Xaa in position 12 is any amino acid
  Variant (16)..(16): Xaa in position 16 is Ile, Leu or Val
  Variant (17)..(17): Xaa in position 17 is Ala, Ser, Thr or Gly
  Variant (19)..(19): Xaa in position 19 is Arg, Ile, Leu or Val
  Variant (20)..(20): Xaa in position 20 is Ala, Gly or Leu
  Variant (21)..(21): Xaa in position 21 is any amino acid
  Variant (22)..(22): Xaa in position 22 is Glu, Ile, Gln, Thr or Arg
  Variant (23)..(23): Xaa in position 23 is any amino acid
  Variant (24)..(24): Xaa in position 24 is Leu, Met, Arg, Ala or Ile
  Variant (25)..(25): Xaa in position 25 is Gly, Asn or Pro
  Variant (26)..(27): Xaa in position 26 to 27 is any or no amino acid
  Variant (28)..(28): Xaa in position 28 is Lys, Arg, Ala or Pro
  Variant (29)..(29): Xaa in position 29 is Gly or Val
  Variant (30)..(30): Xaa in position 30 is any amino acid
  Variant (31)..(31): Xaa in position 31 is Tyr, Phe or no amino acid
  Variant (32)..(33): Xaa in position 32 to 33 is any or no amino acid
  Variant (34)..(34): Xaa in position 34 is Leu, Val, Ile or Cys
  Variant (35)..(35): Xaa in position 35 is His, Asn, Ser or Asp
  Variant (37)..(37): Xaa in position 37 is Asn, Met, Ile or Leu
  Variant (38)..(38): Xaa in position 38 is any amino acid
  Variant (39)..(39): Xaa in position 39 is His or Asp
  Variant (40)..(40): Xaa in position 40 is Val or Leu
  Variant (42)..(42): Xaa in position 42 is any amino acid
  Variant (43)..(43): Xaa in position 43 is Ser, Ala, Cys, Gly or His
  Variant (46)..(46): Xaa in position 46 is Thr, Ser or Gln
  Variant (48)..(48): Xaa in position 48 is Asp or Cys
  Variant (49)..(49): Xaa in position 49 is Ala, Val, Thr or Ser
  Variant (50)..(50): Xaa in position 50 is Tyr, Phe or Ile
  Variant (51)..(51): Xaa in position 51 is Pro or Ser
  Variant (52)..(52): Xaa in position 52 is Thr, Ser or Ala
  Variant (53)..(53): Xaa in position 53 is Ala, Gly, Val, Ser or Met
  Variant (54)..(54): Xaa in position 54 is any amino acid
  Variant (55)..(55): Xaa in position 55 is Arg, His, Lys or Asn
  Variant (56)..(56): Xaa in position 56 is Ile, Leu, Val or Met
  Variant (57)..(57): Xaa in position 57 is Ala, Gly, Ser or Thr

SEQ ID NO: 68279 - protein, 56 aa, Artificial sequence; identical to SEQ ID NO: 13507
  Consensus
  Variant (1)..(1): Xaa in position 1 is Leu, Ile or Val
  Variant (2)..(2): Xaa in position 2 is Lys or Arg
  Variant (3)..(3): Xaa in position 3 is any amino acid
  Variant (4)..(4): Xaa in position 4 is Gly or Ala
  Variant (7)..(7): Xaa in position 7 is Gln or His
  Variant (8)..(8): Xaa in position 8 is Leu, Thr or Met
  Variant (9)..(9): Xaa in position 9 is Gln, Glu or Met
  Variant (11)..(11): Xaa in position 11 is Ala or Gly
  Variant (12)..(12): Xaa in position 12 is Val, Thr, Leu, Ala or Pro
  Variant (14)..(14): Xaa in position 14 is Met, Ile, Leu or Val
  Variant (15)..(15): Xaa in position 15 is Thr, Arg, Ser, Met or Leu
  Variant (16)..(16): Xaa in position 16 is Leu, Val, Met, Phe or Tyr
  Variant (18)..(18): Xaa in position 18 is any amino acid
  Variant (19)..(19): Xaa in position 19 is Glu or Thr
  Variant (21)..(21): Xaa in position 21 is any amino acid
  Variant (22)..(22): Xaa in position 22 is Ala, Gly, Thr or Ser
  Variant (23)..(23): Xaa in position 23 is Phe, Tyr or Trp
  Variant (24)..(26): Xaa in position 24 to 26 is any amino acid
  Variant (27)..(27): Xaa in position 27 is Leu, Val, Ile, Met or Phe
  Variant (28)..(29): Xaa in position 28 to 29 is any amino acid
  Variant (30)..(30): Xaa in position 30 is Asp, Glu, Gly, His or Asn
  Variant (31)..(33): Xaa in position 31 to 33 is any amino acid
  Variant (34)..(34): Xaa in position 34 is Leu, Ile, Val or Phe
  Variant (35)..(38): Xaa in position 35 to 38 is any amino acid
  Variant (39)..(39): Xaa in position 39 is Pro or no amino acid
  Variant (40)..(41): Xaa in position 40 to 41 is any amino acid
  Variant (42)..(42): Xaa in position 42 is Leu, Ile, Met, Val or Phe
  Variant (43)..(44): Xaa in position 43 to 44 is any amino acid
  Variant (45)..(45): Xaa in position 45 is Val, Ile, Leu or Met
  Variant (46)..(46): Xaa in position 46 is Asn, Ala, Gly or Ser
  Variant (47)..(47): Xaa in position 47 is Leu, Met, Ile or Gln
  Variant (49)..(49): Xaa in position 49 is Ala or Gly
  Variant (50)..(50): Xaa in position 50 is Thr or Ser
  Variant (51)..(51): Xaa in position 51 is Ala or Val
  Variant (52)..(52): Xaa in position 52 is Ile, Val or Ala
  Variant (55)..(55): Xaa in position 55 is Gly, Arg, Ala, Ser or Lys
  Variant (56)..(56): Xaa in position 56 is Leu, Ile, Val or Met

SEQ ID NO: 68280 - protein, 105 aa, Artificial sequence; identical to SEQ ID NO: 13508
  Consensus
  Variant (1)..(1): Xaa in position 1 is Lys or Arg
  Variant (2)..(2): Xaa in position 2 is any amino acid
  Variant (3)..(3): Xaa in position 3 is Cys, Ala, Ser or Gly
  Variant (4)..(4): Xaa in position 4 is Asn, Ser, His, Asp or Gly
  Variant (6)..(6): Xaa in position 6 is Leu or Ile
  Variant (8)..(8): Xaa in position 8 is Leu, Phe or Ile
  Variant (9)..(9): Xaa in position 9 is Leu or Met
  Variant (10)..(10): Xaa in position 10 is any amino acid
  Variant (14)..(15): Xaa in position 14 to 15 is any amino acid
  Variant (16)..(16): Xaa in position 16 is Gly or Val
  Variant (17)..(17): Xaa in position 17 is Leu, Ile or Phe
  Variant (18)..(18): Xaa in position 18 is any amino acid
  Variant (19)..(19): Xaa in position 19 is Glu or Asp
  Variant (20)..(20): Xaa in position 20 is Ile, Leu, Phe or Val
  Variant (21)..(21): Xaa in position 21 is any amino acid
  Variant (22)..(22): Xaa in position 22 is Leu, Val or Ile
  Variant (23)..(23): Xaa in position 23 is Pro or Glu
  Variant (24)..(25): Xaa in position 24 to 25 is any amino acid
  Variant (26)..(26): Xaa in position 26 is Gln, Glu or Ala
  Variant (27)..(27): Xaa in position 27 is Pro, Ala, Asn or Gln
  Variant (34)..(34): Xaa in position 34 is Gly or Ala
  Variant (36)..(36): Xaa in position 36 is Val, Ile or Tyr
  Variant (39)..(39): Xaa in position 39 is Val, Thr or Ser
  Variant (40)..(40): Xaa in position 40 is Ile, Met, Val, Gln or Leu
  Variant (41)..(41): Xaa in position 41 is Pro, Cys, Ala or Ser
  Variant (43)..(43): Xaa in position 43 is any amino acid
  Variant (44)..(44): Xaa in position 44 is Val, Ile, Leu, Met or Thr
  Variant (45)..(45): Xaa in position 45 is any amino acid
  Variant (46)..(46): Xaa in position 46 is Gln, Met, Thr or Leu
  Variant (47)..(47): Xaa in position 47 is Val, Ile, Thr, Ala or Cys
  Variant (48)..(48): Xaa in position 48 is Cys, Ala or Ser
  Variant (49)..(49): Xaa in position 49 is Phe, Tyr, Ala, His or Met
  Variant (50)..(50): Xaa in position 50 is any amino acid
  Variant (51)..(51): Xaa in position 51 is Val, Ile or Ala
  Variant (52)..(52): Xaa in position 52 is any amino acid
  Variant (53)..(53): Xaa in position 53 is Gly, Ala or Ser
  Variant (54)..(54): Xaa in position 54 is any amino acid
  Variant (55)..(55): Xaa in position 55 is Asp, His, Gln or Asn
  Variant (56)..(56): Xaa in position 56 is any amino acid
  Variant (57)..(57): Xaa in position 57 is Thr, Ala, Cys, Ser or Ile
  Variant (58)..(58): Xaa in position 58 is Val, Ile or Leu
  Variant (59)..(60): Xaa in position 59 to 60 is any amino acid
  Variant (61)..(61): Xaa in position 61 is Ala, Gly or Ser
  Variant (62)..(62): Xaa in position 62 is Ala, Ser, Gly, Val or Cys
  Variant (63)..(63): Xaa in position 63 is Glu, Ser, Gln, Ala or Asp
  Variant (64)..(64): Xaa in position 64 is any amino acid
  Variant (65)..(65): Xaa in position 65 is Gly or Ala
  Variant (66)..(66): Xaa in position 66 is Gln, His or Asn
  Variant (67)..(67): Xaa in position 67 is Leu, Phe or Met
  Variant (68)..(68): Xaa in position 68 is Gln or Glu
  Variant (71)..(71): Xaa in position 71 is Val, Ala or Gln
  Variant (72)..(72): Xaa in position 72 is Met or Phe
  Variant (73)..(73): Xaa in position 73 is any amino acid
  Variant (75)..(75): Xaa in position 75 is any amino acid
  Variant (76)..(76): Xaa in position 76 is Ile, Leu, Met, Thr or Val
  Variant (77)..(79): Xaa in position 77 to 79 is any amino acid
  Variant (80)..(80): Xaa in position 80 is Leu, Met, Ile or Cys
  Variant (81)..(82): Xaa in position 81 to 82 is any amino acid
  Variant (83)..(83): Xaa in position 83 is Ser, Gly or Thr
  Variant (84)..(86): Xaa in position 84 to 86 is any amino acid
  Variant (87)..(87): Xaa in position 87 is Leu, Met or Ile
  Variant (88)..(89): Xaa in position 88 to 89 is any amino acid
  Variant (90)..(90): Xaa in position 90 is Ala, Gly, Thr or Val
  Variant (91)..(93): Xaa in position 91 to 93 is any amino acid
  Variant (94)..(94): Xaa in position 94 is Leu or Phe
  Variant (95)..(96): Xaa in position 95 to 96 is any amino acid
  Variant (97)..(97): Xaa in position 97 is any or no amino acid
  Variant (98)..(98): Xaa in position 98 is Cys, Ala, Tyr or Leu
  Variant (99)..(99): Xaa in position 99 is Ile, Val or Leu
  Variant (100)..(101): Xaa in position 100 to 101 is any amino acid
  Variant (102)..(102): Xaa in position 102 is Ile, Leu, Met or Val
  Variant (103)..(103): Xaa in position 103 is any amino acid
  Variant (104)..(104): Xaa in position 104 is Ala, Val, Ile, Pro or Gly
  Variant (105)..(105): Xaa in position 105 is Asn, Asp or Gln

SEQ ID NO: 68281 - DNA, 1216 bp, Saccharomyces cerevisiae; identical to SEQ ID NO: 58384
  CDS (208)..(993)

SEQ ID NO: 68282 - protein, 261 aa, Saccharomyces cerevisiae; identical to SEQ ID NO: 58385

SEQ ID NO: 68283 - DNA, 735 bp, Mus musculus; identical to SEQ ID NO: 58386
  CDS (1)..(735)

SEQ ID NO: 68284 - protein, 244 aa, Mus musculus; identical to SEQ ID NO: 58387

SEQ ID NO: 68285 - DNA, 696 bp, Danio rerio; identical to SEQ ID NO: 58388
  CDS (1)..(696)

SEQ ID NO: 68286 - protein, 231 aa, Danio rerio; identical to SEQ ID NO: 58389

SEQ ID NO: 68287 - DNA, 735 bp, Mus musculus; identical to SEQ ID NO: 58390
  CDS (1)..(735)

SEQ ID NO: 68288 - protein, 244 aa, Mus musculus; identical to SEQ ID NO: 58391

SEQ ID NO: 68289 - DNA, 663 bp, Pyrococcus abyssi GE5; identical to SEQ ID NO: 58392
  CDS (1)..(663): transl_table=11

SEQ ID NO: 68290 - protein, 220 aa, Pyrococcus abyssi GE5; identical to SEQ ID NO: 58393

SEQ ID NO: 68291 - DNA, 660 bp, Pyrococcus horikoshii OT3; identical to SEQ ID NO: 58394
  CDS (1)..(660): transl_table=11

SEQ ID NO: 68292 - protein, 219 aa, Pyrococcus horikoshii OT3; identical to SEQ ID NO: 58395

SEQ ID NO: 68293 - DNA, 723 bp, Aeropyrum pernix K1; identical to SEQ ID NO: 58396
  CDS (1)..(723): transl_table=11

SEQ ID NO: 68294 - protein, 240 aa, Aeropyrum pernix K1; identical to SEQ ID NO: 58397

SEQ ID NO: 68295 - DNA, 1452 bp, Halobacterium sp. NRC-1; identical to SEQ ID NO: 58398
  CDS (1)..(1452): transl_table=11

SEQ ID NO: 68296 - protein, 483 aa, Halobacterium sp. NRC-1; identical to SEQ ID NO: 58399

SEQ ID NO: 68297 - DNA, 672 bp, Sulfolobus solfataricus P2; identical to SEQ ID NO: 58400
  CDS (1)..(672): transl_table=11

SEQ ID NO: 68298 - protein, 223 aa, Sulfolobus solfataricus P2; identical to SEQ ID NO: 58401

SEQ ID NO: 68299 - DNA, 684 bp, Sulfolobus tokodaii str. 7; identical to SEQ ID NO: 58402
  CDS (1)..(684): transl_table=11

SEQ ID NO: 68300 - protein, 227 aa, Sulfolobus tokodaii str. 7; identical to SEQ ID NO: 58403

SEQ ID NO: 68301 - DNA, 636 bp, Pyrobaculum aerophilum str. IM2; identical to SEQ ID NO: 58404
  CDS (1)..(636): transl_table=11

SEQ ID NO: 68302 - protein, 211 aa, Pyrobaculum aerophilum str. IM2; identical to SEQ ID NO: 58405

SEQ ID NO: 68303 - DNA, 681 bp, Arabidopsis thaliana; identical to SEQ ID NO: 58406
  CDS (1)..(681)

SEQ ID NO: 68304 - protein, 226 aa, Arabidopsis thaliana; identical to SEQ ID NO: 58407

SEQ ID NO: 68305 - DNA, 681 bp, Pyrococcus furiosus DSM 3638; identical to SEQ ID NO: 58408
  CDS (1)..(681): transl_table=11

SEQ ID NO: 68306 - protein, 226 aa, Pyrococcus furiosus DSM 3638; identical to SEQ ID NO: 58409

SEQ ID NO: 68307 - DNA, 594 bp, Encephalitozoon cuniculi GB-M1; identical to SEQ ID NO: 58410
  CDS (1)..(594)

SEQ ID NO: 68308 - protein, 197 aa, Encephalitozoon cuniculi GB-M1; identical to SEQ ID NO: 58411

SEQ ID NO: 68309 - DNA, 717 bp, Schizosaccharomyces pombe 972h-; identical to SEQ ID NO: 58412
  CDS (1)..(717)

SEQ ID NO: 68310 - protein, 238 aa, Schizosaccharomyces pombe 972h-; identical to SEQ ID NO: 58413

SEQ ID NO: 68311 - DNA, 621 bp, Methanopyrus kandleri AV19; identical to SEQ ID NO: 58414
  CDS (1)..(621): transl_table=11

SEQ ID NO: 68312 - protein, 206 aa, Methanopyrus kandleri AV19; identical to SEQ ID NO: 58415

SEQ ID NO: 68313 - DNA, 1644 bp, Methanosarcina acetivorans C2A; identical to SEQ ID NO: 58416
  CDS (1)..(1644): transl_table=11

SEQ ID NO: 68314 - protein, 547 aa, Methanosarcina acetivorans C2A; identical to SEQ ID NO: 58417

SEQ ID NO: 68315 - DNA, 1689 bp, Methanosarcina mazei Go1; identical to SEQ ID NO: 58418
  CDS (1)..(1689): transl_table=11

SEQ ID NO: 68316 - protein, 562 aa, Methanosarcina mazei Go1; identical to SEQ ID NO: 58419

SEQ ID NO: 68317 - DNA, 675 bp, Drosophila melanogaster; identical to SEQ ID NO: 58420
  CDS (1)..(675)

SEQ ID NO: 68318 - protein, 224 aa, Drosophila melanogaster; identical to SEQ ID NO: 58421

SEQ ID NO: 68319 - DNA, 690 bp, Plasmodium falciparum 3D7; identical to SEQ ID NO: 58422
  CDS (1)..(690)

SEQ ID NO: 68320 - protein, 229 aa, Plasmodium falciparum 3D7; identical to SEQ ID NO: 58423

SEQ ID NO: 68321 - DNA, 2040 bp, Oryza sativa (japonica cultivar-group); identical to SEQ ID NO: 58424
  CDS (1)..(2040)

SEQ ID NO: 68322 - protein, 679 aa, Oryza sativa (japonica cultivar-group); identical to SEQ ID NO: 58425

SEQ ID NO: 68323 - DNA, 783 bp, Eremothecium gossypii; identical to SEQ ID NO: 58426
  CDS (1)..(783)

SEQ ID NO: 68324 - protein, 260 aa, Eremothecium gossypii; identical to SEQ ID NO: 58427

SEQ ID NO: 68325 - DNA, 1647 bp, Methanococcus maripaludis S2; identical to SEQ ID NO: 58428
  CDS (1)..(1647): transl_table=11

SEQ ID NO: 68326 - protein, 548 aa, Methanococcus maripaludis S2; identical to SEQ ID NO: 58429

SEQ ID NO: 68327 - DNA, 702 bp, Anopheles gambiae str. PEST; identical to SEQ ID NO: 58430
  CDS (1)..(702)

SEQ ID NO: 68328 - protein, 233 aa, Anopheles gambiae str. PEST; identical to SEQ ID NO: 58431

SEQ ID NO: 68329 - DNA, 735 bp, Rattus norvegicus; identical to SEQ ID NO: 58432
  CDS (1)..(735)

SEQ ID NO: 68330 - protein, 244 aa, Rattus norvegicus; identical to SEQ ID NO: 58433

SEQ ID NO: 68331 - DNA, 741 bp, Rattus norvegicus; identical to SEQ ID NO: 58434
  CDS (1)..(741)

SEQ ID NO: 68332 - protein, 246 aa, Rattus norvegicus; identical to SEQ ID NO: 58435

SEQ ID NO: 68333 - DNA, 810 bp, Magnaporthe grisea 70-15; identical to SEQ ID NO: 58436
  CDS (1)..(810)

SEQ ID NO: 68334 - protein, 269 aa, Magnaporthe grisea 70-15; identical to SEQ ID NO: 58437

SEQ ID NO: 68335 - DNA, 789 bp, Gibberella zeae PH-1; identical to SEQ ID NO: 58438
  CDS (1)..(789)

SEQ ID NO: 68336 - protein, 262 aa, Gibberella zeae PH-1; identical to SEQ ID NO: 58439

SEQ ID NO: 68337 - DNA, 711 bp, Apis mellifera; identical to SEQ ID NO: 58440
  CDS (1)..(711)

SEQ ID NO: 68338 - protein, 236 aa, Apis mellifera; identical to SEQ ID NO: 58441

SEQ ID NO: 68339 - DNA, 966 bp, Gallus gallus; identical to SEQ ID NO: 58442
  CDS (1)..(966)

SEQ ID NO: 68340 - protein, 321 aa, Gallus gallus; identical to SEQ ID NO: 58443

SEQ ID NO: 68341 - DNA, 801 bp, Candida glabrata CBS138; identical to SEQ ID NO: 58444
  CDS (1)..(801)

SEQ ID NO: 68342 - protein, 266 aa, Candida glabrata CBS138; identical to SEQ ID NO: 58445

SEQ ID NO: 68343 - DNA, 792 bp, Kluyveromyces lactis NRRL Y-1140; identical to SEQ ID NO: 58446
  CDS (1)..(792)

SEQ ID NO: 68344 - protein, 263 aa, Kluyveromyces lactis NRRL Y-1140; identical to SEQ ID NO: 58447

SEQ ID NO: 68345 - DNA, 783 bp, Debaryomyces hansenii CBS767; identical to SEQ ID NO: 58448
  CDS (1)..(783)

SEQ ID NO: 68346 - protein, 260 aa, Debaryomyces hansenii CBS767; identical to SEQ ID NO: 58449

SEQ ID NO: 68347 - DNA, 747 bp, Yarrowia lipolytica CLIB99; identical to SEQ ID NO: 58450
  CDS (1)..(747)

SEQ ID NO: 68348 - protein, 248 aa, Yarrowia lipolytica CLIB99; identical to SEQ ID NO: 58451

SEQ ID NO: 68349 - DNA, 762 bp, Pan troglodytes; identical to SEQ ID NO: 58452
  CDS (1)..(762)

SEQ ID NO: 68350 - protein, 253 aa, Pan troglodytes; identical to SEQ ID NO: 58453

SEQ ID NO: 68351 - DNA, 759 bp, Dictyostelium discoideum; identical to SEQ ID NO: 58454
  CDS (1)..(759)

SEQ ID NO: 68352 - protein, 252 aa, Dictyostelium discoideum; identical to SEQ ID NO: 58455

SEQ ID NO: 68353 - DNA, 519 bp, Entamoeba histolytica HM-1:IMSS; identical to SEQ ID NO: 58456
  CDS (1)..(519)

SEQ ID NO: 68354 - protein, 172 aa, Entamoeba histolytica HM-1:IMSS; identical to SEQ ID NO: 58457

SEQ ID NO: 68355 - DNA, 696 bp, Entamoeba histolytica HM-1:IMSS; identical to SEQ ID NO: 58458
  CDS (1)..(696)

SEQ ID NO: 68356 - protein, 231 aa, Entamoeba histolytica HM-1:IMSS; identical to SEQ ID NO: 58459

SEQ ID NO: 68357 - DNA, 858 bp, Aspergillus nidulans FGSC A4; identical to SEQ ID NO: 58460
  CDS (1)..(858)

SEQ ID NO: 68358 - protein, 285 aa, Aspergillus nidulans FGSC A4; identical to SEQ ID NO: 58461

SEQ ID NO: 68359 - DNA, 648 bp, Plasmodium berghei; identical to SEQ ID NO: 58462
  CDS (1)..(648)

SEQ ID NO: 68360 - protein, 215 aa, Plasmodium berghei; identical to SEQ ID NO: 58463

SEQ ID NO: 68361 - DNA, 891 bp, Candida albicans SC5314; identical to SEQ ID NO: 58464
  CDS (1)..(891): transl_table=12

SEQ ID NO: 68362 - protein, 296 aa, Candida albicans SC5314; identical to SEQ ID NO: 58465

SEQ ID NO: 68363 - DNA, 648 bp, Plasmodium chabaudi; identical to SEQ ID NO: 58466
  CDS (1)..(648)

SEQ ID NO: 68364 - protein, 215 aa, Plasmodium chabaudi; identical to SEQ ID NO: 58467

SEQ ID NO: 68365 - DNA, 834 bp, Aspergillus fumigatus Af293; identical to SEQ ID NO: 58468
  CDS (1)..(834)

SEQ ID NO: 68366 - protein, 277 aa, Aspergillus fumigatus Af293; identical to SEQ ID NO: 58469

SEQ ID NO: 68367 - DNA, 1476 bp, Ustilago maydis 521; identical to SEQ ID NO: 58470
  CDS (1)..(1476)

SEQ ID NO: 68368 - protein, 491 aa, Ustilago maydis 521; identical to SEQ ID NO: 58471

SEQ ID NO: 68369 - DNA, 723 bp, Strongylocentrotus purpuratus; identical to SEQ ID NO: 58472
  CDS (1)..(723)

SEQ ID NO: 68370 - protein, 240 aa, Strongylocentrotus purpuratus; identical to SEQ ID NO: 58473

SEQ ID NO: 68371 - DNA, 432 bp, Strongylocentrotus purpuratus; identical to SEQ ID NO: 58474
  CDS (1)..(432)

SEQ ID NO: 68372 - protein, 143 aa, Strongylocentrotus purpuratus; identical to SEQ ID NO: 58475

SEQ ID NO: 68373 - DNA, 774 bp, Trypanosoma cruzi; identical to SEQ ID NO: 58476
  CDS (1)..(774)

SEQ ID NO: 68374 - protein, 257 aa, Trypanosoma cruzi; identical to SEQ ID NO: 58477

SEQ ID NO: 68375 - DNA, 741 bp, Trypanosoma brucei; identical to SEQ ID NO: 58478
  CDS (1)..(741)

SEQ ID NO: 68376 - protein, 246 aa, Trypanosoma brucei; identical to SEQ ID NO: 58479

SEQ ID NO: 68377 - DNA, 909 bp, Canis familiaris; identical to SEQ ID NO: 58480
  CDS (1)..(909)

SEQ ID NO: 68378 - protein, 302 aa, Canis familiaris; identical to SEQ ID NO: 58481

SEQ ID NO: 68379 - DNA, 666 bp, Thermococcus kodakarensis KOD1; identical to SEQ ID NO: 58482
  CDS (1)..(666): transl_table=11

SEQ ID NO: 68380 - protein, 221 aa, Thermococcus kodakarensis KOD1; identical to SEQ ID NO: 58483

SEQ ID NO: 68381 - DNA, 660 bp, Sulfolobus acidocaldarius DSM 639; identical to SEQ ID NO: 58484
  CDS (1)..(660): transl_table=11

SEQ ID NO: 68382 - protein, 219 aa, Sulfolobus acidocaldarius DSM 639; identical to SEQ ID NO: 58485

SEQ ID NO: 68383 - DNA, 1638 bp, Methanosarcina barkeri str. fusaro; identical to SEQ ID NO: 58486
  CDS (1)..(1638): transl_table=11

SEQ ID NO: 68384 - protein, 545 aa, Methanosarcina barkeri str. fusaro; identical to SEQ ID NO: 58487

SEQ ID NO: 68385 - DNA, 1596 bp, Ferroplasma acidarmanus Fer1; identical to SEQ ID NO: 58488
  CDS (1)..(1596): transl_table=11

SEQ ID NO: 68386 - protein, 531 aa, Ferroplasma acidarmanus Fer1; identical to SEQ ID NO: 58489

SEQ ID NO: 68387 - DNA, 879 bp, Leishmania major; identical to SEQ ID NO: 58490
  CDS (1)..(879)

SEQ ID NO: 68388 - protein, 292 aa, Leishmania major; identical to SEQ ID NO: 58491

SEQ ID NO: 68389 - DNA, 627 bp, Theileria annulata; identical to SEQ ID NO: 58492
  CDS (1)..(627)

SEQ ID NO: 68390 - protein, 208 aa, Theileria annulata; identical to SEQ ID NO: 58493

SEQ ID NO: 68391 - DNA, 714 bp, Xenopus laevis; identical to SEQ ID NO: 58494
  CDS (1)..(714)

SEQ ID NO: 68392 - protein, 237 aa, Xenopus laevis; identical to SEQ ID NO: 58495

SEQ ID NO: 68393 - DNA, 1671 bp, Caenorhabditis briggsae; identical to SEQ ID NO: 58496
  CDS (1)..(1671)

SEQ ID NO: 68394 - protein, 556 aa, Caenorhabditis briggsae; identical to SEQ ID NO: 58497

SEQ ID NO: 68395 - DNA, 762 bp, Homo sapiens; identical to SEQ ID NO: 58498
  CDS (1)..(762)

SEQ ID NO: 68396 - protein, 253 aa, Homo sapiens [sequence omitted]

SEQ ID NO: 68397 - DNA, 762 bp, Homo sapiens; identical to SEQ ID NO: 58500
  CDS (1)..(762)

SEQ ID NO: 68398 - protein, 253 aa, Homo sapiens; identical to SEQ ID NO: 58501

SEQ ID NO: 68399 - DNA, 735 bp, Mus musculus; identical to SEQ ID NO: 58502
  CDS (1)..(735)

SEQ ID NO: 68400 - protein, 244 aa, Mus musculus; identical to SEQ ID NO: 58503

SEQ ID NO: 68401 - DNA, 26 bp, Artificial sequence
  Primer sequence
atgacgcaagaattcattgataaagt

SEQ ID NO: 68402 - DNA, 25 bp, Artificial sequence
  Primer sequence
ttatcctagcatacttctcttacga

SEQ ID NO: 68403 - protein, 375 aa, Artificial sequence; identical to SEQ ID NO: 58506
  Consensus
  Variant (2)..(3): Xaa in position 2 to 3 is any amino acid
  Variant (8)..(8): Xaa in position 8 is any amino acid
  Variant (11)..(15): Xaa in position 11 to 15 is any amino acid
  Variant (16)..(103): Xaa in position 16 to 103 is any or no amino acid
  Variant (105)..(105): Xaa in position 105 is any amino acid
  Variant (107)..(107): Xaa in position 107 is any amino acid
  Variant (109)..(110): Xaa in position 109 to 110 is any amino acid
  Variant (112)..(112): Xaa in position 112 is any amino acid
  Variant (115)..(117): Xaa in position 115 to 117 is any amino acid
  Variant (120)..(121): Xaa in position 120 to 121 is any amino acid
  Variant (123)..(125): Xaa in position 123 to 125 is any amino acid
  Variant (127)..(129): Xaa in position 127 to 129 is any amino acid
  Variant (131)..(131): Xaa in position 131 is any amino acid
  Variant (133)..(133): Xaa in position 133 is any amino acid
  Variant (135)..(135): Xaa in position 135 is any amino acid
  Variant (137)..(141): Xaa in position 137 to 141 is any amino acid
  Variant (142)..(143): Xaa in position 142 to 143 is any or no amino acid
  Variant (145)..(146): Xaa in position 145 to 146 is any amino acid
  Variant (148)..(148): Xaa in position 148 is any amino acid
  Variant (150)..(152): Xaa in position 150 to 152 is any amino acid
  Variant (154)..(156): Xaa in position 154 to 156 is any amino acid
  Variant (157)..(167): Xaa in position 157 to 167 is any or no amino acid
  Variant (169)..(169): Xaa in position 169 is any amino acid
  Variant (172)..(172): Xaa in position 172 is any amino acid
  Variant (174)..(181): Xaa in position 174 to 181 is any amino acid
  Variant (182)..(182): Xaa in position 182 is any or no amino acid
  Variant (184)..(186): Xaa in position 184 to 186 is any amino acid
  Variant (187)..(227): Xaa in position 187 to 227 is any or no amino acid
  Variant (229)..(231): Xaa in position 229 to 231 is any amino acid
  Variant (234)..(235): Xaa in position 234 to 235 is any amino acid
  Variant (238)..(238): Xaa in position 238 is any amino acid
  Variant (241)..(243): Xaa in position 241 to 243 is any amino acid
  Variant (257)..(259): Xaa in position 257 to 259 is any amino acid
  Variant (260)..(286): Xaa in position 260 to 286 is any or no amino acid
  Variant (288)..(288): Xaa in position 288 is any amino acid
  Variant (295)..(301): Xaa in position 295 to 301 is any amino acid
  Variant (302)..(306): Xaa in position 302 to 306 is any or no amino acid
  Variant (317)..(317): Xaa in position 317 is any amino acid
  Variant (320)..(321): Xaa in position 320 to 321 is any amino acid
  Variant (323)..(323): Xaa in position 323 is any amino acid
  Variant (325)..(328): Xaa in position 325 to 328 is any amino acid
  Variant (329)..(334): Xaa in position 329 to 334 is any or no amino acid
  Variant (336)..(345): Xaa in position 336 to 345 is any amino acid
  Variant (346)..(362): Xaa in position 346 to 362 is any or no amino acid
  Variant (365)..(365): Xaa in position 365 is any amino acid
  Variant (368)..(369): Xaa in position 368 to 369 is any amino acid
  Variant (372)..(372): Xaa in position 372 is any amino acid

SEQ ID NO: 68404 - protein, 40 aa, Artificial sequence; identical to SEQ ID NO: 58507
  Consensus
  Variant (2)..(3): Xaa in position 2 to 3 is any or no amino acid
  Variant (5)..(5): Xaa in position 5 is any amino acid
  Variant (8)..(10): Xaa in position 8 to 10 is any amino acid
  Variant (11)..(11): Xaa in position 11 is Ile, Leu or Val
  Variant (12)..(12): Xaa in position 12 is Asp, Glu or Asn
  Variant (13)..(14): Xaa in position 13 to 14 is any amino acid
  Variant (15)..(15): Xaa in position 15 is Ile, Leu or Met
  Variant (16)..(18): Xaa in position 16 to 18 is any amino acid
  Variant (20)..(22): Xaa in position 20 to 22 is any amino acid
  Variant (24)..(33): Xaa in position 24 to 33 is any amino acid
  Variant (34)..(34): Xaa in position 34 is Asp, Gly or Asn
  Variant (35)..(35): Xaa in position 35 is Ile, Leu or Val
  Variant (36)..(36): Xaa in position 36 is any amino acid
  Variant (37)..(37): Xaa in position 37 is Ala, Cys, Ser, Thr or Val
  Variant (39)..(39): Xaa in position 39 is any amino acid
  Variant (40)..(40): Xaa in position 40 is Ile, Leu or Val

SEQ ID NO: 68405 - protein, 21 aa, Artificial sequence
  Consensus
  Variant (2)..(3): Xaa in position 2 to 3 is any amino acid
  Variant (4)..(4): Xaa in position 4 is Ile, Leu or Val
  Variant (5)..(5): Xaa in position 5 is Ala, Gly or Ser
  Variant (6)..(6): Xaa in position 6 is any amino acid
  Variant (7)..(7): Xaa in position 7 is Ile, Leu or Met
  Variant (9)..(13): Xaa in position 9 to 13 is any amino acid
  Variant (19)..(20): Xaa in position 19 to 20 is Ser or Thr
GXXXXXXHXXXXXHGDLTXXN

SEQ ID NO: 68406 - protein, 5 aa, Artificial sequence
  Consensus
  Artificial sequence
IDFGL

SEQ ID NO: 68407 - protein, 18 aa, Artificial sequence
  Consensus
  Variant (2)..(2): Xaa in position 2 is Ala, Asp, Glu or Asn
  Variant (3)..(3): Xaa in position 3 is any amino acid
  Variant (4)..(4): Xaa in position 4 is Ala or Gly
  Variant (8)..(8): Xaa in position 8 is any amino acid
  Variant (9)..(9): Xaa in position 9 is Leu or Val
  Variant (10)..(10): Xaa in position 10 is Phe, Leu or Met
  Variant (11)..(11): Xaa in position 11 is any amino acid
  Variant (12)..(12): Xaa in position 12 is Glu, Lys or Arg
  Variant (13)..(13): Xaa in position 13 is Ala, Cys, Ser or Thr
  Variant (14)..(14): Xaa in position 14 is Phe, Ile, Leu, Met or Val
  Variant (15)..(17): Xaa in position 15 to 17 is any amino acid
  Variant (18)..(18): Xaa in position 18 is Glu or His
EXXXVDLXXXXXXXXXXX

SEQ ID NO: 68408 - DNA, 1809 bp, Saccharomyces cerevisiae
  CDS (1)..(1809)
atgatactaaagcttgtacactgtttagttgctcttacaggattaatctttgcaaagccgtatcaacaacaacaggcagttttagcgccgtcgcaggatgtaccattaagagatatccatataggggatataaattttatccatacaaccgatactcatggctggttggggtcccatctatcacaaaacgactatgatgctgactggggagatttcgttgcatttgtagatatacttagagaaaaaattttacgacagtccagagacgtaatagtcatcgacactggcgacaaacgagacggtaatggtttgagtgatgctacttggccccccggcctacgaagctcggagatattcaacatgatggattacgatcttttaacgttaggtaatcatgagctatatacagctgaaagtgccatactagagtatagaggaacttctcagtcctcaaaattcaaagacaaatatgtttgcagcaacgtagaatttattgaagatgacggaacaagggttcctttcgggaataaatacattacattcgagactcccataatgaaacaaagagtcctggcattatcatttttgtttagttttcaaagagcaaataacagagccatcgtaacaccaccattggaagaaataactcaaaaaagctggttccaaaatatggttgagacaaacagagaggaggaaatcgacctaattattgtctttggtcatttgcctgccactgaccctacagagcgtgaaatgcacaaaattcatgctctaataaggaaatactacccaaatactgttatacaatattttggagggcacactcatatcagggattttgtacagctggactcaaaatctacttgtttacaaagtggtagatttgcggaaactgtgggattcttgtcaattaatatgactgaccctgtggacgccgaaagtcctattttctcaagaaggtatattgactttaacaaggaagctttcaaataccatttgagcaaactagggcatgactcgaatgttccagtctcaacgaaaaagggtaaaactatttctcgtttggtgaatgatctgcgccatgaactaaatttgaacgagaaactggggtacattcctcaaacttactacgtttcaacaaggccattaaactccgaagagaatctttatcatttgatcacgcataagattttacccaatttaattcctcccaaaaactatgaaccttcgatgagtcgtttcattttgattaacactggctctgtcaggtacgatctttacaaaggcccatttacaaaggatactgagtatatagtgatgccattcaataatgattggcgcttcatcacagttccattggtcgttgcctccagggtggaaacctatttgaacaagggccctgtcattgcctcattaggaataccatcatcgtctcatcacaaacagcattttggcggttttcagaagtgtcccttcatcaataatccaaatttaagcgaaggctacaccacagaagacgatttcgggtgtcatggtgatgacacacctcacaattcacaaagagaatacgatatccccaatgtagtgcaatgtaaagaggtgaagaaagtgcaagaagaggaagctgatccgtcgaagatggttcatgttatcttctattcctttatggaactcgatatattaaacgccgtaaattctatcataaatgatttaggattacgtatggagaacttgaccaccaatgactgctcccattatggtggtgattcaaccaaaaagttattacgggattacttttctcaattttag

SEQ ID NO: 68409 - protein, 602 aa, Saccharomyces cerevisiae
MILKLVHCLVALTGLIFAKPYQQQQAVLAPSQDVPLRDIHIGDINFIHTTDTHGWLGSHLSQNDYDADWGDFVAFVDILREKILRQSRDVIVIDTGDKRDGNGLSDATWPPGLRSSEIFNMMDYDLLTLGNHELYTAESAILEYRGTSQSSKFKDKYVCSNVEFIEDDGTRVPFGNKYITFETPIMKQRVLALSFLFSFQRANNRAIVTPPLEEITQKSWFQNMVETNREEEIDLIIVFGHLPATDPTEREMHKIHALIRKYYPNTVIQYFGGHTHIRDFVQLDSKSTCLQSGRFAETVGFLSINMTDPVDAESPIFSRRYIDFNKEAFKYHLSKLGHDSNVPVSTKKGKTISRLVNDLRHELNLNEKLGYIPQTYYVSTRPLNSEENLYHLITHKILPNLIPPKNYEPSMSRFILINTGSVRYDLYKGPFTKDTEYIVMPFNNDWRFITVPLVVASRVETYLNKGPVIASLGIPSSSHHKQHFGGFQKCPFINNPNLSEGYTTEDDFGCHGDDTPHNSQREYDIPNVVQCKEVKKVQEEEADPSKMVHVIFYSFMELDILNAVNSIINDLGLRMENLTTNDCSHYGGDSTKKLLRDYFSQF

SEQ ID NO: 68410 - DNA, 1908 bp, Schizosaccharomyces pombe 972h-
  CDS (1)..(1908)
atgaaacctgcccatacattttcattaattttctctcttttatttgttatcaatccttgctattcagcaactttgcccttggcaattcgtcgggaattgacatggggtcaagtcaatattttacacactactgacatccatggctggttagcaggacatgcgcgagataaacgttattcaggagatttaggagatttcgcttcttttgttcaacatatgaagcacttggcaaaacaaaaagacgttgatttactgctagtagataccggcgatcttcatgatggtacgggcctgtcagatctgacagatccccctggtagttggacagattcattacttgcaaatatggattatgatattcttgttgctggaaatcatgagctttatctctcaactgttgcaaatgatacttatcataatttcattcctctgtgggaaggccgatatttagctgcaaacattgacatatatgatgaacatgtttcttcttttgtaccctttggagatcgatatgccatcttttctacaccccacaatgttaaaatccttgcgtttggatttgtaaactcattttctggtgctactgatacggttcgtgtcctcccagtttcgcaattctcgctacagccatggtggaacgatatggtatcaaataaagacatcgatctgattctgattcccgctcatgtacccgttcacaatgcctcagagcttgatatcgttctttcagagcttcggattcacttccctaccactccaatacaagtacttggtggtcattcccatattagagattatgccatttacgatgaaaaagcagtgggaattgagtcaggaagatattgcgaaacagttggttgggtctcaattaacggcattccatccttcaaatcgttggtcaagttatctgggatttcttctttaatgggggtggaatcttatctagctgagcgcttgagatttataggcgaaagtattagacggtcatctcagcagatattttcctctttgcaaagtgctaaatctgccagtgtcagcttctctcgttcctatattgattggaatcccgagggctttatgtttcattcgaaaacaaaaaagtcttctttcaatacctcacttggagaatttatttctaatggcatttacgaagctcggaaggcacttggcttacttactcctataggttgttccccaaaaaagtttgcattttcagaagttccatttaacgattcaaactcaatttatcatctatttcaatccgaactttttccaaaaatagtcgtcaatgagtctcgacatcacattcctcactatattattgtaaattcgggtggcattcgaggtggtctaaattcaggtgcctttggcttagacgaggtctttcaagtctgtccttttaaaagtaatatattctatgttttgaaagatgtcccatggtcgattactaagtacctgccacaagctctacaacacagtggatatctgattgctgaagatactcttcaaattaacactccacaagtttctgatgcaaaatttgaggacttttatgaacactccattcgcaagacatatggatacactacacacgatgatttaggagatgacggagatgacactgctcatcttacaactcctcattatgaaccgctgcggtttatttgctcgcaagttggatttgatgattctttttctggagacgataagcaagttgttgacgttgttgctccatcatttgttattccacgcttagacgacattttaaataaaattgcagataagcctttatattcacctgacgattgggagctttactttacgagacctgacggaaagcattctatgactgatttgttaccattatatgcagatctctattgggaccacgattgcctatataagtaa

SEQ ID NO: 68411 - protein, 635 aa, Schizosaccharomyces pombe 972h-
MKPAHTFSLIFSLLFVINPCYSATLPLAIRRELTWGQVNILHTTDIHGWLAGHARDKRYSGDLGDFASFVQHMKHLAKQKDVDLLLVDTGDLHDGTGLSDLTDPPGSWTDSLLANMDYDILVAGNHELYLSTVANDTYHNFIPLWEGRYLAANIDIYDEHVSSFVPFGDRYAIFSTPHNVKILAFGFVNSFSGATDTVRVLPVSQFSLQPWWNDMVSNKDIDLILIPAHVPVHNASELDIVLSELRIHFPTTPIQVLGGHSHIRDYAIYDEKAVGIESGRYCETVGWVSINGIPSFKSLVKLSGISSLMGVESYLAERLRFIGESIRRSSQQIFSSLQSAKSASVSFSRSYIDWNPEGFMFHSKTKKSSFNTSLGEFISNGIYEARKALGLLTPIGCSPKKFAFSEVPFNDSNSIYHLFQSELFPKIVVNESRHHIPHYIIVNSGGIRGGLNSGAFGLDEVFQVCPFKSNIFYVLKDVPWSITKYLPQALQHSGYLIAEDTLQINTPQVSDAKFEDFYEHSIRKTYGYTTHDDLGDDGDDTAHLTTPHYEPLRFICSQVGFDDSFSGDDKQVVDVVAPSFVIPRLDDILNKIADKPLYSPDDWELYFTRPDGKHSMTDLLPLYADLYWDHDCLYK

SEQ ID NO: 68412 - DNA, 1806 bp, Schizosaccharomyces pombe 972h-
  CDS (1)..(1806)
atgaagacagcctcgatacatttttggtcaacccttgtgcttttgttcagttgtattggttctgtaattgcttactcgtctaccgatttaactacaatgtatgattggaaccaaatcattaaacctttagaatggggtcaaatgaatttcattcatactacggacactcacggttggcttaatggtcaccttagagatgctcgctataaagccgactttggcgaatttaagtcttttgttttgcggatgaaggaattagctgattttaaagacgtagatttattattagttgataccggtgatttacatgacggaaacggactttctgatgcttctgatccagaaggaatatatacaaacaacatttttacgtacctaccctatgatattcttacgattggtaatcacgaattgtaccaagcatccgtttctaataatacccacgaatattttgtacctcactggaatggaacttatctcgcttctaacgttcaaatcttcaactcatcaaatgagttggagcaatttgcggctgaatctgcctactttactacgaaacatggcgttcgagttcttgctgtaggcttcctctacgatttcaccggtaacgccaacaacactgttgttacacctgttgagacagccgtcaactccagatggtatcaacaacaaataaatagaacagatgttgaccttttcttattacttggacatattccggttcgcgattgggacgaatggaagtcactacatgcctcaattagaaaagtgcatcctgatactcccattcaaatctttggcggtcactctcatattcgtgactttgctgtttacgacgagtcttctgtatctcttgagggtggtagatattgtgaaactgtaggctggctttcaattgatggcctagcagcatccaatgcaacccgtcaatatgttggtcgtcccgtcaccaatgaaactcgccagtcgtatcccaatctccctattccaaatacacctctgtattacacgcgccgttacattgatttcaatcgccagaacttccgtttccatactcaacaatcagaagattccttcgataccccagaaggcattgaattatctaaaattattaaacagtatcgcgacgatcttaacctctcatatgtctttggatgcgtccctaaaaactattatatgactgaagtctctcctcaatctgatgacagtatttttaagcttatgactgatcgtgttttgccagaaataattaccaatcgaaaccgttcaactgtgccccgaattatcattagcaatggaggtggtatacgaggttccatgtatcaaggaaaatttggacccgacgaaatgttccaattaaacccttttcttactaattactatatgtatttggcagatgttccttataaatacgctaagaagctatactcgaccttaaacgggggatccaatttacgcaacataaatgaaaatttggctgcccttaatcccggttatgttacaagtgatgattttggtgaagatggagatgatacagtacatacttctgttccttcgtatgctactcctaacattcttcaagcccaagctgggtttaatgctacctcctcgccagaaacaattgatgttgtcttcctcaatttccttcaaagtatcgtgctaaaggctttgaacaatatggcaaatgacactttatatacttcttcaaacgttacacaatactgggttcgtgatgatggttacgacagttctccttattcatttgcctattttgttcaacaagaatggagtgataattgtgattaa
